(19) United States
(12) Patent Application Publication
(10) Pub. No.: US 2025/0223582 A1
(43) Pub. Date: Jul. 10, 2025

(54) ENGINEERED RNA LIGASES

(71) Applicant: Codexis, Inc., Redwood City, CA (US)

(72) Inventors: Oscar Alvizo, Fremont, CA (US); David Elgart, San Mateo, CA (US); Ravi David Garcia, Los Gatos, CA (US); Nikki D. Kruse, San Carlos, CA (US); Mathew G. Miller, San Carlos, CA (US); Jovana Nazor, Milpitas, CA (US); Zhe Rui, Newark, CA (US); Arya Srivastava, Foster City, CA (US)

(21) Appl. No.: 19/009,695

(22) Filed: Jan. 3, 2025

Related U.S. Application Data
(60) Provisional application No. 63/618,203, filed on Jan. 5, 2024.
(60) Provisional application No. 63/554,938, filed on Feb. 16, 2024.
(60) Provisional application No. 63/646,753, filed on May 13, 2024.
(60) Provisional application No. 63/718,750, filed on Nov. 11, 2024.

(51) Int. Cl. C12N 9/00

(52) U.S. Cl. CPC C12N 9/93; C12Y 605/01003

(57) ABSTRACT

The present disclosure relates to engineered RNA ligase polypeptides and compositions thereof, as well as polynucleotides encoding the engineered RNA ligase polypeptides. The present disclosure also provides methods of using the engineered RNA ligase polypeptides or compositions thereof for molecular biological, diagnostic, and other purposes.

### CROSS-REFERENCE TO RELATED APPLICATIONS

[0001] This application claims the benefit of U.S. Provisional Application 63/618,203, filed Jan. 5, 2024, U.S. Provisional Application 63/554,938, filed Feb. 16, 2024, U.S. Provisional Application 63/646,753, filed May 13, 2024, and U.S. Provisional Application 63/718,750, filed Nov. 11, 2024, all of which are incorporated by reference herein.

### REFERENCE TO SEQUENCE LISTING, TABLE OR COMPUTER PROGRAM

[0002] The Sequence Listing concurrently submitted herewith as file name CX10-262WO5_ST26.xml, created on Jan. 3, 2025, with a file size of 6,025,556 bytes, is part of the specification and is incorporated by reference herein.

### TECHNICAL FIELD

[0003] The present disclosure provides engineered RNA ligase polypeptides and compositions thereof, and polynucleotides encoding the engineered RNA ligase polypeptides. The disclosure further provides methods of using the recombinant RNA ligase or compositions thereof for the synthesis of polynucleotides and as molecular biological tools.

### BACKGROUND

[0004] Oligonucleotide therapeutics, either as synthetic single stranded or double stranded polynucleotides, represent a class of therapeutics that exert their biological effects by modulating gene expression. The oligonucleotides are designed primarily to target pre-mRNA, mRNA, or non-coding RNA (e.g., miRNA) to promote RNA degradation, modulate splicing, interrupt translation, or in some instances activate expression. Small interfering RNAs (siRNA) are a class of oligonucleotide therapeutics that are typically double stranded oligonucleotides that act via RISC (RNA-induced silencing complex) pathway, where the strand complementary to an RNA target, also referred to as the guide strand, targets the RNA for degradation or translation inhibition. To improve in vivo stability, the oligonucleotides have modifications at the 2′-position of the sugar residue, such as 2′-O-methyl, 2′-O-ethyl, 2′-O-methoxyethyl, or 2′-fluoro, and contain at the 5′- and 3′-ends non-natural internucleoside linkages, such as a phosphorothioate linkages. Conjugating targeting moieties to the oligonucleotide, such as GalNac and lipid groups, can enhance delivery to cells and tissues.

[0005] Modified oligonucleotides are generally synthesized chemically, such as by solid-phase synthesis using phosphoramidite chemistry. However, chemical synthesis has several disadvantages, including low efficiency in synthesis of long oligonucleotides, difficulty in scale-up of manufacturing, and toxic chemical waste and solvent consumption, e.g., toluene and acetonitrile. To circumvent some of the limitations in chemical synthesis, RNA ligase 2 can be used to ligate shorter oligonucleotides to generate the oligonucleotide therapeutic. Double stranded RNA ligases, also referred to as RNA ligase 2 or RNA ligase II, preferentially join a nick in an RNA duplex. In view of the potential for use of RNA ligase 2 for the synthesis of modified oligonucleotides, desirable are RNA ligases that exhibit increased efficiency and promiscuity in ligating polynucleotides that contain nucleotide analogs, such as modified sugar residues, modified nucleobases, and non-standard internucleoside linkages.

### SUMMARY

[0006] The present disclosure provides engineered RNA ligase polypeptides and compositions thereof, as well as polynucleotides encoding the engineered RNA ligase polypeptides. The present disclosure also provides methods of using the engineered RNA ligase polypeptides and compositions thereof for nucleic acid synthesis, diagnostic assays, and other purposes.

[0007] In one aspect, the present disclosure provides an engineered RNA ligase, or a functional fragment thereof, comprising an amino acid sequence having at least 70%, 75%, 80%, 81%, 82%, 83%, 84%, 85%, 86%, 87%, 88%, 89%, 90%, 91%, 92%, 93%, 94%, 95%, 96%, 97%, 98%, 99%, or more sequence identity to a reference sequence corresponding to residues 12 to 346 of an even-numbered SEQ ID NO. of SEQ ID NOS: 2-1470 and 1478-3058, or to a reference sequence corresponding to an even-numbered SEQ ID NO. of SEQ ID NOs: 2-1470 and 1478-3058, wherein the amino acid sequence comprises one or more substitutions relative to a reference sequence corresponding to residues 12 to 346 of SEQ ID NO: 2, 54, 244, 648, 862, 956, 1088, 1416, 1612, 1840, 1866, 1954, 2062, 2674, 2754, or 2786, or relative to a reference sequence corresponding to SEQ ID NO: 2, 54, 244, 648, 862, 956, 1088, 1416, 1612, 1840, 1866, 1954, 2062, 2674, 2754, or 2786.

[0008] In some embodiments, the engineered RNA ligase comprises an amino acid sequence having at least 70%, 75%, 80%, 81%, 82%, 83%, 84%, 85%, 86%, 87%, 88%, 89%, 90%, 91%, 92%, 93%, 94%, 95%, 96%, 97%, 98%, 99%, or more sequence identity to the reference sequence corresponding to residues 12 to 346 of SEQ ID NO: 2, 54, 244, 648, 862, 956, 1088, 1416, 1612, 1840, 1866, 1954, 2062, 2674, 2754, or 2786, or to the reference sequence corresponding to SEQ ID NO: 2, 54, 244, 648, 862, 956, 1088, 1416, 1612, 1840, 1866, 1954, 2062, 2674, 2754, or 2786, wherein the amino acid sequence comprises one or more substitutions relative to the reference sequence corresponding to residues 12 to 346 of SEQ ID NO: 2, 54, 244, 648, 862, 956, 1088, 1416, 1612, 1840, 1866, 1954, 2062, 2674, 2754, or 2786, or relative to the reference sequence corresponding to SEQ ID NO: 2, 54, 244, 648, 862, 956, 1088, 1416, 1612, 1840, 1866, 1954, 2062, 2674, 2754, or 2786.

[0009] In some embodiments, the engineered RNA ligase comprises an amino acid sequence having at least 70%, 75%, 80%, 81%, 82%, 83%, 84%, 85%, 86%, 87%, 88%, 89%, 90%, 91%, 92%, 93%, 94%, 95%, 96%, 97%, 98%, 99%, or more sequence identity to the reference sequence corresponding to residues 12 to 346 of SEQ ID NO: 2, or to the reference sequence corresponding to SEQ ID NO: 2, wherein the amino acid sequence comprises one or more substitutions relative to the reference sequence corresponding to residues 12 to 346 of SEQ ID NO: 2, or relative to the reference sequence corresponding to SEQ ID NO: 2.

[0010] In some embodiments, the engineered RNA ligase comprises an amino acid sequence having at least 70%, 75%, 80%, 81%, 82%, 83%, 84%, 85%, 86%, 87%, 88%, 89%, 90%, 91%, 92%, 93%, 94%, 95%, 96%, 97%, 98%, 99%, or more sequence identity to the reference sequence corresponding to residues 12 to 346 of SEQ ID NO: 54, 244, 648, 862, or 956, or to the reference sequence corresponding to SEQ ID NO: 54, 244, 648, 862, 956, 1088, 1416, 1612, 1840, 1866, 1954, 2062, 2674, 2754, or 2786, wherein the amino acid sequence comprises one or more substitutions relative to the reference sequence corresponding to residues 12 to 346 of SEQ ID NO: 2, or relative to the reference sequence corresponding to SEQ ID NO: 2.

[0011] In some embodiments, the engineered RNA ligase comprises an amino acid sequence having at least 70%, 75%, 80%, 81%, 82%, 83%, 84%, 85%, 86%, 87%, 88%, 89%, 90%, 91%, 92%, 93%, 94%, 95%, 96%, 97%, 98%, 99%, or more sequence identity to the reference sequence corresponding to residues 12 to 346 of an even-numbered SEQ ID NO. of SEQ ID NOs: 4-1470 and 1478-3058, or to the reference sequence corresponding to an even-numbered SEQ ID NO. of SEQ ID NOs: 4-1470 and 1478-3058, wherein the amino acid sequence comprises one or more substitutions relative to the reference sequence corresponding to residues 12 to 346 of SEQ ID NO: 2, or relative to the reference sequence corresponding to SEQ ID NO: 2.

[0012] In some embodiments, the amino acid sequence of the engineered RNA ligase comprises at least a substitution at amino acid position 10, 11, 12, 13, 15, 17, 18, 21, 23, 25, 26, 28, 29, 30, 32, 33, 37, 38, 39, 40, 41, 42, 45, 52, 54, 56, 57, 58, 60, 61, 62, 64, 65, 67, 71, 73, 74, 75, 77, 80, 81, 83, 84, 86, 87, 89, 90, 91, 93, 95, 97, 99, 100, 101, 102, 103, 104, 105, 106, 107, 109, 113, 114, 116, 117, 119, 121, 122, 123, 125, 126, 127, 128, 129, 131, 135, 137, 140, 141, 143, 144, 148, 150, 154, 156, 157, 158, 159, 160, 161, 162, 165, 169, 170, 171, 173, 175, 177, 178, 179, 181, 183, 184, 185, 190, 191, 192, 193, 194, 197, 198, 204, 206, 208, 210, 212, 213, 214, 215, 218, 223, 224, 226, 228, 229, 230, 232, 236, 238, 241, 243, 247, 248, 249, 250, 251, 252, 253, 254, 255, 256, 257, 258, 260, 261, 264, 265, 266, 267, 268, 270, 271, 272, 274, 276, 277, 280, 282, 283, 286, 288, 289, 290, 291, 292, 294, 295, 296, 297, 298, 299, 300, 301, 302, 305, 306, 307, 310, 311, 315, 316, 317, 318, 323, 324, 325, 326, 327, 330, 331, 332, 334, 335, 336, 337, 338, 341, 342, 344, 345, or 346, or any combinations thereof, wherein the amino acid positions are relative to the reference sequence corresponding to residues 12 to 346 of SEQ ID NO: 2, or relative to the reference sequence corresponding to SEQ ID NO: 2.

[0013] In some embodiments, the amino acid sequence of the engineered RNA ligase comprises at least a substitution at amino acid position 10, 11, 12, 13, 17, 21, 23, 25, 26, 28, 29, 30, 32, 37, 38, 40, 41, 42, 45, 52, 54, 56, 57, 58, 60, 61, 62, 64, 65, 67, 71, 73, 74, 75, 77, 80, 83, 84, 87, 90, 91, 93, 97, 99, 100, 101, 102, 103, 104, 105, 106, 107, 109, 113, 114, 121, 122, 123, 125, 126, 127, 128, 129, 131, 135, 137, 140, 141, 143, 148, 150, 157, 158, 160, 161, 162, 165, 169, 170, 173, 178, 179, 184, 190, 191, 192, 193, 194, 197, 198, 204, 206, 208, 210, 213, 215, 218, 223, 228, 229, 232, 236, 238, 241, 243, 248, 249, 250, 251, 252, 253, 254, 255, 258, 261, 264, 265, 267, 268, 270, 271, 272, 274, 276, 277, 282, 286, 289, 290, 292, 294, 295, 297, 298, 299, 300, 301, 302, 305, 311, 318, 323, 324, 325, 327, 332, 336, 338, 341, 344, or 346, or a substitution 18A/H, 33A/I/T/V, 39P, 86D/L, 89C/D/E/L/N/Q/R/S/T/V/Y, 95A/C/G/I, 116L, 117A/Q, 119L, 144L, 154S/V, 156G/H/S, 171S, 175A, 177K, 181E/N/P/R/S, 183L, 224A/Q/R, 212E/G/K/L, 226R, 230T/V, 247I/L/R/S, 256E/G/M/S/W, 257D/E/G, 260G, 280L/W, 283C/V, 288L/R/W, 291S, 296E/G/L/Q/W, 306G/T, 307K/R, 310H/L/M/N/Q/R/S/T, 315E, 316I/Y, 317E/F/G/Q/V/W, 326C/L, 330A/D/E/G/K, 331D/G/S, 334E, 335Q, 337A/V, 338G/L/M, 342R/S/T, 345Q/S; or any combinations thereof, wherein the amino acid positions are relative to the reference sequence corresponding to residues 12 to 346 of SEQ ID NO: 2, or relative to the reference sequence corresponding to SEQ ID NO: 2.

[0014] In some embodiments, the amino acid sequence of the engineered RNA ligase comprises at least a substitution at amino acid position 11, 12, 23, 25, 29, 37, 38, 75, 86, 89, 93, 101, 122, 143, 157, 183, 192, 194, 198, 212, 214, 230, 241, 248, 249, 250, 251, 254, 266, 268, 280, 291, 295, 298, 307, 316, 318, 326, 330, or 331, or any combinations thereof, wherein the amino acid positions are relative to the reference sequence corresponding to residues 12 to 346 of SEQ ID NO: 2, or relative to the reference sequence corresponding to SEQ ID NO: 2.

[0015] In some embodiments, the amino acid sequence of the engineered RNA ligase comprises at least a substitution at amino acid position 11, 12, 23, 25, 29, 37, 38, 75, 93, 101, 122, 143, 157, 192, 194, 198, 241, 248, 249, 250, 251, 254, 268, 295, 298, or 318; or substitution 86D/L, 89C/D/E/L/N/Q/R/S/T/V/Y, 183L, 212E/G/K/L, 214A/C/H/K/L/Q/Y, 226R, 230T/V, 266C/I, 280L/W, 291H/L/Q/R/S/T/W, 307K/R, 326C/L, 330A/D/E/G/K, or 331D/G/S; or any combinations thereof, wherein the amino acid positions are relative to the reference sequence corresponding to residues 12 to 346 of SEQ ID NO: 2, or relative to the reference sequence corresponding to SEQ ID NO: 2.

[0016] In some embodiments, the amino acid sequence of the engineered RNA ligase further comprises at least a substitution at amino acid position 2, 14, 15, 63, 69, 81, 85, 95, 138, 142, 149, 159, 171, 186, 195, 202, 266, 275, 283, 285, 303, 314, 333, or 339; a substitution 18I, 33L, 39Q/S, 86G, 89G/H/I/M/W, 116N, 117D, 119T, 144W, 154C, 156A/L/N/Q/T, 175K, 177P, 181D, 183V, 185G/K, 2121, 2141, 224Y, 2261, 230D, 247K, 256A, 257L, 260S, 280G/N, 288E, 291P, 296K, 306L, 307E/Q, 310K, 315S/T, 316L, 317A, 326R, 330M/R, 331L/R/W, 334R, 335D/H, 337L, 3421, or 345V; or any combinations thereof, wherein the amino acid positions are relative to the reference sequence corresponding to residues 12 to 346 of SEQ ID NO: 2, or relative to the reference sequence corresponding to SEQ ID NO: 2.

[0017] In some embodiments, the amino acid sequence of the engineered RNA ligase comprises at least a substitution or substitution set at amino acid position(s) 256, 258, 254, 251, 248, 37, 54, 232, 15, 71, 26, 116, 38, 25, 106/251, 52, 33, 247, 37/249/266/316/330/334/335, 21, 11/37/249/266/316, 261, 11/266/316, 11/248/249/266, 331, 11/248/249, 255, 37/249/266/316/334, 266, 11/37/156/249/335, 37/156/248/249/266/334, 334, 156, 11/266/316/334, 11/39/156/248/316, 11/249, 37/156,107/251, 156/249/316, 37/156/316, 11/37/156/249, 11/37/334, 194, 37/316,175, 11/156/249/316, 11/37, 252, 12, 37/266, 11/37/156/266, 11/37/156/248/266, 37/236/248/249, 37/156/248/249, 11/266/330/335, 249, 11/156/248/249/316, 37/249/316, 11, 11/156, 11/37/249, 330, 316, 156/249/266/335, 249/266/316/330/335, 11/156/249, 266/316/330/334/335, 156/248/249/316/334, 37/156/248/249/316, 156/266, 248/249, 156/249/316/330/335, 218, 37/156/248/249/266, 11/37/156/248/249/316, 37/156/316/330, 11/37/248/249/316/330, 11/37/248/249, 249/330/335, 11/37/156/330/334, 40, 11/37/148/249/316, 83, 323, 193, 335, or 257, wherein the amino acid positions are relative to the reference sequence corresponding to residues 12 to 346 of SEQ ID NO: 2, or relative to the reference sequence corresponding to SEQ ID NO: 2.

[0018] In some embodiments, the amino acid sequence of the engineered RNA ligase comprises at least one substitution provided in Tables 5.1, 6.1, 6.2, 7.1, 8.1, 8.2, 9.1, 10.1, 11.1, 12.1, 13.1, 14.1, 15.1, 16.1, 17.1, 18.1, 19.1, 20.1, 21.1, 22.1, 23.1, 24.1, 25.1, and 26.1, wherein the amino acid positions are relative to the reference sequence corresponding to residues 12 to 346 of SEQ ID NO: 2, or relative to the reference sequence corresponding to SEQ ID NO: 2.

[0019] In some embodiments, the amino acid sequence of the engineered RNA ligase comprises at least a substitution or substitution set of an RNA ligase variant provided in Tables 5.1, 6.1, 6.2, 7.1, 8.1, 8.2, 9.1, 10.1, 11.1, 12.1, 13.1, 14.1, 15.1, 16.1, 17.1, 18.1, 19.1, 20.1, 21.1, 22.1, 23.1, 24.1, 25.1, and 26.1, wherein the amino acid positions are relative to the reference sequence corresponding to residues 12 to 346 of SEQ ID NO: 2, or relative to the reference sequence corresponding to SEQ ID NO: 2.

[0020] In some embodiments, the engineered RNA ligase comprises an amino acid sequence having at least 70%, 75%, 80%, 81%, 82%, 83%, 84%, 85%, 86%, 87%, 88%, 89%, 90%, 91%, 92%, 93%, 94%, 95%, 96%, 97%, 98%, 99%, or more sequence identity to a reference sequence comprising a substitution or substitution set provided in Tables 5.1, 6.1, 6.2, 7.1, 8.1, 8.2, 9.1, 10.1, 11.1, 12.1, 13.1, 14.1, 15.1, 16.1, 17.1, 18.1, 19.1, 20.1, 21.1, 22.1, 23.1, 24.1, 25.1, and 26.1, wherein the amino acid positions are relative to the reference sequence corresponding to residues 12 to 346 of SEQ ID NO: 2, or relative to the reference sequence corresponding to SEQ ID NO: 2.

[0021] In some embodiments, the engineered RNA ligase comprises an amino acid sequence having at least 70%, 75%, 80%, 81%, 82%, 83%, 84%, 85%, 86%, 87%, 88%, 89%, 90%, 91%, 92%, 93%, 94%, 95%, 96%, 97%, 98%, 99%, or more sequence identity to the reference sequence corresponding to residues 12 to 346 of SEQ ID NO: 54, 244, 648, 862, 956, 1088, 1416, 1612, 1840, 1866, 1954, 2062, 2674, 2754, or 2786, or to the reference sequence corresponding to SEQ ID NO: 54, 244, 648, 862, 956, 1088, 1416, 1612, 1840, 1866, 1954, 2062, 2674, 2754, or 2786.

[0022] In some embodiments, the engineered RNA ligase comprises an amino acid sequence having at least 70%, 75%, 80%, 81%, 82%, 83%, 84%, 85%, 86%, 87%, 88%, 89%, 90%, 91%, 92%, 93%, 94%, 95%, 96%, 97%, 98%, 99%, or more sequence identity to the reference sequence corresponding to residues 12 to 346 of an even-numbered SEQ ID NO. of SEQ ID NOs: 4-1470 and 1478-3058, or to the reference sequence corresponding to an even-numbered SEQ ID NO. of SEQ ID NOs: 4-1470 and 1478-3058.

[0023] In some embodiments, the engineered RNA ligase comprises an amino acid sequence having at least 70%, 75%, 80%, 81%, 82%, 83%, 84%, 85%, 86%, 87%, 88%, 89%, 90%, 91%, 92%, 93%, 94%, 95%, 96%, 97%, 98%, 99%, or more sequence identity to the reference sequence corresponding to residues 12 to 346 of SEQ ID NO: 54, 244, 648, 862, 956, 1088, 1416, 1612, 1840, 1866, 1954, 2062, 2674, 2754, or 2786, or to the reference sequence corresponding to SEQ ID NO: 54, 244, 648, 862, 956, 1088, 1416, 1612, 1840, 1866, 1954, 2062, 2674, 2754, or 2786, wherein the amino acid sequence comprises one or more substitutions relative to the reference sequence corresponding to residues 12 to 346 of SEQ ID NO: 54, 244, 648, 862, 956, 1088, 1416, 1612, 1840, 1866, 1954, 2062, 2674, 2754, or 2786, or relative to the reference sequence corresponding to SEQ ID NO: 54, 244, 648, 862, 956, 1088, 1416, 1612, 1840, 1866, 1954, 2062, 2674, 2754, or 2786.

[0024] In some embodiments, the engineered RNA ligase comprises an amino acid sequence having at least 70%, 75%, 80%, 81%, 82%, 83%, 84%, 85%, 86%, 87%, 88%, 89%, 90%, 91%, 92%, 93%, 94%, 95%, 96%, 97%, 98%, 99%, or more sequence identity to the reference sequence corresponding to residues 12 to 346 of an even-numbered SEQ ID NO. of SEQ ID NOs: 4-1470 and 1478-3058, or to the reference sequence corresponding to an even-numbered SEQ ID NO. of SEQ ID NOs: 4-1470 and 1478-3058, wherein the amino acid sequence comprises one or more substitutions relative to the reference sequence corresponding to residues 12 to 346 of SEQ ID NO: 54, 244, 648, 862, 956, 1088, 1416, 1612, 1840, 1866, 1954, 2062, 2674, 2754, or 2786, or relative to the reference sequence corresponding to SEQ ID NO: 54, 244, 648, 862, 956, 1088, 1416, 1612, 1840, 1866, 1954, 2062, 2674, 2754, or 2786.

[0025] In some embodiments, the amino acid sequence of the engineered RNA ligase comprises at least a substitution at amino acid position 10, 11, 12, 13, 15, 17, 18, 21, 23, 25, 26, 28, 29, 30, 32, 33, 37, 38, 39, 40, 41, 42, 45, 52, 54, 56, 57, 58, 60, 61, 62, 64, 65, 67, 71, 73, 74, 75, 77, 80, 81, 83, 84, 86, 87, 89, 90, 91, 93, 95, 97, 99, 100, 101, 102, 103, 104, 105, 106, 107, 109, 113, 114, 116, 117, 119, 121, 122, 123, 125, 126, 127, 128, 129, 131, 135, 137, 140, 141, 143, 144, 148, 150, 154, 156, 157, 158, 159, 160, 161, 162, 165, 169, 170, 171, 173, 175, 177, 178, 179, 181, 183, 184, 185, 190, 191, 192, 193, 194, 197, 198, 204, 206, 208, 210, 212, 213, 214, 215, 218, 223, 224, 226, 228, 229, 230, 232, 236, 238, 241, 243, 247, 248, 249, 250, 251, 252, 253, 254, 255, 256, 257, 258, 260, 261, 264, 265, 266, 267, 268, 270, 271, 272, 274, 276, 277, 280, 282, 283, 286, 288, 289, 290, 291, 292, 294, 295, 296, 297, 298, 299, 300, 301, 302, 305, 306, 307, 310, 311, 315, 316, 317, 318, 323, 324, 325, 326, 327, 330, 331, 332, 334, 335, 336, 337, 338, 341, 342, 344, 345, or 346, or any combinations thereof, wherein the amino acid positions are relative to the reference sequence corresponding to residues 12 to 346 of SEQ ID NO: 54, 244, 648, 862, 956, 1088, 1416, 1612, 1840, 1866, 1954, 2062, 2674, 2754, or 2786, or relative to the reference sequence corresponding to SEQ ID NO: 54, 244, 648, 862, 956, 1088, 1416, 1612, 1840, 1866, 1954, 2062, 2674, 2754, or 2786.

[0026] In some embodiments, the amino acid sequence of the engineered RNA ligase comprises at least a substitution at amino acid position 10, 11, 12, 13, 17, 21, 23, 25, 26, 28, 29, 30, 32, 37, 38, 40, 41, 42, 45, 52, 54, 56, 57, 58, 60, 61, 62, 64, 65, 67, 71, 73, 74, 75, 77, 80, 83, 84, 87, 90, 91, 93, 97, 99, 100, 101, 102, 103, 104, 105, 106, 107, 109, 113, 114, 121, 122, 123, 125, 126, 127, 128, 129, 131, 135, 137, 140, 141, 143, 148, 150, 157, 158, 160, 161, 162, 165, 169, 170, 173, 178, 179, 184, 190, 191, 192, 193, 194, 197, 198, 204, 206, 208, 210, 213, 215, 218, 223, 228, 229, 232, 236, 238, 241, 243, 248, 249, 250, 251, 252, 253, 254, 255, 258, 261, 264, 265, 267, 268, 270, 271, 272, 274, 276, 277, 282, 286, 289, 290, 292, 294, 295, 297, 298, 299, 300, 301, 302, 305, 311, 318, 323, 324, 325, 327, 332, 336, 338, 341, 344, or 346; a substitution or amino acid residue 18A/H, 33A/I/T/V, 39P, 86D/L, 89C/D/E/L/N/Q/R/S/T/V/Y, 95A/C/G/I, 116L, 117A/Q, 119L, 144L, 154S/V, 156G/H/S, 171S, 175A, 177K, 181E/N/P/R/S, 183L, 212E/G/K/L, 224A/Q/R, 226R, 230T/V, 247I/L/R/S, 256E/G/M/S/W, 257D/E/G, 260G, 280L/W, 283C/V, 288L/R/W, 291S, 296E/G/L/Q/W, 306G/T, 307K/R, 310H/L/M/N/Q/R/S/T, 315E, 316I/Y, 317E/F/G/Q/V/W, 326C/L, 330A/D/E/G/K, 331D/G/S, 334E, 335Q, 337A/V, 338G/L/M, 342R/S/T, or 345Q/S; or any combinations thereof, wherein the amino acid positions are relative to the reference sequence corresponding to residues 12 to 346 of SEQ ID NO: 54, 244, 648, 862, 956, 1088, 1416, 1612, 1840, 1866, 1954, 2062, 2674, 2754, or 2786, or relative to the reference sequence corresponding to SEQ ID NO: 54, 244, 648, 862, 956, 1088, 1416, 1612, 1840, 1866, 1954, 2062, 2674, 2754, or 2786.

[0027] In some embodiments, the amino acid sequence of the engineered RNA ligase comprises at least a substitution at amino acid position 11, 12, 23, 25, 29, 37, 38, 75, 86, 89, 93, 101, 122, 143, 157, 183, 192, 194, 198, 212, 214, 230, 241, 248, 249, 250, 251, 254, 266, 268, 280, 291, 295, 298, 307, 316, 318, 326, 330, or 331, or any combinations thereof, wherein the amino acid positions are relative to the reference sequence corresponding to residues 12 to 346 of SEQ ID NO: 54, 244, 648, 862, 956, 1088, 1416, 1612, 1840, 1866, 1954, 2062, 2674, 2754, or 2786, or relative to the reference sequence corresponding to SEQ ID NO: 54, 244, 648, 862, 956, 1088, 1416, 1612, 1840, 1866, 1954, 2062, 2674, 2754, or 2786.

[0028] In some embodiments, the amino acid sequence of the engineered RNA ligase comprises at least a substitution at amino acid position 11, 12, 23, 25, 29, 37, 38, 75, 93, 101, 122, 143, 157, 192, 194, 198, 241, 248, 249, 250, 251, 254, 268, 295, 298, or 318; a substitution or amino acid residue 86D/L, 89C/D/E/L/N/Q/R/S/T/V/Y, 183L, 212E/G/K/L, 214A/C/H/K/L/Q/Y, 226R, 230T/V, 266C/I, 280L/W, 291H/L/Q/R/S/T/W, 307K/R, 326C/L, 330A/D/E/G/K, or 331D/G/S; or any combinations thereof, wherein the amino acid positions are relative to the reference sequence corresponding to residues 12 to 346 of SEQ ID NO: 54, 244, 648, 862, 956, 1088, 1416, 1612, 1840, 1866, 1954, 2062, 2674, 2754, or 2786, or relative to the reference sequence corresponding to SEQ ID NO: 54, 244, 648, 862, 956, 1088, 1416, 1612, 1840, 1866, 1954, 2062, 2674, 2754, or 2786.

[0029] In some embodiments, the amino acid sequence of the engineered RNA ligase further comprises at least a substitution at amino acid position 2, 14, 15, 63, 69, 81, 85, 95, 138, 142, 149, 159, 171, 186, 195, 202, 266, 275, 283, 285, 303, 314, 333, or 339; a substitution or amino acid residue 181, 33L, 39Q/S, 86G, 89G/H/I/M/W, 116N, 117D, 119T, 144W, 154C, 156A/L/N/Q/T, 175K, 177P, 181D, 183V, 185G/K, 212I, 2141, 224Y, 2261, 230D, 247K, 256A, 257L, 260S, 280G/N, 288E, 291P, 296K, 306L, 307E/Q, 310K, 315S/T, 316L, 317A, 326R, 330M/R, 331L/R/W, 334R, 335D/H, 337L, 342I, or 345V; or any combinations thereof, wherein the amino acid positions are relative to the reference sequence corresponding to residues 12 to 346 of SEQ ID NO: 54, 244, 648, 862, 956, 1088, 1416, 1612, 1840, 1866, 1954, 2062, 2674, 2754, or 2786, or relative to the reference sequence corresponding to SEQ ID NO: 54, 244, 648, 862, 956, 1088, 1416, 1612, 1840, 1866, 1954, 2062, 2674, 2754, or 2786.

[0030] In some embodiments, the engineered RNA ligase comprises an amino acid sequence having at least 70%, 75%, 80%, 81%, 82%, 83%, 84%, 85%, 86%, 87%, 88%, 89%, 90%, 91%, 92%, 93%, 94%, 95%, 96%, 97%, 98%, 99%, or more sequence identity to the reference sequence corresponding to residues 12 to 346 of SEQ ID NO: 54, or to the reference sequence corresponding to SEQ ID NO: 54, wherein the amino acid sequence comprises one or more substitutions relative to the reference sequence corresponding to residues 12 to 346 of SEQ ID NO: 54, or relative to the reference sequence corresponding to SEQ ID NO: 54.

[0031] In some embodiments, the engineered RNA ligase comprises an amino acid sequence having at least 70%, 75%, 80%, 81%, 82%, 83%, 84%, 85%, 86%, 87%, 88%, 89%, 90%, 91%, 92%, 93%, 94%, 95%, 96%, 97%, 98%, 99%, or more sequence identity to the reference sequence corresponding to residues 12 to 346 of an even-numbered SEQ ID NO. of SEQ ID NOs: 220-630, or to the reference sequence corresponding to an even-numbered SEQ ID NO. of SEQ ID NOs: 220-630, wherein the amino acid sequence comprises one or more substitutions relative to the reference sequence corresponding to residues 12 to 346 of SEQ ID NO: 54, or relative to the reference sequence corresponding to SEQ ID NO: 54.

[0032] In some embodiments, the amino acid sequence of the engineered RNA ligase comprises at least a substitution or substitution set at amino acid position(s) 156/232/334/335, 12/254/256, 12/230, 12/230/251, 12/230/251/254/256, 12/38/230, 230/251, 12/38/254, 230/256, 254, 230, 12/230/254, 12/38/230/251/256, 12/251, 12/251/254/256, 38, 12/230/256, 12, 12/25/38/230/251, 12/38/102/230/251/256, 12/256, 38/230/256, 256, 12/230/251/256, 230/251/254, 230/254, 251/254, 12/25/230, 38/230, 38/251, 12/38/230/256, 102, 251, 12/25/251/256, 12/102/256, 12/38/230/251/254/256, 12/251/256, 102/230/251/254/256, 12/38/251, 12/230/251/254, 156/248/334/335, 12/25/38, 12/102/230/251/254, 12/38/251/254, 12/251/254, 12/102, 38/230/251/254/256, 12/25/230/251/256, 12/230/311, 12/254, 38/230/251/254, 12/38/251/256, 156/334/335, 257/258/334, 12/25/38/251/256, 334, 12/25/230/254/256, 38/251/256, 12/38/230/251/254, 12/38, 257/258/334/335, 12/38/254/256, 232/248/257/258/334/335, 156/258/334/335, 156/249/334/335, 12/102/230/254, 25, 156/257/258/334/335, 12/102/230, 156/248/257/258/334, 248/249/334/335, 232/257/258/334/335, 334/335, 156/334, 12/38/102/256, 156/257/334/335, 12/140/251/254, 251/254/256, 248/334/335, 156/258/334, 156/248/330/335, 12/38/256, 232/334/335, 156/249/334, 330/334/335, 156/248/334, 156/335, 257/334, 248/334, 232/248/334/335, 12/25/38/230/251/256, 156/248/249/334/335, 330/335, 248/257/334/335, 232/248/334, 156/232/248/334/335, 232/257/330/334, 156/248/291/334/335, 156/232/248/257/258/334, 156/232/249/334/335, 12/25, 156/248/330/334/335, 156/248/249/334, 232/248/330/335, 156/232/330/334/335, 197, 338, 327, 192, 331, 326, 345, 101, 100, 141, 198, 64, 306, 317, 265, 296, 194, 62, 90, 307, 103, 210, 105, or 61, wherein the amino acid positions are relative to the reference sequence corresponding to residues 12 to 346 of SEQ ID NO: 54, or relative to the reference sequence corresponding to SEQ ID NO: 54.

[0033] In some embodiments, the engineered RNA ligase comprises an amino acid sequence having at least 70%, 75%, 80%, 81%, 82%, 83%, 84%, 85%, 86%, 87%, 88%, 89%, 90%, 91%, 92%, 93%, 94%, 95%, 96%, 97%, 98%, 99%, or more sequence identity to the reference sequence corresponding to residues 12 to 346 of SEQ ID NO: 244, or to the reference sequence corresponding to SEQ ID NO: 244, wherein the amino acid sequence comprises one or more substitutions relative to the reference sequence corresponding to residues 12 to 346 of SEQ ID NO: 244, or relative to the reference sequence corresponding to SEQ ID NO: 244.

[0034] In some embodiments, the engineered RNA ligase comprises an amino acid sequence having at least 70%, 75%, 80%, 81%, 82%, 83%, 84%, 85%, 86%, 87%, 88%, 89%, 90%, 91%, 92%, 93%, 94%, 95%, 96%, 97%, 98%, 99%, or more sequence identity to the reference sequence corresponding to residues 12 to 346 of an even-numbered SEQ ID NO. of SEQ ID NOs: 632-820, or to the reference sequence corresponding to an even-numbered SEQ ID NO. of SEQ ID NOs: 632-820, wherein the amino acid sequence comprises one or more substitutions relative to the reference sequence corresponding to residues 12 to 346 of SEQ ID NO: 244, or relative to the reference sequence corresponding to SEQ ID NO: 244.

[0035] In some embodiments, the amino acid sequence of the engineered RNA ligase comprises at least a substitution or substitution set at amino acid position(s) 141/197/326/327, 100/101/338, 141/198/326, 64/100/101, 100/338, 101/141/198/326, 101/198/326/327, 198/326, 64/100/101/338/345, 197/326, 198/327, 141/198/327, 198/326/327, 197/326/327, 64/100/338, 64/100/101/156/197/338, 64/100/101/338, 100/197/338, 197/338, 101/197/326, 64/100/197/338, 101/198, 141/197/327, 64/100/101/197/338, 101/326, 101/197/326/327, 197/327, 197, 141/197, 101, 101/198/326, 64/197/198/338, 141, 101/141, 100/101/197/338, 141/326, 338, 326, 197/198/338, 64/101/338, 64/197/198, 101/197, 100/101, 100/109/197/338, 101/197/338, 197/198, 141/326/327, 100/197, 64/100, 64/197/338, 100/197/198, 101/338, 141/327, 101/306, 64/100/101/197, 101/326/327, 100, 327, 326/345, 64/100/101/197/198, 326/327, 64/101,100/101/197, 101/327, 64/100/197/198/338, 306, 64/338,101/141/326/327, 64/101/197/338, or 101/198/306/327, wherein the amino acid positions are relative to the reference sequence corresponding to residues 12 to 346 of SEQ ID NO: 244, or relative to the reference sequence corresponding to SEQ ID NO: 244.

[0036] In some embodiments, the engineered RNA ligase comprises an amino acid sequence having at least 70%, 75%, 80%, 81%, 82%, 83%, 84%, 85%, 86%, 87%, 88%, 89%, 90%, 91%, 92%, 93%, 94%, 95%, 96%, 97%, 98%, 99%, or more sequence identity to the reference sequence corresponding to residues 12 to 346 of SEQ ID NO: 648, or to the reference sequence corresponding to SEQ ID NO: 648, wherein the amino acid sequence comprises one or more substitutions relative to the reference sequence corresponding to residues 12 to 346 of SEQ ID NO: 648, or relative to the reference sequence corresponding to SEQ ID NO: 648.

[0037] In some embodiments, the engineered RNA ligase comprises an amino acid sequence having at least 70%, 75%, 80%, 81%, 82%, 83%, 84%, 85%, 86%, 87%, 88%, 89%, 90%, 91%, 92%, 93%, 94%, 95%, 96%, 97%, 98%, 99%, or more sequence identity to the reference sequence corresponding to residues 12 to 346 of an even-numbered SEQ ID NO. of SEQ ID NOs: 822-954, or to the reference sequence corresponding to an even-numbered SEQ ID NO. of SEQ ID NOs: 822-954, wherein the amino acid sequence comprises one or more substitutions relative to the reference sequence corresponding to residues 12 to 346 of SEQ ID NO: 648, or relative to the reference sequence corresponding to SEQ ID NO: 648.

[0038] In some embodiments, the amino acid sequence of the engineered RNA ligase comprises at least a substitution or substitution set at amino acid position(s) 194/330/331, 298, 331, 192/193/194/298, 330, 192/330/331, 192/193/194/331, 298/330/331, 194/298/330/331, 192/193/330/331, 192/298/331, 192/193, 194/330, 60/100/156, 193/296/331, 298/331, 193/194/330/331, 194, 194/298/331, 193/298, 193/330, 192, 192/193/194/298/331, 192/193/194/298/330, 192/193/298/331, 100/156, 62/100,298/330, 60/100, 192/193/298/330/331, 100, 193/194/298, 338, 62, 247, 18, 37, 254, 33, 261, 251, 260, 12, 117, 256, 255, 38, 29, 25, or 252, wherein the amino acid positions are relative to the reference sequence corresponding to residues 12 to 346 of SEQ ID NO: 648, or relative to the reference sequence corresponding to SEQ ID NO: 648.

[0039] In some embodiments, the engineered RNA ligase comprises an amino acid sequence having at least 70%, 75%, 80%, 81%, 82%, 83%, 84%, 85%, 86%, 87%, 88%, 89%, 90%, 91%, 92%, 93%, 94%, 95%, 96%, 97%, 98%, 99%, or more sequence identity to the reference sequence corresponding to residues 12 to 346 of SEQ ID NO: 862, or to the reference sequence corresponding to SEQ ID NO: 862, wherein the amino acid sequence comprises one or more substitutions relative to the reference sequence corresponding to residues 12 to 346 of SEQ ID NO: 862, or relative to the reference sequence corresponding to SEQ ID NO: 862.

[0040] In some embodiments, the engineered RNA ligase comprises an amino acid sequence having at least 70%, 75%, 80%, 81%, 82%, 83%, 84%, 85%, 86%, 87%, 88%, 89%, 90%, 91%, 92%, 93%, 94%, 95%, 96%, 97%, 98%, 99%, or more sequence identity to the reference sequence corresponding to residues 12 to 346 of an even-numbered SEQ ID NO. of SEQ ID NOs: 956-1078, or to the reference sequence corresponding to an even-numbered SEQ ID NO. of SEQ ID NOs: 956-1078, wherein the amino acid sequence comprises one or more substitutions relative to the reference sequence corresponding to residues 12 to 346 of SEQ ID NO: 862, or relative to the reference sequence corresponding to SEQ ID NO: 862.

[0041] In some embodiments, the amino acid sequence of the engineered RNA ligase comprises at least a substitution or substitution set at amino acid position(s) 254, 18/254,247/317, 37/317/342, 33, 18/156/254, 18, 156, 254/338, 254/307, 33/37/317, 37, 37/156/317, 156/265/317, 265/317, 156/254, 33/156/317, 317, 156/317, 37/317, 18/338,338, 156/247/317, 33/317, 37/247/265/317, 33/37/156/317, 156/247/296/317, 18/307,156/296/317, 156/247, 37/247/317, 18/254/307, 307, 265, 33/37, 18/156, 33/156/296/317, 18/156/254/338, 37/265/317, 33/37/156/247/317, 296, 33/296/317, 156/296, 247/296/317, 37/296/317, 247/296, 33/37/156, 296/317, 156/254/307, 18/156/307, or 33/37/265, wherein the amino acid positions are relative to the reference sequence corresponding to residues 12 to 346 of SEQ ID NO: 862, or relative to the reference sequence corresponding to SEQ ID NO: 862.

[0042] In some embodiments, the engineered RNA ligase comprises an amino acid sequence having at least 70%, 75%, 80%, 81%, 82%, 83%, 84%, 85%, 86%, 87%, 88%, 89%, 90%, 91%, 92%, 93%, 94%, 95%, 96%, 97%, 98%, 99%, or more sequence identity to the reference sequence corresponding to residues 12 to 346 of SEQ ID NO: 956, or to the reference sequence corresponding to SEQ ID NO: 956, wherein the amino acid sequence comprises one or more substitutions relative to the reference sequence corresponding to residues 12 to 346 of SEQ ID NO: 956, or relative to the reference sequence corresponding to SEQ ID NO: 956.

[0043] In some embodiments, the engineered RNA ligase comprises an amino acid sequence having at least 70%, 75%, 80%, 81%, 82%, 83%, 84%, 85%, 86%, 87%, 88%, 89%, 90%, 91%, 92%, 93%, 94%, 95%, 96%, 97%, 98%, 99%, or more sequence identity to the reference sequence corresponding to residues 12 to 346 of an even-numbered SEQ ID NO. of SEQ ID NOs: 1080-1374, or to the reference sequence corresponding to an even-numbered SEQ ID NO. of SEQ ID NOs: 1080-1374, wherein the amino acid sequence comprises one or more substitutions relative to the reference sequence corresponding to residues 12 to 346 of SEQ ID NO: 956, or relative to the reference sequence corresponding to SEQ ID NO: 956.

[0044] In some embodiments, the amino acid sequence of the engineered RNA ligase comprises at least a substitution or substitution set at amino acid position(s) 12/25/29/156, 12/255/256/257, 12/156/255, 247/252, 12/25, 12, 12/25/29/156/255, 256, 12/156, 12/25/156/255/256/257/261, 18/247/251, 25/255/256/257, 12/25/257, 255/257, 12/25/29/255/257, 256/257, 12/255/257, 12/156/255/256/257, 25, 18/38/251/252, 12/256/257/261, 12/29, 12/25/255/256/257/261, 38, 1225/29/256/257, 29/257, 12/261,251, 249/251, 12/255, 12/29/156/256/257, 252, 255/257/261, 18, 29/255/257, 255/256/257, 12/25/29/156/256/257, 25/255/256/257/261, 29/255/256/257/261, 25/256, 18/38/247/252/327, 18/247, 25/29, 12/25/156/255/257, 18/156/251/252, 12/255/261, 25/255, 12/255/256/261, 156/255/257, 156/257, 12/156/256/257, 25/156/256/257, 12/25/29/156/257/261, 25/261, 12/156/255/256/261, 12/25/29/255/256/257, 38/252,255, 249/252, 12/156/255/256, 12/25/29/261, 257, 12/255/256, 12/29/255, 12/255/257/261, 12/156/257, 192/249/251/252, 12/25/29/255/261, 12/156/255/257, 12/29/255/257, 12/29/256/257, 18/252,249, 156/250, 38/251/252, 156/255/256/257, 25/257, 12/255/256/257/261, 25/156/261, 156/252, 12/25/255/256/257, 12/25/29/156/255/257, 29/156,251/252, 256/257/261, 25/156/255/256/257, 156/249/251/252, 25/29/255, 12/29/156, 255/256, 38/250/252, 247/249/252, 12/256/257, 60, 12/256, 12/156/256, 25/255/257/261, 12/25/29/255/256/261, 12/29/156/255/256, 12/25/156/255/256, 247/251/252, 256/261, 38/251, 12/25/29/156/261, 12/257,156/255/256/261, 12/25/156/255, 12/25/29/156/255/257/261, 12/29/256/261, 29/156/261, 25/29/156/257/261, 12/25/255/256/261, or 12/156/255/261, wherein the amino acid positions are relative to the reference sequence corresponding to residues 12 to 346 of SEQ ID NO: 956, or relative to the reference sequence corresponding to SEQ ID NO: 956.

[0045] In some embodiments, the amino acid sequence of the engineered RNA ligase comprises at least a substitution at amino acid position 157, 183, 95, 185, 181, 213, 89, 28, 190, 214, or 143, or any combinations thereof, wherein the amino acid positions are relative to the reference sequence corresponding to residues 12 to 346 of SEQ ID NO: 956, or relative to the reference sequence corresponding to SEQ ID NO: 956.

[0046] In some embodiments, the engineered RNA ligase comprises an amino acid sequence having at least 70%, 75%, 80%, 81%, 82%, 83%, 84%, 85%, 86%, 87%, 88%, 89%, 90%, 91%, 92%, 93%, 94%, 95%, 96%, 97%, 98%, 99%, or more sequence identity to the reference sequence corresponding to residues 12 to 346 of SEQ ID NO: 1088, or to the reference sequence corresponding to SEQ ID NO: 1088, wherein the amino acid sequence comprises one or more substitutions relative to the reference sequence corresponding to residues 12 to 346 of SEQ ID NO: 1088, or relative to the reference sequence corresponding to SEQ ID NO: 1088.

[0047] In some embodiments, the engineered RNA ligase comprises an amino acid sequence having at least 70%, 75%, 80%, 81%, 82%, 83%, 84%, 85%, 86%, 87%, 88%, 89%, 90%, 91%, 92%, 93%, 94%, 95%, 96%, 97%, 98%, 99%, or more sequence identity to the reference sequence corresponding to residues 12 to 346 of an even-numbered SEQ ID NO. of SEQ ID NOs: 1376-1434, or to the reference sequence corresponding to an even-numbered SEQ ID NO. of SEQ ID NOs: 1376-1434, wherein the amino acid sequence comprises one or more substitutions relative to the reference sequence corresponding to residues 12 to 346 of SEQ ID NO: 1088, or relative to the reference sequence corresponding to SEQ ID NO: 1088.

[0048] In some embodiments, the amino acid sequence of the engineered RNA ligase comprises at least a substitution or substitution set at amino acid position(s) 95/157, 95/183/185/214, 89/183, 28/89/143/183, 28/143/157, 181/183, 143/181/183/214, 143/181/183, 89/143/183, 28/143/181/183, 143/157, 95/181/183, 157, 143/183, 89/143/157/183, 89/95/157, 89/157, 89/95/143/181, 95/143, 89/157/183/214, 143/214, 143/181/183/185, 28/95/143, 143/183/214, 28/95/183/214, 89/143/157, 28/95, 95/143/183/185, or 95/143/157/183, wherein the amino acid positions are relative to the reference sequence corresponding to residues 12 to 346 of SEQ ID NO: 1088, or relative to the reference sequence corresponding to SEQ ID NO: 1088.

[0049] In some embodiments, the engineered RNA ligase comprises an amino acid sequence having at least 70%, 75%, 80%, 81%, 82%, 83%, 84%, 85%, 86%, 87%, 88%, 89%, 90%, 91%, 92%, 93%, 94%, 95%, 96%, 97%, 98%, 99%, or more sequence identity to the reference sequence corresponding to residues 12 to 346 of SEQ ID NO: 1416, or to the reference sequence corresponding to SEQ ID NO: 1416, wherein the amino acid sequence comprises one or more substitutions relative to the reference sequence corresponding to residues 12 to 346 of SEQ ID NO: 1416, or relative to the reference sequence corresponding to SEQ ID NO: 1416.

[0050] In some embodiments, the engineered RNA ligase comprises an amino acid sequence having at least 70%, 75%, 80%, 81%, 82%, 83%, 84%, 85%, 86%, 87%, 88%, 89%, 90%, 91%, 92%, 93%, 94%, 95%, 96%, 97%, 98%, 99%, or more sequence identity to the reference sequence corresponding to residues 12 to 346 of an even-numbered SEQ ID NO. of SEQ ID NOs: 1436-1470, 1478-1766, and 1908-1946, or to the reference sequence corresponding to an even-numbered SEQ ID NO. of SEQ ID NOs: 1436-1470, 1478-1766, and 1908-1946, wherein the amino acid sequence comprises one or more substitutions relative to the reference sequence corresponding to residues 12 to 346 of SEQ ID NO: 1416, or relative to the reference sequence corresponding to SEQ ID NO: 1416.

[0051] In some embodiments, the amino acid sequence of the engineered RNA ligase comprises at least a substitution or substitution set at amino acid position(s) 83/137/150, 137/213, 137, 150/190, 143/150, 104/150, 60/143/150/190, 60/150/190/213, 104/137/154, 123/137, 137/150/154/190, 123/143/150, 60/104/143/150/213, 60/95/143/190, 123/137/190, 60/123,104/123, or 60/123/143, wherein the amino acid positions are relative to the reference sequence corresponding to residues 12 to 346 of SEQ ID NO: 1416, or relative to the reference sequence corresponding to SEQ ID NO: 1416.

[0052] In some embodiments, the amino acid sequence of the engineered RNA ligase comprises at least a substitution or substitution set at amino acid position(s) 38, 249, 255, 23, 33, 25, 226, 29, 37, 10, 250, 75, 230, 77, 251, 228, 81, 224, 64, 254, 268, 65, 232, 332, 331, 330, 101, 307, 137, 223, 280, 289, 288, 342, 93, 296, 86, 241, 126, 277, 87, 247, 243, 84, 83, 192, 105, 25/29, 25/29/250, 25/29/75/77/250/255, 25/75/230, 25/77/226/255, 25/230,250/255, 29/75/226/230/255, 29/75/77, 29/75/77/226, 29/75/77/230/255, 29/226, 29/226/230, 29/230/255, 33/228, 33/249, 33/37/228, 33/37/38/228, 33/37/38/228/249, 33/38, 75/250/255, 75/226, 75/226/250/255, 75/226/230/250/255, 75/77, 75/77/255, 75/77/250/255, 75/77/226/255, 75/77/226/250/255, 75/77/230, 75/77/230/250, 75/230, 75/230/255, 75/230/250, 226/255, 226/250, 226/230, 226/230/255, 37/228, 37/228/249, 37/38, 37/38/228, 37/38/228/249, 37/38/249, 38/249/291, 10/228, 10/228/249, 10/33/249, 10/33/37, 10/33/37/38/249, 10/33/38/249, 10/33/38, 10/33/249/251, 10/33/37/228, 10/33/37/249, 10/33/37/38/228/249, 10/33/37/38, 10/249, 10/37, 10/37/228, 10/37/228/249, 10/37/249, 10/37/38/228, 10/37/38/228/249, 10/37/38, 10/38/249, 10/38, 10/38/228, 77/255, 77/250, 77/250/255, 77/226, 77/226/255, 77/230, 77/230/255, 230/255, 230/250, 230/250/255, 23/25/226/255, 23/25/226/230, or 23/25/230, wherein the amino acid positions are relative to the reference sequence corresponding to residues 12 to 346 of SEQ ID NO: 1416, or relative to the reference sequence corresponding to SEQ ID NO: 1416.

[0053] In some embodiments, the amino acid sequence of the engineered RNA ligase comprises at least a substitution or substitution set at amino acid position(s) 86, 255, 306, 250, 75, 318, 335, 241, 248, 344, 38, 272, 83, 257, 258, or 323, wherein the amino acid positions are relative to the reference sequence corresponding to residues 12 to 346 of SEQ ID NO: 1416, or relative to the reference sequence corresponding to SEQ ID NO: 1416.

[0054] In some embodiments, the engineered RNA ligase comprises an amino acid sequence having at least 70%, 75%, 80%, 81%, 82%, 83%, 84%, 85%, 86%, 87%, 88%, 89%, 90%, 91%, 92%, 93%, 94%, 95%, 96%, 97%, 98%, 99%, or more sequence identity to the reference sequence corresponding to residues 12 to 346 of SEQ ID NO: 1612, or to the reference sequence corresponding to SEQ ID NO: 1612, wherein the amino acid sequence comprises one or more substitutions relative to the reference sequence corresponding to residues 12 to 346 of SEQ ID NO: 1612, or relative to the reference sequence corresponding to SEQ ID NO: 1612.

[0055] In some embodiments, the engineered RNA ligase comprises an amino acid sequence having at least 70%, 75%, 80%, 81%, 82%, 83%, 84%, 85%, 86%, 87%, 88%, 89%, 90%, 91%, 92%, 93%, 94%, 95%, 96%, 97%, 98%, 99%, or more sequence identity to the reference sequence corresponding to residues 12 to 346 of an even-numbered SEQ ID NO. of SEQ ID NOs: 1768-1840, or to the reference sequence corresponding to an even-numbered SEQ ID NO. of SEQ ID NOs: 768-1840, wherein the amino acid sequence comprises one or more substitutions relative to the reference sequence corresponding to residues 12 to 346 of SEQ ID NO: 1612, or relative to the reference sequence corresponding to SEQ ID NO: 1612.

[0056] In some embodiments, the amino acid sequence of the engineered RNA ligase comprises at least a substitution or substitution set at amino acid position(s) 101, 291, 291/307, 331, 33/75, 33/75/249/291/331, 33/38, 33/93/249, 38/75/291/307, 38/75/249/250, 38/75/93/271, 38/93, 10/75, 10/38/75, 10/38/75/291, 10/38/75/249, 10/38/75/93, 64/224,224, 23/101/307, 23/268, 23/37/64/224/254, 23/64/81, 23/224/268, 23/224/254, 23, 23/64/224, 64, 75/249/307, 93, 33/38/75/249, 75/249, 25/38/75/93/291, 33/38/75, 75, or 23/254, wherein the amino acid positions are relative to the reference sequence corresponding to residues 12 to 346 of SEQ ID NO: 1612, or relative to the reference sequence corresponding to SEQ ID NO: 1612.

[0057] In some embodiments, the engineered RNA ligase comprises an amino acid sequence having at least 70%, 75%, 80%, 81%, 82%, 83%, 84%, 85%, 86%, 87%, 88%, 89%, 90%, 91%, 92%, 93%, 94%, 95%, 96%, 97%, 98%, 99%, or more sequence identity to the reference sequence corresponding to residues 12 to 346 of SEQ ID NO: 1840, or to the reference sequence corresponding to SEQ ID NO: 1840, wherein the amino acid sequence comprises one or more substitutions relative to the reference sequence corresponding to residues 12 to 346 of SEQ ID NO: 1840, or relative to the reference sequence corresponding to SEQ ID NO: 1840.

[0058] In some embodiments, the engineered RNA ligase comprises an amino acid sequence having at least 70%, 75%, 80%, 81%, 82%, 83%, 84%, 85%, 86%, 87%, 88%, 89%, 90%, 91%, 92%, 93%, 94%, 95%, 96%, 97%, 98%, 99%, or more sequence identity to the reference sequence corresponding to residues 12 to 346 of an even-numbered SEQ ID NO. of SEQ ID NOs: 1842-1906, or to the reference sequence corresponding to an even-numbered SEQ ID NO. of SEQ ID NOs: 1842-1906, wherein the amino acid sequence comprises one or more substitutions relative to the reference sequence corresponding to residues 12 to 346 of SEQ ID NO: 1840, or relative to the reference sequence corresponding to SEQ ID NO: 1840.

[0059] In some embodiments, the amino acid sequence of the engineered RNA ligase comprises at least a substitution or substitution set at amino acid position(s) 38/65/192, 38/65, 38/65/224, 38/64, 93/307, 38, 38/224, 38/192/224, 65, 192/224, 75/307, 75/250/268/307, 250/268/307/342, 224, 65/192,268, 64/192, 250/268/291/342, 75/93/249/307/342, 250/291, 38/64/192, 38/64/224, 93/249/307, 38/64/86/192/241, 38/342, 248/250/307, 75/77/250/268/307/342, 93/268,192, 38/192, or 64, wherein the amino acid positions are relative to the reference sequence corresponding to residues 12 to 346 of SEQ ID NO: 1840, or relative to the reference sequence corresponding to SEQ ID NO: 1840.

[0060] In some embodiments, the engineered RNA ligase comprises an amino acid sequence having at least 70%, 75%, 80%, 81%, 82%, 83%, 84%, 85%, 86%, 87%, 88%, 89%, 90%, 91%, 92%, 93%, 94%, 95%, 96%, 97%, 98%, 99%, or more sequence identity to the reference sequence corresponding to residues 12 to 346 of SEQ ID NO: 1866, or to the reference sequence corresponding to SEQ ID NO: 1866, wherein the amino acid sequence comprises one or more substitutions relative to the reference sequence corresponding to residues 12 to 346 of SEQ ID NO: 1866, or relative to the reference sequence corresponding to SEQ ID NO: 1866.

[0061] In some embodiments, the engineered RNA ligase comprises an amino acid sequence having at least 70%, 75%, 80%, 81%, 82%, 83%, 84%, 85%, 86%, 87%, 88%, 89%, 90%, 91%, 92%, 93%, 94%, 95%, 96%, 97%, 98%, 99%, or more sequence identity to the reference sequence corresponding to residues 12 to 346 of an even-numbered SEQ ID NO. of SEQ ID NOs: 1948-2038 and 2130-2620, or to the reference sequence corresponding to an even-numbered SEQ ID NO. of SEQ ID NOs: 1948-2038 and 2130-2620, wherein the amino acid sequence comprises one or more substitutions relative to the reference sequence corresponding to residues 12 to 346 of SEQ ID NO: 1866, or relative to the reference sequence corresponding to SEQ ID NO: 1866.

[0062] In some embodiments, the amino acid sequence of the engineered RNA ligase comprises at least a substitution or substitution set at amino acid position(s) 38/248/251, 38/248/250/251/277, 248/250/251, 38/93/192/248/251, 38/192/248/251, 250/251, 38/248/250/251, 248/251/344, 192/248/250/251, 38/248/250, 38/93/250/251/277, 38/255/280/318, 248, 38/86/241/255/280/318/335, 38/255, 38, 318, 38/101/255/280, 38/318/335, 38/255/318, 192/250/251/344, 38/335,318/335, 38/277, 38/93/251, 192/251, 255, 38/64/318, 38/64/241/255/318, 251, 64/101/255/280/318, 38/101/255/280/318/335, 38/255/280, 38/251/277, 64/318, 38/64/255/318, 241/255/280/318, 38/86/101/241/318, 38/241, 38/255/318/335, 38/64/101/318, 38/64/255/280/318, 241/255/318, or 38/241/335, wherein the amino acid positions are relative to the reference sequence corresponding to residues 12 to 346 of SEQ ID NO: 1866, or relative to the reference sequence corresponding to SEQ ID NO: 1866.

[0063] In some embodiments, the amino acid sequence of the engineered RNA ligase comprises at least a substitution or substitution set at amino acid position(s) 89, 122, 181, 28, 125, 157, 238, 330, 212, 143, 208, 290, 161, 214, 84, 270, 91, 295, 316, 286, 301, 170, 264, 289, 190, 183, 128, 60, 310, 131, 302, 267, 288, 185, 291, 129, 280, 298, 158/215, 28/122,276, 274, 271, 215, 294, 106, 58, 135, 45, 299, 315, 204, 332, 169, 305, 154, 158, 297, 95, 337, 324, 150, 179, 283, 206, 236, 266, 213, 336, 178, 99, 184, 282, 57, 177, 109, 191, 107, 160, 144, 56, 159, 341, 325, or 91, wherein the amino acid positions are relative to the reference sequence corresponding to residues 12 to 346 of SEQ ID NO: 1866, or relative to the reference sequence corresponding to SEQ ID NO: 1866.

[0064] In some embodiments, the engineered RNA ligase comprises an amino acid sequence having at least 70%, 75%, 80%, 81%, 82%, 83%, 84%, 85%, 86%, 87%, 88%, 89%, 90%, 91%, 92%, 93%, 94%, 95%, 96%, 97%, 98%, 99%, or more sequence identity to the reference sequence corresponding to residues 12 to 346 of SEQ ID NO: 1954, or to the reference sequence corresponding to SEQ ID NO: 1954, wherein the amino acid sequence comprises one or more substitutions relative to the reference sequence corresponding to residues 12 to 346 of SEQ ID NO: 1954, or relative to the reference sequence corresponding to SEQ ID NO: 1954.

[0065] In some embodiments, the engineered RNA ligase comprises an amino acid sequence having at least 70%, 75%, 80%, 81%, 82%, 83%, 84%, 85%, 86%, 87%, 88%, 89%, 90%, 91%, 92%, 93%, 94%, 95%, 96%, 97%, 98%, 99%, or more sequence identity to the reference sequence corresponding to residues 12 to 346 of an even-numbered SEQ ID NO. of SEQ ID NOs: 2040-2128, or to the reference sequence corresponding to an even-numbered SEQ ID NO. of SEQ ID NOs: 2040-2128, wherein the amino acid sequence comprises one or more substitutions relative to the reference sequence corresponding to residues 12 to 346 of SEQ ID NO: 1954, or relative to the reference sequence corresponding to SEQ ID NO: 1954.

[0066] In some embodiments, the amino acid sequence of the engineered RNA ligase comprises at least a substitution or substitution set at amino acid position(s) 93/232/291/306, 93/232/280/306, 93/241/257/306/335, 232/280, 93/291/306, 93/257, 93/306, 93/280,192/318, 93/280/291, 93/241/291/306, 192, 257/291, 241/257/306, 280/335, 93/291/306/335, 93/335, 93/232/335, 64/318, 93/241, 93/232/241/280, 64/192/318/323, 232/280/306, 93/232,291/335, 257/258, 93/232/241/257/258/280/335, 318/323, 93/241/291/335, 83/86/323, 257/258/291, 101/224/318, 83/192/255/296, 171/232/257/258/280, 83/224/255/318, 64/192/250/318, 101/296, 232/241/280, 64/255/318, 86/250/255, 83/86/101, 83/86, 93/241/258/335, 250/296/323, or 257/258/280, wherein the amino acid positions are relative to the reference sequence corresponding to residues 12 to 346 of SEQ ID NO: 1954, or relative to the reference sequence corresponding to SEQ ID NO: 1954.

[0067] In some embodiments, the engineered RNA ligase comprises an amino acid sequence having at least 70%, 75%, 80%, 81%, 82%, 83%, 84%, 85%, 86%, 87%, 88%, 89%, 90%, 91%, 92%, 93%, 94%, 95%, 96%, 97%, 98%, 99%, or more sequence identity to the reference sequence corresponding to residues 12 to 346 of SEQ ID NO: 2062, or to the reference sequence corresponding to SEQ ID NO: 2062, wherein the amino acid sequence comprises one or more substitutions relative to the reference sequence corresponding to residues 12 to 346 of SEQ ID NO: 2062, or relative to the reference sequence corresponding to SEQ ID NO: 2062.

[0068] In some embodiments, the engineered RNA ligase comprises an amino acid sequence having at least 70%, 75%, 80%, 81%, 82%, 83%, 84%, 85%, 86%, 87%, 88%, 89%, 90%, 91%, 92%, 93%, 94%, 95%, 96%, 97%, 98%, 99%, or more sequence identity to the reference sequence corresponding to residues 12 to 346 of an even-numbered SEQ ID NO. of SEQ ID NOs: 2622-2746, or to the reference sequence corresponding to an even-numbered SEQ ID NO. of SEQ ID NOs: 2622-2746, wherein the amino acid sequence comprises one or more substitutions relative to the reference sequence corresponding to residues 12 to 346 of SEQ ID NO: 2062, or relative to the reference sequence corresponding to SEQ ID NO: 2062.

[0069] In some embodiments, the amino acid sequence of the engineered RNA ligase comprises at least a substitution or substitution set at amino acid position(s) 83/84/330, 91/270/290, 83/181,161/290/330, 181/330, 161/270/330, 270/290, 83/84/270/318/330, 64/83/84/161/192/290/318, 91/161/290/318/330, 161/330, 161/214/270/290/330, 192/270/318, 91/161/192/330, 161/270, 181/270/330, 91/181/192/290, 161/290, 83/161/270, 83/192/318, 214/330, 83/161/290/330, 64/83/161/290/330, 83/161/192/214/318, 122/143/212/295, 161/192/270/290, 181/290, 91/161/214/270/290/318, 91/192/214/270, 214/290, 64/83/161/270/318/330, 91/161/181/330, 161/318/330, 91/270/290/330, 64/181/290/318, 181/270/290/318, 64/83/161/192/270/290/318/330, 64/83/161/214/290/318, 122/192/212, 64/83/91/192/214/330, 83/91/161/181/290/318, 91/161/192/214/270/290, 91/161/181/290/330, 83/91/125/161/270, 28/212,122/212, 28/64/83/122/143/192/212/295/318, 122/295, 91/161/192/318, 28/122/143/212, 64/161/290, 64/122/208/318, 64/83/192/290/318, 64/83/161/290, 181/192/318, 83/161/192/318, 214/270, 83/122, or 192/212, 28/122, wherein the amino acid positions are relative to the reference sequence corresponding to residues 12 to 346 of SEQ ID NO: 2062, or relative to the reference sequence corresponding to SEQ ID NO: 2062.

[0070] In some embodiments, the engineered RNA ligase comprises an amino acid sequence having at least 70%, 75%, 80%, 81%, 82%, 83%, 84%, 85%, 86%, 87%, 88%, 89%, 90%, 91%, 92%, 93%, 94%, 95%, 96%, 97%, 98%, 99%, or more sequence identity to the reference sequence corresponding to residues 12 to 346 of SEQ ID NO: 2674, or to the reference sequence corresponding to SEQ ID NO: 2674, wherein the amino acid sequence comprises one or more substitutions relative to the reference sequence corresponding to residues 12 to 346 of SEQ ID NO: 2674, or relative to the reference sequence corresponding to SEQ ID NO: 2674.

[0071] In some embodiments, the engineered RNA ligase comprises an amino acid sequence having at least 70%, 75%, 80%, 81%, 82%, 83%, 84%, 85%, 86%, 87%, 88%, 89%, 90%, 91%, 92%, 93%, 94%, 95%, 96%, 97%, 98%, 99%, or more sequence identity to the reference sequence corresponding to residues 12 to 346 of an even-numbered SEQ ID NO. of SEQ ID NOs: 2748-2782, 2822-2914, and 2916-3012, or to the reference sequence corresponding to an even-numbered SEQ ID NO. of SEQ ID NOs: 2748-2782, 2822-2914, and 2916-3012, wherein the amino acid sequence comprises one or more substitutions relative to the reference sequence corresponding to residues 12 to 346 of SEQ ID NO: 2674, or relative to the reference sequence corresponding to SEQ ID NO: 2674.

[0072] In some embodiments, the amino acid sequence of the engineered RNA ligase comprises at least a substitution or substitution set at amino acid position(s) 28/291/295/298/315, 28/95/291/295/298/315, 143/295/298/315, 291/295/298, 28/143/295/298, 28/291/295/298, 143/185/291/295/298, 28/143/185/291/298/336, 28/298,280/295, 143/298/336, 143/291/295/298, 291/295/298/315/336, 143/295/298, 28/143/295/298/336, 95/143/295/298, 143/280/290, or 143/291/298, wherein the amino acid positions are relative to the reference sequence corresponding to residues 12 to 346 of SEQ ID NO: 2674, or relative to the reference sequence corresponding to SEQ ID NO: 2674.

[0073] In some embodiments, the amino acid sequence of the engineered RNA ligase comprises at least a substitution or substitution set at amino acid position(s) 208, 25, 90, 141, 258, 248, 318, 117, 299, 33, 80, 253, 83, 254, 256, 30, 327, 73, 100, 97, 119, 265, 296, 32, 156, 40, 105, 107, 41/114, 41, or 64, wherein the amino acid positions are relative to the reference sequence corresponding to residues 12 to 346 of SEQ ID NO: 2674, or relative to the reference sequence corresponding to SEQ ID NO: 2674.

[0074] In some embodiments, the amino acid sequence of the engineered RNA ligase comprises at least a substitution or substitution set at amino acid position(s) 162, 208, 25, 103, 346, 42, 74, 113, 13, 228, 318, 121, 299, 33, 342, 253, 127, 254, 292, 30, 67, 86, 165, 173, 300, 317, 326, 11, 229, 97, 71, 17, 210, 241, 271, 40, 56, or 95, wherein the amino acid positions are relative to the reference sequence corresponding to residues 12 to 346 of SEQ ID NO: 2674, or relative to the reference sequence corresponding to SEQ ID NO: 2674.

[0075] In some embodiments, the engineered RNA ligase comprises an amino acid sequence having at least 70%, 75%, 80%, 81%, 82%, 83%, 84%, 85%, 86%, 87%, 88%, 89%, 90%, 91%, 92%, 93%, 94%, 95%, 96%, 97%, 98%, 99%, or more sequence identity to the reference sequence corresponding to residues 12 to 346 of SEQ ID NO: 2754, or to the reference sequence corresponding to SEQ ID NO: 2754, wherein the amino acid sequence comprises one or more substitutions relative to the reference sequence corresponding to residues 12 to 346 of SEQ ID NO: 2754, or relative to the reference sequence corresponding to SEQ ID NO: 2754.

[0076] In some embodiments, the engineered RNA ligase comprises an amino acid sequence having at least 70%, 75%, 80%, 81%, 82%, 83%, 84%, 85%, 86%, 87%, 88%, 89%, 90%, 91%, 92%, 93%, 94%, 95%, 96%, 97%, 98%, 99%, or more sequence identity to the reference sequence corresponding to residues 12 to 346 of an even-numbered SEQ ID NO. of SEQ ID NOs: 2784-2820, or to the reference sequence corresponding to an even-numbered SEQ ID NO. of SEQ ID NOs: 2784-2820, wherein the amino acid sequence comprises one or more substitutions relative to the reference sequence corresponding to residues 12 to 346 of SEQ ID NO: 2754, or relative to the reference sequence corresponding to SEQ ID NO: 2754.

[0077] In some embodiments, the amino acid sequence of the engineered RNA ligase comprises at least a substitution or substitution set at amino acid position(s) 106/264/280, 280/330, 28/106/264/291, 28/264/280/330, 57/60/135/264/291, 28/135/264/280, 106/264/280/291, 28/106/264/280, 280/299, 28/57/89/106/264/280/291, 264, 185/291, 28/106/299, 28/214/264/299, 264/330, 28/89/214/291, 28/185/271/310, 122/271, or 89/106/135/264/280/330, wherein the amino acid positions are relative to the reference sequence corresponding to residues 12 to 346 of SEQ ID NO: 2754, or relative to the reference sequence corresponding to SEQ ID NO: 2754.

[0078] In some embodiments, the engineered RNA ligase comprises an amino acid sequence having at least 70%, 75%, 80%, 81%, 82%, 83%, 84%, 85%, 86%, 87%, 88%, 89%, 90%, 91%, 92%, 93%, 94%, 95%, 96%, 97%, 98%, 99%, or more sequence identity to the reference sequence corresponding to residues 12 to 346 of SEQ ID NO: 2786, or to the reference sequence corresponding to SEQ ID NO: 2786, wherein the amino acid sequence comprises one or more substitutions relative to the reference sequence corresponding to residues 12 to 346 of SEQ ID NO: 2786, or relative to the reference sequence corresponding to SEQ ID NO: 2786.

[0079] In some embodiments, the engineered RNA ligase comprises an amino acid sequence having at least 70%, 75%, 80%, 81%, 82%, 83%, 84%, 85%, 86%, 87%, 88%, 89%, 90%, 91%, 92%, 93%, 94%, 95%, 96%, 97%, 98%, 99%, or more sequence identity to the reference sequence corresponding to residues 12 to 346 of an even-numbered SEQ ID NO. of SEQ ID NOs: 3014-3058, or to the reference sequence corresponding to an even-numbered SEQ ID NO. of SEQ ID NOs: 3014-3058, wherein the amino acid sequence comprises one or more substitutions relative to the reference sequence corresponding to residues 12 to 346 of SEQ ID NO: 2786, or relative to the reference sequence corresponding to SEQ ID NO: 2786.

[0080] In some embodiments, the amino acid sequence of the engineered RNA ligase comprises at least a substitution or substitution set at amino acid position(s) 25/228/248/264, 32/113/228/248, 25/32/113/241/248/264/299, 25/113/248/264/318, 25/127/228/264/299/318, 25/113/228/248/327, 228/241/264, 264/299/318/327, 25/113/241/248/264/318, 25/127/248/299/318, 113/127/228/264/299, 25/127, 25/228/248/264/327, 25/113/264/299, 32/113/264/318, 25/32/241/264/327, 113/264/327, 25/127/228/248/318, 327, 32/113/254/264, 25/228/241/264, 25/113/228/241/318, or 113/327, wherein the amino acid positions are relative to the reference sequence corresponding to residues 12 to 346 of SEQ ID NO: 2786, or relative to the reference sequence corresponding to SEQ ID NO: 2786.

[0081] In some embodiments, the amino acid sequence of the engineered RNA ligase comprises at least one substitution provided in Tables 6.1, 6.2, 7.1, 8.1, 8.2, 9.1, 10.1, 11.1, 12.1, 13.1, 14.1, 15.1, 16.1, 17.1, 18.1, 19.1, 20.1, 21.1, 22.1, 23.1, 24.1, 25.1, and 26.1, wherein the amino acid positions are relative to the reference sequence corresponding to residues 12 to 346 of SEQ ID NO: 54, 244, 648, 862,956, 1088, 1416, 1612, 1840, 1866, 1954, 2062, 2674, 2754, or 2786, or relative to the reference sequence corresponding to SEQ ID NO: 54, 244, 648, 862, 956, 1088, 1416, 1612, 1840, 1866, 1954, 2062, 2674, 2754, or 2786.

[0082] In some embodiments, the amino acid sequence of the engineered RNA ligase comprises at least a substitution or substitution set of an RNA ligase variant provided in Tables 6.1, 6.2, 7.1, 8.1, 8.2, 9.1, 10.1, 11.1, 12.1, 13.1, 14.1, 15.1, 16.1, 17.1, 18.1, 19.1, 20.1, 21.1, 22.1, 23.1, 24.1, 25.1, and 26.1, wherein the amino acid positions are relative to the reference sequence corresponding to residues 12 to 346 of SEQ ID NO: 54, 244, 648, 862, 956, 1088, 1416, 1612, 1840, 1866, 1954, 2062, 2674, 2754, or 2786, or relative to the reference sequence corresponding to SEQ ID NO: 54, 244, 648, 862, 956, 1088, 1416, 1612, 1840, 1866, 1954, 2062, 2674, 2754, or 2786.

[0083] In some embodiments, the engineered RNA ligase comprises an amino acid sequence having least 70%, 75%, 80%, 81%, 82%, 83%, 84%, 85%, 86%, 87%, 88%, 89%, 90%, 91%, 92%, 93%, 94%, 95%, 96%, 97%, 98%, 99% or more sequence identity to a reference sequence comprising a substitution or substitution set provided in Tables 6.1, 6.2, 7.1, 8.1, 8.2, 9.1, 10.1, 11.1, 12.1, 13.1, 14.1, 15.1, 16.1, 17.1, 18.1, 19.1, 20.1, 21.1, 22.1, 23.1, 24.1, 25.1, and 26.1, wherein the amino acid positions are relative to the reference sequence corresponding to residues 12 to 346 of SEQ ID NO: 54, 244, 648, 862, 956, 1088, 1416, 1612, 1840, 1866, 1954, 2062, 2674, 2754, or 2786, or relative to the reference sequence corresponding to SEQ ID NO: 54, 244, 648, 862, 956, 1088, 1416, 1612, 1840, 1866, 1954, 2062, 2674, 2754, or 2786.

[0084] In some embodiments, the engineered RNA ligase comprises an amino acid sequence comprising residues 12 to 346 of an even numbered SEQ ID NO. of SEQ ID NOs: 4-1470 and 1478-3058, or an amino acid sequence comprising an even numbered SEQ ID NO. of SEQ ID NOs: 4-1470 and 1478-3058. In some embodiments, the amino acid sequence of the engineered RNA ligase optionally has 1, 2, 3, 4, 5, 6, 7, 8, 9, or up to 10 substitutions.

[0085] In some embodiments, the engineered RNA ligase comprises an amino acid sequence comprising residues 12 to 346 of SEQ ID NO: 54, 244, 648, 862, 956, 1088, 1416, 1612, 1840, 1866, 1954, 2062, 2674, 2754, or 2786, or an amino acid sequence comprising SEQ ID NO: 54, 244, 648, 862, 956, 1088, 1416, 1612, 1840, 1866, 1954, 2062, 2674, 2754, or 2786. In some embodiments, the amino acid sequence of the engineered RNA ligase optionally has 1, 2, 3, 4, 5, 6, 7, 8, 9, or up to 10 substitutions.

[0086] In some embodiments, the engineered RNA ligase has RNA ligase 2 activity. In some embodiments, the engineered RNA ligase has RNA ligase 2 activity and at least one improved property as compared to a reference RNA ligase.

[0087] In some embodiments, the improved property of the engineered RNA ligase is selected from i) increased activity, ii) increased stability, iii) increased thermostability, iv) increased product yield, v) increased activity on polynucleotides ligase substrates with phosphorothioate internucleoside linkages, vi) increased activity on oligonucleotides with 2′-modifications, particularly at the ligation junction, vii) increased substrate tolerance, or any combination of i), ii), iii), iv), v), vi), and vii), compared to a reference RNA ligase. In some embodiments, the improved property of the engineered RNA ligase is in comparison to the reference RNA ligase having the sequence corresponding to residues 12 to 346 of SEQ ID NO: 2, 54, 244, 648, 862, 956, 1088, 1416, 1612, 1840, 1866, 1954, 2062, 2674, 2754, or 2786, or the sequence corresponding to SEQ ID NO: 2, 54, 244, 648, 862, 956, 1088, 1416, 1612, 1840, 1866, 1954, 2062, 2674, 2754, or 2786.

[0088] In some embodiments, the engineered RNA ligase is purified. In some further embodiments, the engineered RNA ligase is provided in solution, as a lyophilizate, or immobilized on a substrate, such as solid substrates, porous substrates, membranes or particles.

[0089] In another aspect, the present disclosure provides a recombinant polynucleotide comprising a polynucleotide sequence encoding the engineered RNA ligases disclosed herein.

[0090] In some embodiments, the recombinant polynucleotide comprises a polynucleotide sequence having at least 70%, 75%, 75%, 70%, 75%, 80%, 81%, 82%, 83%, 84%, 85%, 90%, 91%, 92%, 93%, 94%, 95%, 96%, 97%, 98%, 99%, or more sequence identity to a reference polynucleotide sequence corresponding to nucleotide residues 34 to 1038 of SEQ ID NO: 53, 243, 647, 861, 955, 1087, 1415, 1611, 1839, 1865, 1953, 2061, 2673, 2753, or 2785, or to a reference polynucleotide sequence corresponding to SEQ ID NO: 53, 243, 647, 861, 955, 1087, 1415, 1611, 1839, 1865, 1953, 2061, 2673, 2753, or 2785, wherein the recombinant polynucleotide encodes an RNA ligase.

[0091] In some embodiments, the recombinant polynucleotide comprises a polynucleotide sequence having at least 70%, 75%, 70%, 75%, 80%, 81%, 82%, 83%, 84%, 85%, 90%, 91%, 92%, 93%, 94%, 95%, 96%, 97%, 98%, 99%, or more sequence identity to a reference polynucleotide sequence corresponding to nucleotide residues 34 to 1038 of an odd numbered SEQ ID NO. of SEQ ID NOs: 3-1469 and 1477-3057, or to a reference polynucleotide sequence corresponding an odd numbered SEQ ID NO. of SEQ ID NOs: 3-1469 and 1477-3057, wherein the recombinant polynucleotide encodes an RNA ligase.

[0092] In some embodiments, the polynucleotide sequence of the recombinant polynucleotide encoding an engineered RNA ligase is codon optimized for expression in an organism or cell type thereof, for example a bacterial cell, a fungal cell, insect cell, or mammalian cell.

[0093] In some embodiments, the recombinant polynucleotide comprises a polynucleotide sequence comprising nucleotide residues 34 to 1038 of SEQ ID NO. 53, 243, 647, 861, 955, 1087, 1415, 1611, 1839, 1865, 1953, 2061, 2673, 2753, or 2785, or a polynucleotide sequence comprising SEQ ID NOs: 53, 243, 647, 861, 955, 1087, 1415, 1611, 1839, 1865, 1953, 2061, 2673, 2753, or 2785.

[0094] In some embodiments, the recombinant polynucleotide comprises a polynucleotide sequence comprising nucleotide residues 34 to 1038 of an odd numbered SEQ ID NO. of SEQ ID NOs: 3-1469 and 1477-3057, or a polynucleotide sequence comprising an odd numbered SEQ ID NO. of SEQ ID NOs: 3-1469 and 1477-3057.

[0095] In a further aspect, the present disclosure provides expression vectors comprising at least one recombinant polynucleotide provided herein encoding an engineered RNA ligase. In some embodiments, the recombinant polynucleotide of the expression vector is operably linked to a control sequence. In some embodiments, the control sequence comprises a promoter, particularly a heterologous promoter.

[0096] In another aspect, the present disclosure also provides a host cell comprising at least one expression vector provided herein. In some embodiments, the host cell is a prokaryotic cell or a eukaryotic cell. In some embodiments, the host cell is a bacterial cell, fungal cell, insect cell, or mammalian cell. In some preferred embodiments, the host cell is a bacterial cell, such as E. coli. or B. subtilis.

[0097] In a further aspect, the present disclosure provides a method of producing an engineered RNA ligase polypeptide, the method comprising culturing a host cell described herein under suitable culture conditions such that at least one engineered RNA ligase is produced. In some embodiments, the method further comprises recovering or isolating the engineered RNA ligase from the culture and/or host cells. In some embodiments, the method further comprises the step of purifying the engineered RNA ligase.

[0098] In another aspect, the present disclosure provides a composition comprising at least one engineered RNA ligase disclosed herein. In some embodiments, the composition comprises at least a buffer. In some embodiments, the composition further comprises a nucleotide substrate (e.g., ATP or dATP) and one or more of polynucleotide substrates, such as synthetic polynucleotides, particularly modified polynucleotides.

[0099] In a further aspect, the present disclosure provides a method of ligating at least a first polynucleotide strand and a second polynucleotide strand, comprising contacting the first polynucleotide strand and a second polynucleotide strand with an engineered RNA ligase described herein in presence of a nucleotide substrate under conditions suitable for ligation of the first polynucleotide strand to the second polynucleotide strand, wherein the first polynucleotide strand comprises a ligatable 5′-end and the second polynucleotide strand comprises a 3′-end ligatable to the 5-end of the first polynucleotide strand. In some embodiments, the first polynucleotide strand and/or second polynucleotide strand comprises RNA or a mixture of RNA and DNA.

[0100] In some embodiments, the method further comprises a third polynucleotide strand, wherein the first polynucleotide strand and second polynucleotide strand hybridize adjacent to one another on the third polynucleotide to position the 5′-end of the first polynucleotide strand adjacent to the 3′-end of the second polynucleotide strand to form a nick. In some embodiments, the third polynucleotide strand is continuous with the first polynucleotide strand or second polynucleotide strand. In some embodiments, the third polynucleotide strand is continuous with the first polynucleotide strand and second polynucleotide strand to form a single continuous polynucleotide substrate.

[0101] In some embodiments, 3′-end region of the second polynucleotide strand that hybridizes to the third polynucleotide strand is at least 4, 6, 8 or more base pairs in length. In some embodiments, the 5-end region of the first polynucleotide strand that hybridizes to the third polynucleotide strand is at least 4, 6, 8 or more base pairs in length.

[0102] In some embodiments of the method, the third polynucleotide strand comprises a splint or bridging polynucleotide, wherein the 5′-terminal sequence of the first polynucleotide strand and the 3′-terminal sequence of the second polynucleotide strand hybridize adjacent to one another on the splint or bridging polynucleotide to position the 5′-end of the first polynucleotide strand adjacent to the 3′-end of the second polynucleotide strand.

[0103] In some embodiments, the first and third polynucleotide strands hybridize to each other to form a first double stranded polynucleotide fragment, and the second polynucleotide strand hybridizes to another polynucleotide strand to form a second double stranded fragment, wherein the first and second double stranded fragments have complementary ends that can base pair to form substrates for the engineered RNA ligase.

[0104] In some embodiments, the engineered RNA ligase is used in a method to synthesize RNA or DNA/RNA polynucleotides by ligation of shorter RNA or DNA/RNA oligonucleotides. In some embodiments, the engineered RNA ligase is used to repair nicks in dsRNA or dsRNA/DNA. In some embodiments, the engineered RNA ligase is used to ligate the 3′ OH of RNA to the 5′ phosphate of DNA or RNA. In some embodiments, the engineered RNA ligase is used to ligate the 3′ OH of RNA to the 5′ phosphate of DNA in a double-stranded-format NGS RNA library construction. In some embodiments, the engineered RNA ligase is used in a method of preparing RNA rings.

[0105] In a further aspect, the present disclosure also provides a kit comprising at least one engineered RNA ligase disclosed herein. In some embodiments, the kit further comprises one or more of a buffer, nucleotide substrate (e.g., ATP or dATP), ligation enhancing agent, and/or one or more polynucleotide substrates.

### BRIEF DESCRIPTION OF THE DRAWINGS

[0106] FIG. 1 shows the output of a Gaussian Process Regression (GPR) analysis for two recombinant single stranded RNA ligase for a RNA ligase substrate for ligase reaction variables of MgCl₂, ATP, and oligonucleotide substrate concentration.

### DETAILED DESCRIPTION

[0107] The present disclosure provides engineered RNA ligase polypeptides and compositions thereof, as well as polynucleotides encoding the engineered RNA ligase polypeptides. The disclosure also provides methods of using of the engineered RNA ligase polypeptides and compositions thereof for molecular biological, diagnostic, and other purposes. In some embodiments, the engineered RNA ligase polypeptides display, among others, increased activity, increased stability, increased product yield, and/or increased activity on polynucleotides containing one or more modified nucleotides or nucleotide analogs.

### Abbreviations and Definitions

[0108] In reference to the present disclosure, the technical and scientific terms used in the descriptions herein will have the meanings commonly understood by one of ordinary skill in the art, unless specifically defined otherwise. Accordingly, the following terms are intended to have the following meanings.

[0109] As used herein, the singular forms “a”, “an” and “the” include plural referents unless the context clearly indicates otherwise. Thus, for example, reference to “a polypeptide” includes more than one polypeptide.

[0110] Similarly, “comprise,” “comprises,” “comprising” “include,” “includes,” and “including” are interchangeable and not intended to be limiting. Thus, as used herein, the term “comprising” and its cognates are used in their inclusive sense (i.e., equivalent to the term “including” and its corresponding cognates).

[0111] It is to be further understood that where descriptions of various embodiments use the term “comprising,” those skilled in the art would understand that in some specific instances, an embodiment can be alternatively described using language “consisting essentially of” or “consisting of.”

[0112] “About” means an acceptable error for a particular value. In some instances, “about” means within 0.05%, 0.5%, 1.0%, or 2.0%, of a given value range. In some instances, “about” means within 1, 2, 3, or 4 standard deviations of a given value.

[0113] “EC” number refers to the Enzyme Nomenclature of the Nomenclature Committee of the International Union of Biochemistry and Molecular Biology (NC-IUBMB). The IUBMB biochemical classification is a numerical classification system for enzymes based on the chemical reactions they catalyze.

[0114] “ATCC” refers to the American Type Culture Collection whose biorepository collection includes genes and strains.

[0115] “NCBI” refers to National Center for Biological Information and the sequence databases provided therein.

[0116] “Protein,” “polypeptide,” and “peptide” are used interchangeably to denote a polymer of at least two amino acids covalently linked by an amide bond, regardless of length or post-translational modification (e.g., glycosylation or phosphorylation).

[0117] “Amino acids” and “amino acid” are referred to herein by either their commonly known three-letter symbols or by the one-letter symbols recommended by IUPAC-IUB Biochemical Nomenclature Commission. The abbreviations used for the genetically encoded amino acids are conventional and are as follows: alanine (Ala or A), arginine (Arg or R), asparagine (Asn or N), aspartate (Asp or D), cysteine (Cys or C), glutamate (Glu or E), glycine (Gly or G), glutamine (Gln or Q), histidine (His or H), isoleucine (Ile or I), leucine (Leu or L), lysine (Lys or K), methionine (Met or M), phenylalanine (Phe or F), proline (Pro or P), serine (Ser or S), threonine (Thr or T), tryptophan (Trp or W), tyrosine (Tyr or Y), and valine (Val or V). When the three-letter abbreviations are used, unless specifically preceded by an “L” or a “D” or clear from the context in which the abbreviation is used, the amino acid may be in either the L- or D-configuration about «-carbon (Ca). For example, whereas “Ala” designates alanine without specifying the configuration about the «-carbon, “D-Ala” and “L-Ala” designate D-alanine and L-alanine, respectively. When the one-letter abbreviations are used, upper case letters designate amino acids in the L-configuration about the «-carbon and lower case letters designate amino acids in the D-configuration about the «-carbon. For example, “A” designates L-alanine and “a” designates D-alanine. When polypeptide sequences are presented as a string of one-letter or three-letter abbreviations (or mixtures thereof), the sequences are presented in the amino (N) to carboxy (C) direction in accordance with common convention.

[0118] “Fusion protein,” and “chimeric protein” and “chimera” refer to hybrid proteins created through the joining of two or more polynucleotides that originally encode separate proteins. In some embodiments, fusion proteins are created by recombinant technology (e.g., molecular biology techniques known in the art).

[0119] “RNA ligase” refers to enzymes that covalently joins the 5′-phosphoryl termini of RNA or DNA to the 3′-hydroxyl termini of RNA or DNA. Two families of RNA ligases are known to occur in nature. RNA ligase 1 catalyzes the covalent joining of single stranded 5′-phosphoryl termini of RNA or DNA to single stranded 3-hydroxyl termini of RNA or DNA. RNA ligase 2 also catalyzes the covalent joining of a 3′-hydroxyl terminus of RNA to a 5′-phosphorylated RNA or DNA but shows preference for double stranded substrates. In some embodiments, RNA ligases include those enzymes classified in EC 6.5.1.3.

[0120] Without being bound by any theory of operation, although some DNA ligases are capable of acting on either DNA or RNA as the 3′-hydroxyl strand substrate, an RNA ligase 2 acting at a duplex nick preferentially acts on 3′-hydroxyl strand of RNA but is agnostic to whether 5-phosphoryl strand is DNA or RNA. Moreover, in some embodiments, the strand with the 3′-hydroxyl may include deoxyribonucleotides if sufficient number of ribonucleotides are present at the 3′-hydroxyl terminus. For example, the RNA specificity of T4 RNA ligase 2 is affected by the 3′-hydroxyl strand, and specifically by the two terminal ribonucleotides of the 3-′hydroxyl side of the nick (see, e.g., Nandakumar et al., Mol. Cell., 2004, 16:211-221). It is to be understood that the ligation reaction is not limited to naturally occurring RNA and DNA substrates also includes polynucleotide substrates that contain modified nucleotides and/or nucleotide analogs.

[0121] “Polynucleotide,” “nucleic acid,” or “oligonucleotide” is used herein to denote a polymer comprising at least two nucleotides where the nucleotides are either deoxyribonucleotides or ribonucleotides or mixtures of deoxyribonucleotides and ribonucleotides. In some embodiments, the abbreviations used for genetically encoding nucleosides are conventional and are as follow: adenosine (A); guanosine (G); cytidine (C); thymidine (T); and uridine (U). Unless specifically delineated, the abbreviated nucleosides may be either ribonucleosides or 2′-deoxyribonucleosides. The nucleosides may be specified as being either ribonucleosides or 2′-deoxyribonucleosides on an individual basis or on an aggregate basis. When a polynucleotide, nucleic acid, or oligonucleotide sequences are presented as a string of one-letter abbreviations, the sequences are presented in the 5′ to 3′ direction in accordance with common convention, and the phosphates are not indicated. The term “DNA” refers to deoxyribonucleic acid. The term “RNA” refers to ribonucleic acid. The polynucleotide or nucleic acid may be single-stranded or double-stranded, or may include both single-stranded regions and double-stranded regions.

[0122] In some embodiments, the terms “polynucleotide,” “nucleic acid” and “oligonucleotide” encompass polynucleotide or nucleic acid or oligonucleotide analogs or modified polynucleotide or nucleic acid or oligonucleotide, which include, among others, nucleosides linked together via other than standard phosphodiester linkages, such as non-standard linkages of phosphoramidates, phosphorothioates, amide linkages, etc.; nucleosides with modified and/or synthetic nucleobases, for example inosine, xanthine, hypoxanthine, etc.; nucleosides with modified sugar residues, such as 2′-O-alkyl, 2′-halo, 2,3-dideoxy, 2′-halo-2′-deoxy, β-D-ribo LNA, α-L-ribo-LNA (e.g., locked nucleic acids), etc.; and/or 5′-phosphate analogs, including, among others, phosphorothioate, phosphoacetate, phosphoramidate, monomethylphosphate, methylphosphonate, or phosphonocarboxylate.

[0123] “Duplex” and “ds” refer to a double-stranded nucleic acid (e.g., DNA or RNA) molecule comprised of two single-stranded polynucleotides that are complementary in their sequence (e.g., A pairs to T or U, C pairs to G), arranged in an antiparallel 5′ to 3′ orientation, and held together by hydrogen bonds between the nucleobases (e.g., adenine [A], guanine [G], cytosine [C], thymine [T], uridine [U]).

[0124] “Complementary” is used herein to describe the structural relationship between nucleotide bases that are capable of forming base pairs with one another. For example, a purine nucleotide base present on a polynucleotide that is complementary to a pyrimidine nucleotide base on a polynucleotide may base pair by forming hydrogen bonds with one another. Complementary nucleotide bases can base pair via Watson/Crick base pairing or in any other manner than forms stable duplexes or other nucleic acid structures.

[0125] “Watson/Crick Base-Pairing” refers to a pattern of specific pairs of nucleobases and analogs that bind together through sequence-specific hydrogen-bonds, e.g. A pairs with T or U, and G pairs with C.

[0126] “Annealing” or “Hybridization” refers to the base-pairing interactions of one nucleobase polymer (e.g., poly- and oligonucleotides) with another that results in the formation of a double-stranded structure, a triplex structure or a quaternary structure. Annealing or hybridization can occur via Watson-Crick base-pairing interactions, but may be mediated by other hydrogen-bonding interactions, such as Hoogsteen base pairing. In some embodiments, the nucleobase polymer that anneals or hybridizes to another is a single nucleobase polymer while in other embodiments, the nucleobase polymers are separate nucleobase polymers.

[0127] “Engineered,” “recombinant,” “non-naturally occurring,” and “variant,” when used with reference to a cell, a polynucleotide or a polypeptide refer to a material or a material corresponding to the natural or native form of the material that has been modified in a manner that would not otherwise exist in nature or is identical thereto but produced or derived from synthetic materials and/or by manipulation using recombinant techniques.

[0128] “Wild-type” and “naturally-occurring” refer to the form found in nature. For example, a wild-type polypeptide or polynucleotide sequence is a sequence present in an organism that can be isolated from a source in nature and which has not been intentionally modified by human manipulation.

[0129] “Coding sequence” and synonymously “encoding” refers to that part of a nucleic acid (e.g., a gene) that encodes an amino acid sequence of a protein.

[0130] “Percent (%) sequence identity” refers to comparisons among polynucleotides and polypeptides, and are determined by comparing two optimally aligned sequences over a comparison window, wherein the portion of the polynucleotide or polypeptide sequence in the comparison window may comprise additions or deletions (i.e., gaps) as compared to the reference sequence for optimal alignment of the two sequences. The percentage may be calculated by determining the number of positions at which the identical nucleic acid base or amino acid residue occurs in both sequences to yield the number of matched positions, dividing the number of matched positions by the total number of positions in the window of comparison and multiplying the result by 100 to yield the percentage of sequence identity. Alternatively, the percentage may be calculated by determining the number of positions at which either the identical nucleic acid base or amino acid residue occurs in both sequences or a nucleic acid base or amino acid residue is aligned with a gap to yield the number of matched positions, dividing the number of matched positions by the total number of positions in the window of comparison and multiplying the result by 100 to yield the percentage of sequence identity. Those of skill in the art appreciate that there are many established algorithms available to align two sequences. Optimal alignment of sequences for comparison can be conducted, e.g., by the local homology algorithm of Smith and Waterman (Smith and Waterman, Adv. Appl. Math., 1981, 2:482), by the homology alignment algorithm of Needleman and Wunsch (Needleman and Wunsch, J. Mol. Biol., 1970, 48:443), by the search for similarity method of Pearson and Lipman (Pearson and Lipman, Proc. Natl. Acad. Sci. USA, 1988, 85:2444), by computerized implementations of these algorithms (e.g., GAP, BESTFIT, FASTA, and TFASTA in the GCG Wisconsin Software Package), or by visual inspection, as known in the art. Examples of algorithms that are suitable for determining percent sequence identity and sequence similarity include, but are not limited to the BLAST and BLAST 2.0 algorithms (see, e.g., Altschul et al., J. Mol. Biol., 1990, 215:403-410; and Altschul et al., Nucleic Acids Res., 1977, 3389-3402). Software for performing BLAST analyses is publicly available through the National Center for Biotechnology Information website. This algorithm involves first identifying high scoring sequence pairs (HSPs) by identifying short words of length “W” in the query sequence, which either match or satisfy some positive-valued threshold score “T,” when aligned with a word of the same length in a database sequence. T is referred to as the neighborhood word score threshold (see Altschul et al, supra). These initial neighborhood word hits act as seeds for initiating searches to find longer HSPs containing them. The word hits are then extended in both directions along each sequence for as far as the cumulative alignment score can be increased. Cumulative scores are calculated using, for nucleotide sequences, the parameters “M” (reward score for a pair of matching residues; always >0) and “N” (penalty score for mismatching residues; always <0). For amino acid sequences, a scoring matrix is used to calculate the cumulative score. Extension of the word hits in each direction are halted when: the cumulative alignment score falls off by the quantity “X” from its maximum achieved value; the cumulative score goes to zero or below, due to the accumulation of one or more negative-scoring residue alignments; or the end of either sequence is reached. The BLAST algorithm parameters W, T, and X determine the sensitivity and speed of the alignment. The BLASTN program (for nucleotide sequences) uses as defaults a wordlength (W) of 11, an expectation (E) of 10, M=5, N=−4, and a comparison of both strands. For amino acid sequences, the BLASTP program uses as defaults a wordlength (W) of 3, an expectation (E) of 10, and the BLOSUM62 scoring matrix (see, e.g., Henikoff and Henikoff, Proc. Natl. Acad. Sci. USA, 1989, 89:10915). Exemplary determination of sequence alignment and % sequence identity can employ the BESTFIT or GAP programs in the GCG Wisconsin Software package (Accelrys, Madison WI), using default parameters provided.

[0131] “Reference sequence” refers to a defined sequence used as a basis for a sequence comparison. A reference sequence may be a subset of a larger sequence, for example, a segment of a full-length gene or polypeptide sequence. Generally, a reference sequence is at least 20 nucleotide or amino acid residues in length, at least 25 residues in length, at least 50 residues in length, at least 100 residues in length or the full length of the nucleic acid or polypeptide. Since two polynucleotides or polypeptides may each (1) comprise a sequence (i.e., a portion of the complete sequence) that is similar between the two sequences, and (2) may further comprise a sequence that is divergent between the two sequences, sequence comparisons between two (or more) polynucleotides or polypeptide are typically performed by comparing sequences of the two polynucleotides or polypeptides over a “comparison window” to identify and compare local regions of sequence similarity. In some embodiments, a “reference sequence” can be based on a primary amino acid sequence, where the reference sequence is a sequence that can have one or more changes in the primary sequence. For instance, the phrase “a reference sequence corresponding to SEQ ID NO: 2, having an asparagine at the residue corresponding to X11” (or “a reference sequence corresponding to SEQ ID NO: 2, having an asparagine at the residue corresponding to position 11”) refers to a reference sequence in which the corresponding residue at position X11 in SEQ ID NO: 2 (e.g., an glycine), has been changed to asparagine.

[0132] “Comparison window” refers to a conceptual segment of contiguous nucleotide positions or amino acids residues wherein a sequence may be compared to a reference sequence. In some embodiments, the comparison window is at least 15 to 20 contiguous nucleotides or amino acids and wherein the portion of the sequence in the comparison window may comprise additions or deletions (i.e., gaps) of 20 percent or less as compared to the reference sequence (which does not comprise additions or deletions) for optimal alignment of the two sequences. In some embodiments, the comparison window can be longer than 15-20 contiguous residues, and includes, optionally 30, 40, 50, 100, or longer windows.

[0133] “Corresponding to”, “reference to,” and “relative to” when used in the context of the numbering of a given amino acid or polynucleotide sequence refer to the numbering of the residues of a specified reference sequence when the given amino acid or polynucleotide sequence is compared to the reference sequence. In other words, the residue number or residue position of a given polymer is designated with respect to the reference sequence rather than by the actual numerical position of the residue within the given amino acid or polynucleotide sequence. For example, a given amino acid sequence, such as that of an engineered RNA ligase, can be aligned to a reference sequence by introducing gaps to optimize residue matches between the two sequences. In these cases, although the gaps are present, the numbering of the residue in the given amino acid or polynucleotide sequence is made with respect to the reference sequence to which it has been aligned. In some embodiments, the sequence is tagged (e.g., with a histidine tag).

[0134] “Mutation” refers to the alteration of a nucleic acid sequence. In some embodiments, mutations result in changes to the encoded polypeptide sequence (i.e., as compared to the original sequence without the mutation). In some embodiments, the mutation comprises a substitution, such that a different amino acid is produced. In some alternative embodiments, the mutation comprises an addition, such that an amino acid is added (e.g., insertion) to the original polypeptide sequence. In some further embodiments, the mutation comprises a deletion, such that an amino acid is deleted from the original polypeptide sequence. Any number of mutations may be present in a given sequence.

[0135] “Amino acid difference” and “residue difference” refer to a difference in the amino acid residue at a position of a polypeptide sequence relative to the amino acid residue at a corresponding position in a reference sequence. The amino acid positions of amino acid differences generally are referred to herein as “Xn,” where n refers to the corresponding position in the reference sequence upon which the residue difference is based. For example, a “residue difference at position X11 as compared to SEQ ID NO: 2” (or a “residue difference at position 11 as compared to SEQ ID NO: 2”) refers to a difference of the amino acid residue at the polypeptide position corresponding to position 11 of SEQ ID NO: 2. Thus, if the reference polypeptide of SEQ ID NO: 2 has a glycine at position 11, then a “residue difference at position X11 as compared to SEQ ID NO: 2” refers to an amino acid substitution of any residue other than glycine at the position of the polypeptide corresponding to position 11 of SEQ ID NO: 2. In some instances herein, the specific amino acid residue difference at a position is indicated as “XnY” where “Xn” specified the corresponding residue and position of the reference polypeptide (as described above), and “Y” is the single letter identifier of the amino acid found in the engineered polypeptide (i.e., the different residue than in the reference polypeptide). In some instances (e.g., in the Tables in the Examples), the present disclosure also provides specific amino acid differences denoted by the conventional notation “AnB”, where A is the single letter identifier of the residue in the reference sequence, “n” is the number of the residue position in the reference sequence, and B is the single letter identifier of the residue substitution in the sequence of the engineered polypeptide. In some embodiments, the amino acid difference, e.g., a substitution, is denoted by the abbreviation “nB,” without the identifier for the residue in the reference sequence. In some instances, an amino acid residue difference or substitution may be a deletion and may be denoted by a “-” where appropriate. In some embodiments, the phrase “an amino acid residue nB” denotes the presence of the amino acid residue in the engineered polypeptide, which may or may not be a substitution in context of a reference polypeptide or amino acid sequence.

[0136] In some instances, a polypeptide of the present disclosure can include one or more amino acid residue differences relative to a reference sequence, which is indicated by a list of the specified positions where residue differences are present relative to the reference sequence. In some embodiments, where more than one amino acid can be used in a specific residue position of a polypeptide, the various amino acid residues that can be used are separated by a “/” (e.g., X18A/X18H, X18A/H, or 18A/H). The present disclosure includes engineered polypeptide sequences comprising one or more amino acid differences that include either/or both conservative and non-conservative amino acid substitutions, as well as insertions and deletions of amino acids in the sequence.

[0137] “Amino acid substitution set” and “substitution set” refers to a group of amino acid substitutions within a polypeptide sequence. In some embodiments, substitution sets comprise 2, 3, 4, 5, 6, 7, 8, 9, 10, 11, 12, 13, 14, 15, or more amino acid substitutions. In some embodiments, a substitution set refers to the set of amino acid substitutions that is present in any of the variant RNA ligase polypeptides listed in any of the Tables in the Examples. In some embodiments, the amino acid sequence comprises at least each of the amino acid substitutions in the referenced substitution set. In the substitution sets, the individual substitutions are separated by a semicolon (“;”; e.g., S106G; K251F) or slash (“/”; e.g., S106G/K251F or 106G/251F).

[0138] “Conservative amino acid substitution” refers to a substitution of a residue with a different residue having a similar side chain, and thus typically involves substitution of the amino acid in the polypeptide with amino acids within the same or similar defined class of amino acids. By way of example and not limitation, an amino acid with an aliphatic side chain may be substituted with another aliphatic amino acid (e.g., alanine, valine, leucine, and isoleucine); an amino acid with hydroxyl side chain is substituted with another amino acid with a hydroxyl side chain (e.g., serine and threonine); an amino acids having aromatic side chains is substituted with another amino acid having an aromatic side chain (e.g., phenylalanine, tyrosine, tryptophan, and histidine); an amino acid with a basic side chain is substituted with another amino acid with a basis side chain (e.g., lysine and arginine); an amino acid with an acidic side chain is substituted with another amino acid with an acidic side chain (e.g., aspartic acid or glutamic acid); and a hydrophobic or hydrophilic amino acid is replaced with another hydrophobic or hydrophilic amino acid, respectively.

[0139] “Non-conservative substitution” refers to substitution of an amino acid in the polypeptide with an amino acid with significantly differing side chain properties. Non-conservative substitutions may use amino acids between, rather than within, the defined groups and affect: (a) the structure of the peptide backbone in the area of the substitution (e.g., proline for glycine); (b) the charge or hydrophobicity; and/or (c) the bulk of the side chain. By way of example and not limitation, exemplary non-conservative substitutions include an acidic amino acid substituted with a basic or aliphatic amino acid; an aromatic amino acid substituted with a small amino acid; and a hydrophilic amino acid substituted with a hydrophobic amino acid.

[0140] “Deletion” refers to modification to the polypeptide by removal of one or more amino acids from the reference polypeptide. Deletions can comprise removal of 1 or more amino acids, 2 or more amino acids, 5 or more amino acids, 10 or more amino acids, 15 or more amino acids, or 20 or more amino acids, up to 10% of the total number of amino acids, or up to 20% of the total number of amino acids making up the reference polypeptide while retaining enzymatic activity and/or retaining the improved properties of an engineered RNA ligase. Deletions can be directed to the internal portions and/or terminal portions of the polypeptide. In various embodiments, the deletion can comprise a continuous segment or can be discontinuous. As noted above, deletions are indicated by “-”, and may be present in substitution sets.

[0141] “Insertion” refers to modification to the polypeptide by addition of one or more amino acids from the reference polypeptide. Insertions can be in the internal portions of the polypeptide, or to the carboxy or amino terminus. Insertions as used herein include fusion proteins as is known in the art. The insertion can be a contiguous segment of amino acids or separated by one or more of the amino acids in the naturally occurring polypeptide.

[0142] “Functional fragment” and “biologically active fragment” are used interchangeably herein, to refer to a polypeptide that has an amino-terminal and/or carboxy-terminal deletion(s) and/or internal deletions, but where the remaining amino acid sequence is identical to the corresponding positions in the sequence to which it is being compared (e.g., a full length engineered RNA ligase of the present invention) and that retains substantially all of the activity of the full-length polypeptide.

[0143] “Isolated polypeptide” refers to a polypeptide which is substantially separated from other contaminants that naturally accompany it (e.g., protein, lipids, and polynucleotides). The term embraces polypeptides which have been removed or purified from their naturally-occurring environment or expression system (e.g., host cell or in vitro synthesis). The recombinant RNA ligase polypeptides may be present within a cell, present in the cellular medium, or prepared in various forms, such as lysates or isolated preparations. As such, in some embodiments, the recombinant RNA ligase polypeptides provided herein are isolated polypeptides.

[0144] “Substantially pure polypeptide” or “purified” refers to a composition in which the polypeptide species is the predominant species present (i.e., on a molar or weight basis it is more abundant than any other individual macromolecular species in the composition), and is generally a substantially purified composition when the object species comprises at least about 50 percent of the macromolecular species present by mole or % weight. Generally, a substantially pure RNA ligase composition will comprise about 60% or more, about 70% or more, about 80% or more, about 90% or more, about 95% or more, and about 98% or more of all macromolecular species by mole or % weight present in the composition. In some embodiments, the object species is purified to essential homogeneity (i.e., contaminant species cannot be detected in the composition by conventional detection methods) wherein the composition consists essentially of a single macromolecular species. Solvent species, small molecules (<500 Daltons), and elemental ion species are not considered macromolecular species. In some embodiments, the isolated recombinant RNA ligase polypeptides are substantially pure polypeptide compositions.

[0145] “Improved enzyme property” refers to an engineered RNA ligase polypeptide that exhibits an improvement in any enzyme property as compared to a reference RNA ligase polypeptide, such as a wild-type RNA ligase polypeptide or another engineered RNA ligase polypeptide. Improved properties include but are not limited to such properties as increased enzymatic activity, increased product yield, increased protein expression, increased thermoactivity, increased thermostability, increased stability, increased substrate specificity and/or affinity, increased substrate range, increased specific activity, increased resistance to substrate and/or end-product inhibition, increased chemical stability, improved solvent stability, increased solubility, and increased inhibitor resistance or tolerance. Exemplary improved properties are provided in the Examples.

[0146] “Increased enzymatic activity” and “enhanced catalytic activity” refer to an improved property of the engineered RNA ligase polypeptides, which can be represented by an increase in specific activity (e.g., product produced/time/weight protein) and/or an increase in percent conversion of the substrate to the product (e.g., percent conversion of starting amount of substrate to product in a specified time period using a specified amount of RNA ligase) as compared to the reference RNA ligase enzyme (e.g., wild-type RNA ligase and/or another engineered RNA ligase). Exemplary methods to determine enzyme activity are provided in the Examples. Any property relating to enzyme activity may be affected, including the classical enzyme properties of Kₘ, Vₘₐₓ or k_{cat}, changes of which can lead to increased enzymatic activity. Improvements in enzyme activity can be from about 1.1 fold the enzymatic activity of the corresponding wild-type enzyme, to about 1.5 fold, 2-fold, 5-fold, 10-fold, 20-fold, 25-fold, 50-fold, 75-fold, 100-fold, 150-fold, 200-fold or more enzymatic activity than the naturally occurring RNA ligase or another engineered RNA ligase from which the RNA ligase polypeptides were derived.

[0147] “Hybridization stringency” relates to hybridization conditions, such as washing conditions, in the hybridization of nucleic acids. Generally, hybridization reactions are performed under conditions of lower stringency, followed by washes of varying but higher stringency (see, e.g., Sambrook et al., Molecular Cloning: A Laboratory Manual, Cold Spring Harbor Laboratory Press, New York, 2001; Ausubel et al., Current Protocols in Molecular Biology, John Wiley & Sons, 2003). The term “moderately stringent hybridization” refers to conditions that permit target-DNA to bind a complementary nucleic acid that has about 60% identity, preferably about 75% identity, about 85% identity to the target DNA, with greater than about 90% identity to target-polynucleotide. Exemplary moderately stringent conditions are conditions equivalent to hybridization in 50% formamide, 5×Denhart's solution, 5×SSPE, 0.2% SDS at 42° C., followed by washing in 0.2×SSPE, 0.2% SDS, at 42° C. “High stringency hybridization” refers generally to conditions that are about 10° C. or less from the thermal melting temperature Tₘ as determined under the solution condition for a defined polynucleotide sequence. In some embodiments, a high stringency condition refers to conditions that permit hybridization of only those nucleic acid sequences that form stable hybrids in 0.018M NaCl at 65° C. (i.e., if a hybrid is not stable in 0.018M NaCl at 65° C., it will not be stable under high stringency conditions, as contemplated herein). High stringency conditions can be provided, for example, by hybridization in conditions equivalent to 50% formamide, 5×Denhart's solution, 5×SSPE, 0.2% SDS at 42° C., followed by washing in 0.1×SSPE, and 0.1% SDS at 65° C. Another high stringency condition comprises hybridizing in conditions equivalent to hybridizing in 5×SSC containing 0.1% (w: v) SDS at 65° C. and washing in 0.1×SSC containing 0.1% SDS at 65° C. Other high stringency hybridization conditions, as well as moderately stringent conditions, are described in the references cited above.

[0148] “Codon optimized” refers to changes in the codons of the polynucleotide encoding a protein to those preferentially used in a particular organism such that the encoded protein is more efficiently expressed in that organism. Although the genetic code is degenerate, in that most amino acids are represented by several codons, called “synonyms” or “synonymous” codons, it is well known that codon usage by particular organisms is nonrandom and biased towards particular codon triplets. This codon usage bias may be higher in reference to a given gene, genes of common function or ancestral origin, highly expressed proteins versus low copy number proteins, and the aggregate protein coding regions of an organism's genome. In some embodiments, the polynucleotides encoding the RNA ligase enzymes are codon optimized for optimal production from the host organism selected for expression.

[0149] “Control sequence” refers herein to include all components that are necessary or advantageous for the expression of a polynucleotide and/or polypeptide of the present disclosure. Each control sequence may be native or foreign (e.g., heterologous) to the nucleic acid sequence encoding the polypeptide. Such control sequences include, but are not limited to, leaders, polyadenylation sequences, propeptide sequences, promoter sequences, signal peptide sequences, initiation sequences, and transcription terminators. In some embodiments, the control sequences include a promoter, and transcriptional and translational stop signals. In some embodiments, the control sequences are provided with linkers for the purpose of introducing specific restriction sites facilitating ligation of the control sequences with the coding region of the nucleic acid sequence encoding a polypeptide.

[0150] “Operably linked” or “operatively linked” refers to a configuration in which a control sequence is appropriately placed (i.e., in a functional relationship) at a position relative to a polynucleotide of interest such that the control sequence directs or regulates the expression of the polynucleotide of interest, and where appropriate, expression of the encoded polypeptide of interest.

[0151] “Promoter” or “promoter sequence” refers to a nucleic acid sequence that is recognized by a host cell for expression of a polynucleotide of interest, such as a coding sequence. The promoter sequence contains transcriptional control sequences that mediate the expression of a polynucleotide of interest. The promoter may be any nucleic acid sequence which shows transcriptional activity in the host cell of choice including mutant, truncated, and hybrid promoters, and may be obtained from genes encoding extracellular or intracellular polypeptides either homologous or heterologous to the host cell.

[0152] “Suitable reaction conditions” or “suitable conditions” refers to those conditions in the enzymatic conversion reaction solution (e.g., ranges of enzyme loading, substrate loading, temperature, pH, buffers, co-solvents, etc.) under which an RNA ligase polypeptide of the present disclosure is capable of converting a polynucleotide(s) substrate to the desired ligated product polynucleotide. Exemplary “suitable reaction conditions” are provided herein (see, the Examples).

[0153] “Product” in the context of an enzymatic conversion process refers to the compound or molecule resulting from the action of the RNA ligase polypeptide on the substrate.

[0154] “Culturing” refers to the growing of a population of cells under suitable conditions using any suitable medium (e.g., liquid, gel, or solid).

[0155] “Vector” is a recombinant construct for introducing a polynucleotide of interest into a cell. In some embodiments, the vector is an expression vector that is operably linked to a suitable control sequence capable of effecting the expression in a suitable host of the polynucleotide or a polypeptide encoded in the polynucleotide. In some embodiments, an “expression vector” has a promoter sequence operably linked to the polynucleotide (e.g., transgene) to drive expression in a host cell, and in some embodiments, also comprises a transcription terminator sequence.

[0156] “Expression” includes any step involved in the production of the polypeptide including, but not limited to, transcription, post-transcriptional modification, translation, and post-translational modification. In some embodiments, the term also encompasses secretion of the polypeptide from a cell.

[0157] “Produces” refers to the production of proteins and/or other compounds by cells. It is intended that the term encompass any step involved in the production of polypeptides including, but not limited to, transcription, post-transcriptional modification, translation, and post-translational modification. In some embodiments, the term also encompasses secretion of the polypeptide from a cell.

[0158] “Heterologous” or “recombinant” refers to the relationship between two or more nucleic acid or polypeptide sequences (e.g., a promoter sequence, signal peptide, terminator sequence, etc.) that are derived from different sources and are not associated in nature.

[0159] “Host cell” and “host strain” refer to suitable hosts for expression vectors comprising a polynucleotide provided herein (e.g., a polynucleotide sequences encoding at least one RNA ligase variant). In some embodiments, the host cells are prokaryotic or eukaryotic cells that have been transformed or transfected with vectors constructed using recombinant DNA techniques, and progeny thereof, as known in the art.

[0160] “Analogue” in the context of a polypeptide means a polypeptide more than 70% sequence identity but less than 100% sequence identity (e.g., more than 75%, 78%, 80%, 83%, 85%, 88%, 90%, 91%, 92%, 93%, 94%, 95%, 96%, 97%, 98%, 99% sequence identity) with a reference polypeptide. In some embodiments, analogues include non-naturally occurring amino acid residues including, but not limited, to homoarginine, ornithine and norvaline, as well as naturally occurring amino acids. In some embodiments, analogues also include one or more D-amino acid residues and non-peptide linkages between two or more amino acid residues.

### Engineered RNA Ligase Polypeptides

[0161] In one aspect, the present disclosure provides RNA ligases engineered to have an improved property, particularly increased activity and increased product yield. In some embodiments, the increased activity and increased product yield is on ligation of modified polynucleotides, including polynucleotide substrates with 2′-modified sugar moieties and/or phosphorothioate internucleoside linkages.

[0162] In some embodiments, the engineered RNA ligase, or a functional fragment thereof, comprises an amino acid sequence having at least 70%, 75%, 80%, 81%, 82%, 83%, 84%, 85%, 86%, 87%, 88%, 89%, 90%, 91%, 92%, 93%, 94%, 95%, 96%, 97%, 98%, 99%, or more sequence identity to a reference sequence corresponding to residues 12 to 346 of an even-numbered SEQ ID NO. of SEQ ID NOs: 2-1470 and 1478-3058, or to a reference sequence corresponding to an even-numbered SEQ ID NO. of SEQ ID NOs: 2-1470 and 1478-3058, wherein the amino acid sequence comprises one or more substitutions relative to a reference sequence corresponding to residues 12 to 346 of SEQ ID NO: 2, 54, 244, 648, 862, 956, 1088, 1416, 1612, 1840, 1866, 1954, 2062, 2674, 2754, or 2786, or relative to a reference sequence corresponding to SEQ ID NO: 2, 54, 244, 648, 862, 956, 1088, 1416, 1612, 1840, 1866, 1954, 2062, 2674, 2754, or 2786.

[0163] In some embodiments, the engineered RNA ligase comprises an amino acid sequence having at least 70%, 75%, 80%, 81%, 82%, 83%, 84%, 85%, 86%, 87%, 88%, 89%, 90%, 91%, 92%, 93%, 94%, 95%, 96%, 97%, 98%, 99%, or more sequence identity to the reference sequence corresponding to residues 12 to 346 of SEQ ID NO: 2, 54, 244, 648, 862,956, 1088, 1416, 1612, 1840, 1866, 1954, 2062, 2674, 2754, or 2786, or to the reference sequence corresponding to SEQ ID NO: 2, 54, 244, 648, 862, 956, 1088, 1416, 1612, 1840, 1866, 1954, 2062, 2674, 2754, or 2786, wherein the amino acid sequence comprises one or more substitutions relative to the reference sequence corresponding to residues 12 to 346 of SEQ ID NO: 2, 54, 244, 648, 862,956, 1088, 1416, 1612, 1840, 1866, 1954, 2062, 2674, 2754, or 2786, or relative to the reference sequence corresponding to SEQ ID NO: 2, 54, 244, 648, 862, 956, 1088, 1416, 1612, 1840, 1866, 1954, 2062, 2674, 2754, or 2786.

[0164] In some embodiments, the engineered RNA ligase comprises an amino acid sequence having at least 70%, 75%, 80%, 81%, 82%, 83%, 84%, 85%, 86%, 87%, 88%, 89%, 90%, 91%, 92%, 93%, 94%, 95%, 96%, 97%, 98%, 99%, or more sequence identity to the reference sequence corresponding to residues 12 to 346 of SEQ ID NO: 2, or to the reference sequence corresponding to SEQ ID NO: 2, wherein the amino acid sequence comprises one or more substitutions relative to the reference sequence corresponding to residues 12 to 346 of SEQ ID NO: 2, or relative to the reference sequence corresponding to SEQ ID NO: 2.

[0165] In some embodiments, the engineered RNA ligase comprises an amino acid sequence having at least 70%, 75%, 80%, 81%, 82%, 83%, 84%, 85%, 86%, 87%, 88%, 89%, 90%, 91%, 92%, 93%, 94%, 95%, 96%, 97%, 98%, 99%, or more sequence identity to the reference sequence corresponding to residues 12 to 346 of SEQ ID NO: 54, 244, 648, 862, 956, 1088, 1416, 1612, 1840, 1866, 1954, 2062, 2674, 2754, or 2786, or to the reference sequence corresponding to SEQ ID NO: 54, 244, 648, 862, 956, 1088, 1416, 1612, 1840, 1866, 1954, 2062, 2674, 2754, or 2786, wherein the amino acid sequence comprises one or more substitutions relative to the reference sequence corresponding to residues 12 to 346 of SEQ ID NO: 2, or relative to the reference sequence corresponding to SEQ ID NO: 2.

[0166] In some embodiments, the engineered RNA ligase comprises an amino acid sequence having at least 70%, 75%, 80%, 81%, 82%, 83%, 84%, 85%, 86%, 87%, 88%, 89%, 90%, 91%, 92%, 93%, 94%, 95%, 96%, 97%, 98%, 99%, or more sequence identity to the reference sequence corresponding to residues 12 to 346 of an even-numbered SEQ ID NO. of SEQ ID NOs: 4-1470 and 1478-3058, or to the reference sequence corresponding to an even-numbered SEQ ID NO. of SEQ ID NOs: 4-1470 and 1478-3058, wherein the amino acid sequence comprises one or more substitutions relative to the reference sequence corresponding to residues 12 to 346 of SEQ ID NO: 2, or relative to the reference sequence corresponding to SEQ ID NO: 2.

[0167] In some embodiments, the engineered RNA ligase comprises an amino acid sequence having at least 70%, 75%, 80%, 81%, 82%, 83%, 84%, 85%, 86%, 87%, 88%, 89%, 90%, 91%, 92%, 93%, 94%, 95%, 96%, 97%, 98%, 99%, or more sequence identity to the reference sequence corresponding to residues 12 to 346 of an even-numbered SEQ ID NO. of SEQ ID NOs: 4-218, or to the reference sequence corresponding to an even-numbered SEQ ID NO. of SEQ ID NOs: 4-218, wherein the amino acid sequence comprises one or more substitutions relative to the reference sequence corresponding to residues 12 to 346 of SEQ ID NO: 2, or relative to the reference sequence corresponding to SEQ ID NO: 2.

[0168] In some embodiments, the amino acid sequence of the engineered RNA ligase comprises at least a substitution at amino acid position 10, 11, 12, 13, 15, 17, 18, 21, 23, 25, 26, 28, 29, 30, 32, 33, 37, 38, 39, 40, 41, 42, 45, 52, 54, 56, 57, 58, 60, 61, 62, 64, 65, 67, 71, 73, 74, 75, 77, 80, 81, 83, 84, 86, 87, 89, 90, 91, 93, 95, 97, 99, 100, 101, 102, 103, 104, 105, 106, 107, 109, 113, 114, 116, 117, 119, 121, 122, 123, 125, 126, 127, 128, 129, 131, 135, 137, 140, 141, 143, 144, 148, 150, 154, 156, 157, 158, 159, 160, 161, 162, 165, 169, 170, 171, 173, 175, 177, 178, 179, 181, 183, 184, 185, 190, 191, 192, 193, 194, 197, 198, 204, 206, 208, 210, 212, 213, 214, 215, 218, 223, 224, 226, 228, 229, 230, 232, 236, 238, 241, 243, 247, 248, 249, 250, 251, 252, 253, 254, 255, 256, 257, 258, 260, 261, 264, 265, 266, 267, 268, 270, 271, 272, 274, 276, 277, 280, 282, 283, 286, 288, 289, 290, 291, 292, 294, 295, 296, 297, 298, 299, 300, 301, 302, 305, 306, 307, 310, 311, 315, 316, 317, 318, 323, 324, 325, 326, 327, 330, 331, 332, 334, 335, 336, 337, 338, 341, 342, 344, 345, or 346, or any combinations thereof, wherein the amino acid positions are relative to the reference sequence corresponding to residues 12 to 346 of SEQ ID NO: 2, or relative to the reference sequence corresponding to SEQ ID NO: 2.

[0169] In some embodiments, the amino acid sequence of the engineered RNA ligase comprises at least a substitution or amino acid residue 10F, 11G/N, 12A/F/L/M/P/R/T/V, 13W, 15M, 17P, 18A/H, 21S, 23K/T, 25A/D/F/G/L/M/S/T, 26L, 28A/L/M/V, 29D/S, 30A/L/T/V/W, 32E, 33A/I/L/T/V, 37A/F/K/L/M/R, 38A/E/L/R/S/T/V, 39P, 40D/I/P/S, 41E/I, 42T, 45S, 52C, 54L, 56I/L, 57V, 58M, 60A/C/D/R/S/V, 61A, 62A/V, 64A/Q/W, 65C, 67R, 71T, 73Q/W, 74D, 75A/D, 77M, 80E, 81Y, 83A/E/G/L/T/V, 84V, 86D/G/L, 87E, 89C/D/E/G/L/M/N/Q/R/S/T/V/W/Y, 90E/F, 91A/E/V, 93K/V, 95A/C/G/I, 97A/E, 99I, 100A/G/H/L/R/S/T/V, 101P/V/W, 102T, 103G/V, 104T, 105K/L/R, 106G/L/M/Q/R/V/W, 107M/S, 109F/L, 113L/M, 114E, 116L, 117A/Q, 119L, 121N, 122C/F/G/L/Q/T/W, 123K/R, 125K/T, 126M, 127P, 128E, 129L/W, 131T, 135A/H/M/Q/V, 137N/R, 140I, 141D/G, 143A/C/E/F/H/M/S/T/V, 144L, 148F, 150D/L, 154S/V, 156G/H/Q/S, 157F/L/Q/V, 158R/S, 159F, 160R, 161M/V, 162C, 165M, 169G/N, 170H/Y, 171S, 173M, 175A, 177K, 178V, 179E, 181E/N/P/R/S, 183L/V, 184L, 185C/F/G/K/M/P/S/T/V, 190I/M, 191C, 192D/E/F/L/N, 193K/Q, 194A/G/V, 197W, 198M, 204W, 206L, 208H/I/K/L/P/T, 210G/V, 212E/G/I/K/L, 213D/N/R/T, 214A/C/H/K/L/Q/Y, 215G/T, 218F, 223C, 224A/Q/R, 226R, 228D/L, 229W, 230T/V, 232G/M/N/R/S, 236L/V, 238K/S/V, 241E/G/Q/R, 243H, 247I/L/R/S, 248F/G/I/K/T, 249K/L/R/S, 250E/I/S, 251C/E/F/G/L/R/S/T/Y, 252A/Q, 253L/W, 254E/K/L/N/Q/S/V, 255N/S/V/Y, 256A/E/G/M/S/W, 257D/E/G, 258D/M/P/V, 260G, 261D/P/T, 264A/E/G/S/V, 265A/F, 266C/I/L, 267I/M, 268F/G/M, 270L/M/V, 271A/E/G/T, 272M/S, 274A, 276A/G/M/V, 277A, 280L/N/W, 282A/M, 283C/V, 286D/E/F/M/V, 288E/L/R/W, 289A/D/E/I/P/T, 290D/H/N/P, 291H/L/Q/R/S/T/W, 292N/S, 294A/S/V/Y, 295C/F/G/K/L/M/P/Q/R/S/T/V/Y, 296E/G/L/Q/W, 297A/I/L, 298C/I/K/R/S/V, 299E/I/K/Q/R/T/V, 300A, 301A/F/I/L/M/V, 302A/C/I/L/S, 305V, 306G/L/T, 307K/R, 310H/L/M/N/Q/R/S/T, 311C, 315E/S, 316I/L/Y, 317E/F/G/Q/V/W, 318A/E/G/S, 323E/G, 324D/G/M, 325L, 326C/L, 327E/G/M/S, 330A/D/E/G/K/R, 331D/G/R/S/W, 332E/H/W, 334E/R, 335H/Q, 336I/L/M, 337A/V, 338G/L/M, 341A, 342R/S/T, 344K, 345Q/S, or 346S, or any combinations thereof, wherein the amino acid positions are relative to the reference sequence corresponding to residues 12 to 346 of SEQ ID NO: 2, or relative to the reference sequence corresponding to SEQ ID NO: 2.

[0170] In some embodiments, the amino acid sequence of the engineered RNA ligase comprises at least a substitution or amino acid residue S10F, G11N, M12A/F/L/P/R/T/V, F13W, Y15M, S17P, S18A/H, N21S, Y23K/T, N25A/D/F/G/L/M/S/T, K26L, I28A/L/M/V, E29D/S, K30A/L/T/V/W, R32E, G33A/I/L/T/V, D37A/F/K/L/M/R, M38A/E/L/R/S/T/V, H39P, T40D/I/P/S, V41E/I, E42T, A45S, T52C, F54L, V56I/L, I57V, I58M, P60A/C/D/R/S/V, T61A, E62A/V, V64A/Q/W, P65C, K67R, P71T, L73Q/W, E74D, G75A/D, S77M, G80E, H81Y, 183A/E/G/L/T/V, 184V, K86D/G/L, K87E, K89C/D/E/G/L/M/N/Q/R/S/T/V/W/Y, D90E/F, S91A/E/V, V93K, V95A/C/G/I, N97A/E, L99I, N100A/G/H/L/R/S/T/V, A101P/V/W, M102T, D103G/V, L104T, V105K/L/R, S106G/L/M/Q/R/V/W, V107M/S, I109F/L, F113L/M, A114E, G116L, G117A/Q, Q119L, G121N, V122C/F/G/L/Q/T/W, D123K/R, G125K/T, D126M, K127P, D128E, F129L/W, V131T, L135A/H/M/Q/V, D137N/R, N140I, E141D/G, S143A/C/E/F/H/M/T/V, Y144L, Y148F, V150D/L, C154S/V, T156G/H/Q/S, L157F/Q/V, G158R/S, L159F, K160R, L161M/V, A162C, L165M, S169G/N, F170H/Y, A171S, L173M, Q175A, P177K, N178V, D179E, K181E/N/P/R/S, I183L/V, V184L, N185C/F/G/K/M/P/S/T/V, L190I/M, V191C, D192E/F/L/N, T193K/Q, T194A/G/V, E197W, H198M, F204W, P206L, A208H/I/K/L/P/T, S210G/V, T212E/G/I/K/L, G213D/N/R/T, L214A/C/H/K/L/Q/Y, A215G/T, Y218F, V223C, Y224A/Q/R, I226R, F228D/L, N229W, N230T/V, T232G/M/N/R/S, 1236L/V, C238K/S/V, S241E/G/Q/R, F243H, A247I/L/R/S, F248G/I/K/T, L249K/L/R/S, D250E/I/S, K251C/E/F/G/L/R/S/T/Y, P252A/Q, I253L/W, K254E/L/N/Q/S/V, A255N/S/V/Y, K256A/E/G/M/S/W, V257D/E/G, F258D/M/P/V, V260G, E261D/P/T, K264A/E/G/S/V, R265A/F, V266C/I/L, L267I/M, E268F/G/M, F270L/M/V, S271A/E/G/T, E272M/S, V274A, W276A/G/M/V, N277A, S280L/N/W, V282A/M, L283C/V, I286D/E/F/M/V, S288E/L/R/W, V289A/D/E/I/P/T, T290D/H/N/P, A291H/L/Q/R/S/T/W, A292N/S, F294A/S/V/Y, G295C/F/K/L/M/P/Q/R/S/T/V/Y, R296E/G/L/Q/W, V297A/I/L, M298C/I/K/R/S/V, G299E/I/K/Q/R/T/V, L300A, T301A/F/I/L/M/V, M302A/C/I/L/S, 1305V, I306G/L/T, N307K/R, A310H/L/M/N/Q/R/S/T, R311C, D315E/S, L316I/L/Y, L317E/F/G/Q/V/W, F318A/E/G/S, S323E/G, A324D/G/M, V325L, K326C/L, K327E/G/M/S, T330A/D/E/G/K/R, I331D/G/R/S/W, L332E/H/W, Q334E/R, N335H/Q, T336I/L/M, M337A/V, R338G/L/M, W341A, H342R/S/T, V344K, L345Q/S, or E346S, or any combinations thereof, wherein the amino acid positions are relative to the reference sequence corresponding to residues 12 to 346 of SEQ ID NO: 2, or relative to the reference sequence corresponding to SEQ ID NO: 2.

[0171] In some embodiments, the amino acid sequence of the engineered RNA ligase comprises at least a substitution at amino acid position 10, 11, 12, 13, 17, 21, 23, 25, 26, 28, 29, 30, 32, 37, 38, 40, 41, 42, 45, 52, 54, 56, 57, 58, 60, 61, 62, 64, 65, 67, 71, 73, 74, 75, 77, 80, 83, 84, 87, 90, 91, 93, 97, 99, 100, 101, 102, 103, 104, 105, 106, 107, 109, 113, 114, 121, 122, 123, 125, 126, 127, 128, 129, 131, 135, 137, 140, 141, 143, 148, 150, 157, 158, 160, 161, 162, 165, 169, 170, 173, 178, 179, 184, 190, 191, 192, 193, 194, 197, 198, 204, 206, 208, 210, 213, 215, 218, 223, 228, 229, 232, 236, 238, 241, 243, 248, 249, 250, 251, 252, 253, 254, 255, 258, 261, 264, 265, 267, 268, 270, 271, 272, 274, 276, 277, 282, 286, 289, 290, 292, 294, 295, 297, 298, 299, 300, 301, 302, 305, 311, 318, 323, 324, 325, 327, 332, 336, 338, 341, 344, or 346; a substitution or amino acid residue 18A/H, 33A/I/T/V, 39P, 86D/L, 89C/D/E/L/N/Q/R/S/T/V/Y, 95A/C/G/I, 116L, 117A/Q, 119L, 144L, 154S/V, 156G/H/S, 171S, 175A, 177K, 181E/N/P/R/S, 183L, 212E/G/K/L, 224A/Q/R, 226R, 230T/V, 247I/L/R/S, 256E/G/M/S/W, 257D/E/G, 260G, 280L/W, 283C/V, 288L/R/W, 291S, 296E/G/L/Q/W, 306G/T, 307K/R, 310H/L/M/N/Q/R/S/T, 315E, 316I/Y, 317E/F/G/Q/V/W, 326C/L, 330A/D/E/G/K, 331D/G/S, 334E, 335Q, 337A/V, 338G/L/M, 342R/S/T, or 345Q/S; or any combinations thereof, wherein the amino acid positions are relative to the reference sequence corresponding to residues 12 to 346 of SEQ ID NO: 2, or relative to the reference sequence corresponding to SEQ ID NO: 2.

[0172] In some embodiments, the substitution at amino acid position 10, 11, 12, 13, 17, 21, 23, 25, 26, 28, 29, 30, 32, 37, 38, 40, 41, 42, 45, 52, 54, 56, 57, 58, 60, 61, 62, 64, 65, 67, 71, 73, 74, 75, 77, 80, 83, 84, 87, 90, 91, 93, 97, 99, 100, 101, 102, 103, 104, 105, 106, 107, 109, 113, 114, 121, 122, 123, 125, 126, 127, 128, 129, 131, 135, 137, 140, 141, 143, 148, 150, 157, 158, 160, 161, 162, 165, 169, 170, 173, 178, 179, 184, 190, 191, 192, 193, 194, 197, 198, 204, 206, 208, 210, 213, 215, 218, 223, 228, 229, 232, 236, 238, 241, 243, 248, 249, 250, 251, 252, 253, 254, 255, 258, 261, 264, 265, 267, 268, 270, 271, 272, 274, 276, 277, 282, 286, 289, 290, 292, 294, 295, 297, 298, 299, 300, 301, 302, 305, 311, 318, 323, 324, 325, 327, 332, 336, 338, 341, 344, or 346 is 10F, 11N, 12A/F/L/M/P/R/T/V, 13W, 17P, 21S, 23K/T, 25A/D/F/G/L/M/S/T, 26L, 28A/L/M/V, 29D/S, 30A/L/T/V/W, 32E, 37A/F/K/L/M/R, 38A/E/L/R/S/T/V, 40D/I/P/S, 41E/I, 42T, 45S, 52C, 54L, 56I/L, 57V, 58M, 60A/C/D/R/S/V, 61A, 62A/V, 64A/Q/W, 65C, 67R, 71T, 73Q/W, 74D, 75A/D, 77M, 80E, 83A/E/G/L/T/V, 84V, 87E, 90E/F, 91A/E/V, 93K, 97A/E, 991, 100A/G/H/L/R/S/T/V, 101P/V/W, 102T, 103G/V, 104T, 105K/L/R, 106G/L/M/Q/R/V/W, 107M/S, 109F/L, 113L/M, 114E, 121N, 122C/F/G/L/Q/T/W, 123K/R, 125K/T, 126M, 127P, 128E, 129L/W, 131T, 135A/H/M/Q/V, 137N/R, 140I, 141D/G, 143A/C/E/F/H/M/T/V, 148F, 150D/L, 157F/Q/V, 158R/S, 160R, 161M/V, 162C, 165M, 169G/N, 170H/Y, 173M, 178V, 179E, 184L, 190I/M, 191C, 192E/F/L/N, 193K/Q, 194A/G/V, 197W, 198M, 204W, 206L, 208H/I/K/L/P/T, 210G/V, 212E/G/K/L, 213D/N/R/T, 214A/C/H/K/Q/Y, 215G/T, 218F, 223C, 228D/L, 229W, 232G/M/N/R/S, 236L/V, 238K/S/V, 241E/G/Q/R, 243H, 248G/I/K/T, 249K/L/R/S, 250E/I/S, 251C/E/F/G/L/R/S/T/Y, 252A/Q, 253L/W, 254E/L/N/Q/S/V, 255N/S/V/Y, 258D/M/P/V, 264A/E/G/S/V, 265A/F, 266C/I, 267I/M, 268F/G/M, 270L/M/V, 271A/E/G/T, 272M/S, 274A, 276A/G/M/V, 277A, 282A/M, 286D/E/F/M/V, 289A/D/E/I/P/T, 290D/H/N/P, 291H/L/Q/R/S/T/W, 292N/S, 294A/S/V/Y, 295C/F/K/L/M/P/Q/R/S/T/V/Y, 297A/I/L, 298I/S, 298C/K/R/V, 299E/I/K/Q/R/T/V, 300A, 301A/F/I/L/M/V, 302A/C/I/L/S, 305V, 311C, 318A/E/G/S, 323E/G, 324D/G/M, 325L, 332E/H/W, 336I/L/M, 338G/L/M, 341A, 344K, or 346S, respectively.

[0173] In some embodiments, the amino acid sequence of the engineered RNA ligase comprises at least a substitution or amino acid residue 10F, 11N, 12A/F/L/M/P/R/T/V, 13W, 17P, 18A/H, 21S, 23K/T, 25A/D/F/G/L/M/S/T, 26L, 28A/L/M/V, 29D/S, 30A/L/T/V/W, 32E, 33A/I/T/V, 37A/F/K/L/M/R, 38A/E/L/R/S/T/V, 39P, 40D/I/P/S, 41E/I, 42T, 45S, 52C, 54L, 56I/L, 57V, 58M, 60A/C/D/R/S/V, 61A, 62A/V, 64A/Q/W, 65C, 67R, 71T, 73Q/W, 74D, 75A/D, 77M, 80E, 83A/E/G/L/T/V, 84V, 86D/L, 87E, 89C/D/E/L/N/Q/R/S/T/V/Y,90E/F,91A/E/V, 93K, 95A/C/G/I, 97A/E, 991, 100A/G/H/L/R/S/T/V, 101P/V/W, 102T, 103G/V, 104T, 105K/L/R, 106G/L/M/Q/R/V/W, 107M/S, 109F/L, 113L/M, 114E, 116L, 117A/Q, 119L, 121N, 122C/F/G/L/Q/T/W, 123K/R, 125K/T, 126M, 127P, 128E, 129L/W, 131T, 135A/H/M/Q/V, 137N/R, 140I, 141D/G, 143A/C/E/F/H/M/T/V, 144L, 148F, 150D/L, 154S/V, 156G/H/S, 157F/Q/V, 158R/S, 160R, 161M/V, 162C, 165M, 169G/N, 170H/Y, 171S, 173M, 175A, 177K, 178V, 179E, 181E/N/P/R/S, 183L, 184L, 185C/F/M/P/S/T/V, 190I/M, 191C, 192E/F/L/N, 193K/Q, 194A/G/V, 197W, 198M, 204W, 206L, 208H/I/K/L/P/T, 210G/V, 212E/G/K/L, 213D/N/R/T, 214A/C/H/K/Q/Y, 215G/T, 218F, 223C, 224A/Q/R, 226R, 228D/L, 229W, 230T/V, 232G/M/N/R/S, 236L/V, 238K/S/V, 241E/G/Q/R, 243H, 247I/L/R/S, 248G/I/K/T, 249K/L/R/S, 250E/I/S, 251C/E/F/G/L/R/S/T/Y, 252A/Q, 253L/W, 254E/L/N/Q/S/V, 255N/S/V/Y, 256E/G/M/S/W, 257D/E/G, 258D/M/P/V, 260G, 261D/P/T, 264A/E/G/S/V, 265A/F, 266C/I, 267I/M, 268F/G/M, 270L/M/V, 271A/E/G/T, 272M/S, 274A, 276A/G/M/V, 277A, 280L/W, 282A/M, 283C/V, 286D/E/F/M/V,288L/R/W, 289A/D/E/I/P/T, 290D/H/N/P, 291H/L/Q/R/S/T/W, 291S, 292N/S, 294A/S/V/Y, 295C/F/K/L/M/P/Q/R/S/T/V/Y, 296E/G/L/Q/W, 297A/I/L, 298I/S, 298C/K/R/V, 299E/I/K/Q/R/T/V, 300A, 301A/F/I/L/M/V, 302A/C/I/L/S, 305V, 306G/T, 307K/R, 310H/L/M/N/Q/R/S/T, 311C, 315E, 316I/Y, 317E/F/G/Q/V/W, 318A/E/G/S, 323E/G, 324D/G/M, 325L, 326C/L, 327E/G/M/S, 330A/D/E/G/K, 331D/G/S, 332E/H/W, 334E, 335Q, 336I/L/M, 337A/V, 338G/L/M, 341A, 342R/S/T, 344K, 345Q/S, or 346S, or any combinations thereof, wherein the amino acid positions are relative to the reference sequence corresponding to residues 12 to 346 of SEQ ID NO: 2, or relative to the reference sequence corresponding to SEQ ID NO: 2.

[0174] In some embodiments, the amino acid sequence of the engineered RNA ligase comprises at least a substitution or amino acid residue S10F, G11N, M12A/F/L/P/R/T/V, F13W, Y15M, S17P, S18A/H, N21S, Y23K/T, N25A/D/F/G/L/M/S/T, K26L, I28A/L/M/V, E29D/S, K30A/L/T/V/W, R32E, G33A/I/L/T/V, D37A/F/K/L/M/R, M38A/E/L/R/S/T/V, H39P, T40D/I/P/S, V41E/I, E42T, A45S, T52C, F54L, V56I/L, I57V, 158M, P60A/C/D/R/S/V, T61A, E62A/V, V64A/Q/W, P65C, K67R, P71T, L73Q/W, E74D, G75A/D, S77M, G80E, H81Y, I83A/E/G/L/T/V, 184V, K86D/G/L, K87E, K89C/D/E/G/L/M/N/Q/R/S/T/V/W/Y, D90E/F, S91A/E/V, V93K, V95A/C/G/I, N97A/E, L99I, N100A/G/H/L/R/S/T/V, A101P/V/W, M102T, D103G/V, L104T, V105K/L/R, S106G/L/M/Q/R/V/W, V107M/S, I109F/L, F113L/M, A114E, G116L, G117A/Q, Q119L, G121N, V122C/F/G/L/Q/T/W, D123K/R, G125K/T, D126M, K127P, D128E, F129L/W, V131T, L135A/H/M/Q/V, D137N/R, N140I, E141D/G, S143A/C/E/F/H/M/T/V, Y144L, Y148F, V150D/L, C154S/V, T156G/H/Q/S, L157F/Q/V, G158R/S, L159F, K160R, L161M/V, A162C, L165M, S169G/N, F170H/Y, A171S, L173M, Q175A, P177K, N178V, D179E, K181E/N/P/R/S, I183L/V, V184L, N185C/F/G/K/M/P/S/T/V, L190I/M, V191C, D192E/F/L/N, T193K/Q, T194A/G/V, E197W, H198M, F204W, P206L, A208H/I/K/L/P/T, S210G/V, T212E/G/K/L, G213D/N/R/T, L214A/C/H/K/L/Q/Y, A215G/T, Y218F, V223C, Y224A/Q/R, I226R, F228D/L, N229W, N230T/V, T232G/M/N/R/S, I236L/V, C238K/S/V, S241E/G/Q/R, F243H, A247I/L/R/S, F248G/I/K/T, L249K/L/R/S, D250E/I/S, K251C/E/F/G/L/R/S/T/Y, P252A/Q, I253L/W, K254E/L/N/Q/S/V, A255N/S/V/Y, K256A/E/G/M/S/W, V257D/E/G, F258D/M/P/V, V260G, E261D/P/T, K264A/E/G/S/V, R265A/F, V266C/I/L, L267I/M, E268F/G/M, F270L/M/V, S271A/E/G/T, E272M/S, V274A, W276A/G/M/V, N277A, S280L/N/W, V282A/M, L283C/V, I286D/E/F/M/V, S288E/L/R/W, V289A/D/E/I/P/T, T290D/H/N/P, A291H/L/Q/R/S/T/W, A292N/S, F294A/S/V/Y, G295C/F/K/L/M/P/Q/R/S/T/V/Y, R296E/G/L/Q/W, V297A/I/L, M298C/I/K/R/S/V, G299E/I/K/Q/R/T/V, L300A, T301A/F/I/L/M/V, M302A/C/I/L/S, I305V, 1306G/L/T, N307K/R, A310H/L/M/N/Q/R/S/T, R311C, D315E/S, L316I/L/Y, L317E/F/G/Q/V/W, F318A/E/G/S, S323E/G, A324D/G/M, V325L, K326C/L, K327E/G/M/S, T330A/D/E/G/K/R, I331D/G/R/S/W, L332E/H/W, Q334E/R, N335H/Q, T336I/L/M, M337A/V, R338G/L/M, W341A, H342R/S/T, V344K, L345Q/S, E346S, or any combinations thereof, wherein the amino acid positions are relative to the reference sequence corresponding to residues 12 to 346 of SEQ ID NO: 2, or relative to the reference sequence corresponding to SEQ ID NO: 2.

[0175] In some embodiments, the amino acid sequence of the engineered RNA ligase comprises at least a substitution at amino acid position 11, 12, 23, 25, 29, 37, 38, 75, 86, 89, 93, 101, 122, 143, 157, 183, 192, 194, 198, 212, 214, 230, 241, 248, 249, 250, 251, 254, 266, 268, 280, 291, 295, 298, 307, 316, 318, 326, 330, or 331, or any combinations thereof, wherein the amino acid positions are relative to the reference sequence corresponding to residues 12 to 346 of SEQ ID NO: 2, or relative to the reference sequence corresponding to SEQ ID NO: 2.

[0176] In some embodiments, the amino acid sequence of the engineered RNA ligase comprises at least a substitution or amino acid residue 11N, 12A/F/L/P/R/T/V, 23K/T, 25A/D/F/G/L/M/S/T, 29D/S, 37A/F/K/L/M/R, 38A/E/L/R/S/T/V, 75A/D, 86D/L, 89C/D/E/L/N/Q/R/S/T/V/Y, 93K, 101P/V/W, 122C/F/G/L/Q/T/W, 143A/C/E/F/H/M/T/V, 157F/Q/V, 183L/V, 192E/F/L/N, 194A/G/V, 198M, 212E/G/I/K/L, 214A/C/H/K/L/Q/Y, 230T/V, 241E/G/Q/R, 248G/I/K/T, 249K/L/R/S, 250E/I/S, 251C/E/F/G/L/R/S/T/Y, 254E/K/L/N/Q/S/V, 266C/I/L, 268F/G/M, 280L/N/W, 291H/L/Q/R/S/T/W, 295C/F/K/L/M/P/Q/R/S/T/V/Y,298C/I/K/R/S/V, 307K/R, 316I/L/Y, 318A/E/G/S, 326C/L, 330A/D/E/G/K/R, or 331D/G/R/S/W, or any combinations thereof, wherein the amino acid positions are relative to the reference sequence corresponding to residues 12 to 346 of SEQ ID NO: 2, or relative to the reference sequence corresponding to SEQ ID NO: 2.

[0177] In some embodiments, the amino acid sequence of the engineered RNA ligase comprises at least a substitution or amino acid residue 11N, 12T, 23T, 25A, 29S, 37L, 38A/S, 75D, 86D, 89M, 93K, 101P, 122F, 157V, 183L, 192E, 194V, 198M, 212E, 214L, 226R, 230T/V, 241G, 249L, 250I, 251E/S, 254S, 266L, 268G, 280L, 291Q, 295V, 298S/V, 307R, 316L, 318S, 326L, 330A, or 331G, or any combinations thereof, wherein the amino acid positions are relative to the reference sequence corresponding to residues 12 to 346 of SEQ ID NO: 2, or relative to the reference sequence corresponding to SEQ ID NO: 2.

[0178] In some embodiments, the amino acid sequence of the engineered RNA ligase comprises at least a substitution at amino acid position 11, 12, 23, 25, 29, 37, 38, 75, 93, 101, 122, 143, 157, 192, 194, 198, 241, 248, 249, 250, 251, 254, 268, 295, 298, or 318; a substitution or amino acid residue 86D/L, 89C/D/E/L/N/Q/R/S/T/V/Y, 183L, 212E/G/K/L, 214A/C/H/K/L/Q/Y, 226R, 230T/V, 266C/1, 280L/W, 291H/L/Q/R/S/T/W, 307K/R, 326C/L, 330A/D/E/G/K, or 331D/G/S; or any combinations thereof, wherein the amino acid positions are relative to the reference sequence corresponding to residues 12 to 346 of SEQ ID NO: 2, or relative to the reference sequence corresponding to SEQ ID NO: 2.

[0179] In some embodiments, the amino acid sequence of the engineered RNA ligase comprises at least a substitution or amino acid residue 11N, 12A/F/L/P/R/T/V, 23K/T, 25A/D/F/G/L/M/S/T, 29D/S, 37A/F/K/L/M/R, 38A/E/L/R/S/T/V, 75A/D, 86D/L, 89C/D/E/L/N/Q/R/S/T/V/Y, 93K, 101P/V/W, 122C/F/G/L/Q/T/W, 143A/C/E/F/H/M/T/V, 157F/Q/V, 183L, 192E/F/L/N, 194A/G/V, 198M, 212E/G/K/L, 214A/C/H/K/L/Q/Y, 226R, 230T/V, 241E/G/Q/R, 248G/I/K/T, 249K/L/R/S, 250E/I/S, 251C/E/F/G/L/R/S/T/Y, 254E/L/N/Q/S/V, 266C/1, 268F/G/M, 280L/W, 291H/L/Q/R/S/T/W, 295C/F/K/L/M/P/Q/R/S/T/V/Y, 298C/K/R/V, 307K/R, 318A/E/G/S, 326C/L, 330A/D/E/G/K, or 331D/G/S, or any combinations thereof, wherein the amino acid positions are relative to the reference sequence corresponding to residues 12 to 346 of SEQ ID NO: 2, or relative to the reference sequence corresponding to SEQ ID NO: 2.

[0180] In some embodiments, the amino acid sequence of the engineered RNA ligase comprises at least a substitution or amino acid residue 11N, 12T, 23T, 25A, 29S, 37L, 38A/S, 75D, 86D, 93K, 101P, 122F, 157V, 183L, 192E, 194V, 198M, 212E, 214L, 226R, 230T/V, 241G, 249L, 2501, 251E/S, 254S, 266L, 268G, 280L, 291Q, 295V, 298S/V, 307R, 318S, 326L, 330A, or 331G, or any combinations thereof, wherein the amino acid positions are relative to the reference sequence corresponding to residues 12 to 346 of SEQ ID NO: 2, or relative to the reference sequence corresponding to SEQ ID NO: 2.

[0181] In some embodiments, the amino acid sequence of the engineered RNA ligase comprises at least a substitution at amino acid position 11, 37, 249, 266, or 316 or any combinations thereof, wherein the amino acid positions are relative to the reference sequence corresponding to residues 12 to 346 of SEQ ID NO: 2, or relative to the reference sequence corresponding to SEQ ID NO: 2. In some embodiments, the amino acid sequence of the engineered RNA ligase comprises at least a substitution or amino acid residue 11N, 37L, 249L, 266L, or 316L, or any combinations thereof, wherein the amino acid positions are relative to the reference sequence corresponding to residues 12 to 346 of SEQ ID NO: 2, or relative to the reference sequence corresponding to SEQ ID NO: 2. In some embodiments, the amino acid sequence of the engineered RNA ligase comprises at least a substitution G11N, D37L, S249L, V266L, or M316L, or any combinations thereof, wherein the amino acid positions are relative to the reference sequence corresponding to residues 12 to 346 of SEQ ID NO: 2, or relative to the reference sequence corresponding to SEQ ID NO: 2. In some embodiments, the amino acid sequence of the engineered RNA ligase comprises at least a substitution set at amino acid positions 11/37/249/266/316, wherein the amino acid positions are relative to the reference sequence corresponding to residues 12 to 346 of SEQ ID NO: 2, or relative to the reference sequence corresponding to SEQ ID NO: 2. In some embodiments, the amino acid sequence of the engineered RNA ligase comprises at least a substitution set 11N/37L/249L/266L/316L, wherein the amino acid positions are relative to the reference sequence corresponding to residues 12 to 346 of SEQ ID NO: 2, or relative to the reference sequence corresponding to SEQ ID NO: 2.

[0182] In some embodiments, the amino acid sequence of the engineered RNA ligase comprises at least a substitution at amino acid position 12, 230, or 251, or any combinations thereof, wherein the amino acid positions are relative to the reference sequence corresponding to residues 12 to 346 of SEQ ID NO: 2, or relative to the reference sequence corresponding to SEQ ID NO: 2. In some embodiments, the amino acid sequence of the engineered RNA ligase comprises at least a substitution or amino acid residue 12T, 230T, or 251S, or any combinations thereof, wherein the amino acid positions are relative to the reference sequence corresponding to residues 12 to 346 of SEQ ID NO: 2, or relative to the reference sequence corresponding to SEQ ID NO: 2. In some embodiments, the amino acid sequence of the engineered RNA ligase comprises at least a substitution M12T, N230T, or K251S, or any combinations thereof, wherein the amino acid positions are relative to the reference sequence corresponding to residues 12 to 346 of SEQ ID NO: 2, or relative to the reference sequence corresponding to SEQ ID NO: 2. In some embodiments, the amino acid sequence of the engineered RNA ligase comprises at least a substitution set at amino acid positions 12/230/251, wherein the amino acid positions are relative to the reference sequence corresponding to residues 12 to 346 of SEQ ID NO: 2, or relative to the reference sequence corresponding to SEQ ID NO: 2. In some embodiments, the amino acid sequence of the engineered RNA ligase comprises at least a substitution set 12T/230T/251S, wherein the amino acid positions are relative to the reference sequence corresponding to residues 12 to 346 of SEQ ID NO: 2, or relative to the reference sequence corresponding to SEQ ID NO: 2.

[0183] In some embodiments, the amino acid sequence of the engineered RNA ligase comprises at least a substitution at amino acid position 198 or 326, or combination thereof, wherein the amino acid positions are relative to the reference sequence corresponding to residues 12 to 346 of SEQ ID NO: 2, or relative to the reference sequence corresponding to SEQ ID NO: 2. In some embodiments, the amino acid sequence of the engineered RNA ligase comprises at least a substitution or amino acid residue 198M or 326L, or combination thereof, wherein the amino acid positions are relative to the reference sequence corresponding to residues 12 to 346 of SEQ ID NO: 2, or relative to the reference sequence corresponding to SEQ ID NO: 2. In some embodiments, the amino acid sequence of the engineered RNA ligase comprises at least a substitution H198M or K326L, or combination thereof, wherein the amino acid positions are relative to the reference sequence corresponding to residues 12 to 346 of SEQ ID NO: 2, or relative to the reference sequence corresponding to SEQ ID NO: 2. In some embodiments, the amino acid sequence of the engineered RNA ligase comprises at least a substitution set at amino acid positions 198/326, wherein the amino acid positions are relative to the reference sequence corresponding to residues 12 to 346 of SEQ ID NO: 2, or relative to the reference sequence corresponding to SEQ ID NO: 2. In some embodiments, the amino acid sequence of the engineered RNA ligase comprises at least a substitution set 198M/326L, wherein the amino acid positions are relative to the reference sequence corresponding to residues 12 to 346 of SEQ ID NO: 2, or relative to the reference sequence corresponding to SEQ ID NO: 2.

[0184] In some embodiments, the amino acid sequence of the engineered RNA ligase comprises at least a substitution at amino acid position 194, 298, or 331, or any combinations thereof, wherein the amino acid positions are relative to the reference sequence corresponding to residues 12 to 346 of SEQ ID NO: 2, or relative to the reference sequence corresponding to SEQ ID NO: 2. In some embodiments, the amino acid sequence of the engineered RNA ligase comprises at least a substitution or amino acid residue 194V, 298S, or 331G, or any combinations thereof, wherein the amino acid positions are relative to the reference sequence corresponding to residues 12 to 346 of SEQ ID NO: 2, or relative to the reference sequence corresponding to SEQ ID NO: 2. In some embodiments, the amino acid sequence of the engineered RNA ligase comprises at least a substitution T194V, M298S, or 1331G, or any combinations thereof, wherein the amino acid positions are relative to the reference sequence corresponding to residues 12 to 346 of SEQ ID NO: 2, or relative to the reference sequence corresponding to SEQ ID NO: 2. In some embodiments, the amino acid sequence of the engineered RNA ligase comprises at least a substitution set at amino acid positions 194/298/331, wherein the amino acid positions are relative to the reference sequence corresponding to residues 12 to 346 of SEQ ID NO: 2, or relative to the reference sequence corresponding to SEQ ID NO: 2. In some embodiments, the amino acid sequence of the engineered RNA ligase comprises at least a substitution set 194V/298S/331G, wherein the amino acid positions are relative to the reference sequence corresponding to residues 12 to 346 of SEQ ID NO: 2, or relative to the reference sequence corresponding to SEQ ID NO: 2.

[0185] In some embodiments, the amino acid sequence of the engineered RNA ligase comprises at least a substitution at amino acid position 12 or 25, or combination thereof, wherein the amino acid positions are relative to the reference sequence corresponding to residues 12 to 346 of SEQ ID NO: 2, or relative to the reference sequence corresponding to SEQ ID NO: 2. In some embodiments, the amino acid sequence of the engineered RNA ligase comprises at least a substitution or amino acid residue 12M or 25A, or combination thereof, wherein the amino acid positions are relative to the reference sequence corresponding to residues 12 to 346 of SEQ ID NO: 2, or relative to the reference sequence corresponding to SEQ ID NO: 2. In some embodiments, the amino acid sequence of the engineered RNA ligase comprises at least a substitution T12M or N25A, or combination thereof, wherein the amino acid positions are relative to the reference sequence corresponding to residues 12 to 346 of SEQ ID NO: 2, or relative to the reference sequence corresponding to SEQ ID NO: 2. In some embodiments, the amino acid sequence of the engineered RNA ligase comprises at least a substitution set at amino acid positions 12/25, wherein the amino acid positions are relative to the reference sequence corresponding to residues 12 to 346 of SEQ ID NO: 2, or relative to the reference sequence corresponding to SEQ ID NO: 2. In some embodiments, the amino acid sequence of the engineered RNA ligase comprises at least a substitution set 12M/25A, wherein the amino acid positions are relative to the reference sequence corresponding to residues 12 to 346 of SEQ ID NO: 2, or relative to the reference sequence corresponding to SEQ ID NO: 2.

[0186] In some embodiments, the amino acid sequence of the engineered RNA ligase comprises at least a substitution at amino acid position 89, 157, 183, or 214, or any combinations thereof, wherein the amino acid positions are relative to the reference sequence corresponding to residues 12 to 346 of SEQ ID NO: 2, or relative to the reference sequence corresponding to SEQ ID NO: 2. In some embodiments, the amino acid sequence of the engineered RNA ligase comprises at least a substitution or amino acid residue 89M, 157V, 183L, or 214L, or any combinations thereof, wherein the amino acid positions are relative to the reference sequence corresponding to residues 12 to 346 of SEQ ID NO: 2, or relative to the reference sequence corresponding to SEQ ID NO: 2. In some embodiments, the amino acid sequence of the engineered RNA ligase comprises at least a substitution K89M, L157V, 1183L, or V214L, or any combinations thereof, wherein the amino acid positions are relative to the reference sequence corresponding to residues 12 to 346 of SEQ ID NO: 2, or relative to the reference sequence corresponding to SEQ ID NO: 2. In some embodiments, the amino acid sequence of the engineered RNA ligase comprises at least a substitution set at amino acid positions 89/157/183/214, wherein the amino acid positions are relative to the reference sequence corresponding to residues 12 to 346 of SEQ ID NO: 2, or relative to the reference sequence corresponding to SEQ ID NO: 2. In some embodiments, the amino acid sequence of the engineered RNA ligase comprises at least a substitution set 89M/157V/183L/214L, wherein the amino acid positions are relative to the reference sequence corresponding to residues 12 to 346 of SEQ ID NO: 2, or relative to the reference sequence corresponding to SEQ ID NO: 2.

[0187] In some embodiments, the amino acid sequence of the engineered RNA ligase comprises at least a substitution at amino acid position 29, 226, or 230, or any combinations thereof, wherein the amino acid positions are relative to the reference sequence corresponding to residues 12 to 346 of SEQ ID NO: 2, or relative to the reference sequence corresponding to SEQ ID NO: 2. In some embodiments, the amino acid sequence of the engineered RNA ligase comprises at least a substitution or amino acid residue 29S, 226R, or 230V, or any combinations thereof, wherein the amino acid positions are relative to the reference sequence corresponding to residues 12 to 346 of SEQ ID NO: 2, or relative to the reference sequence corresponding to SEQ ID NO: 2. In some embodiments, the amino acid sequence of the engineered RNA ligase comprises at least a substitution E29S, I226R, or T230V, or any combinations thereof, wherein the amino acid positions are relative to the reference sequence corresponding to residues 12 to 346 of SEQ ID NO: 2, or relative to the reference sequence corresponding to SEQ ID NO: 2. In some embodiments, the amino acid sequence of the engineered RNA ligase comprises at least a substitution set at amino acid positions 29/226/230, wherein the amino acid positions are relative to the reference sequence corresponding to residues 12 to 346 of SEQ ID NO: 2, or relative to the reference sequence corresponding to SEQ ID NO: 2. In some embodiments, the amino acid sequence of the engineered RNA ligase comprises at least a substitution set 29S/226R/230V, wherein the amino acid positions are relative to the reference sequence corresponding to residues 12 to 346 of SEQ ID NO: 2, or relative to the reference sequence corresponding to SEQ ID NO: 2.

[0188] In some embodiments, the amino acid sequence of the engineered RNA ligase comprises at least a substitution at amino acid position 23 or 254, or combination thereof, wherein the amino acid positions are relative to the reference sequence corresponding to residues 12 to 346 of SEQ ID NO: 2, or relative to the reference sequence corresponding to SEQ ID NO: 2. In some embodiments, the amino acid sequence of the engineered RNA ligase comprises at least a substitution or amino acid residue 23T or 254K, or combination thereof, wherein the amino acid positions are relative to the reference sequence corresponding to residues 12 to 346 of SEQ ID NO: 2, or relative to the reference sequence corresponding to SEQ ID NO: 2. In some embodiments, the amino acid sequence of the engineered RNA ligase comprises at least a substitution Y23T or S254K, or combination thereof, wherein the amino acid positions are relative to the reference sequence corresponding to residues 12 to 346 of SEQ ID NO: 2, or relative to the reference sequence corresponding to SEQ ID NO: 2. In some embodiments, the amino acid sequence of the engineered RNA ligase comprises at least a substitution set at amino acid positions 23/254, wherein the amino acid positions are relative to the reference sequence corresponding to residues 12 to 346 of SEQ ID NO: 2, or relative to the reference sequence corresponding to SEQ ID NO: 2. In some embodiments, the amino acid sequence of the engineered RNA ligase comprises at least a substitution set 23T/254K, wherein the amino acid positions are relative to the reference sequence corresponding to residues 12 to 346 of SEQ ID NO: 2, or relative to the reference sequence corresponding to SEQ ID NO: 2.

[0189] In some embodiments, the amino acid sequence of the engineered RNA ligase comprises at least a substitution at amino acid position 75, 250, 268, or 307, or an combinations thereof, wherein the amino acid positions are relative to the reference sequence corresponding to residues 12 to 346 of SEQ ID NO: 2, or relative to the reference sequence corresponding to SEQ ID NO: 2. In some embodiments, the amino acid sequence of the engineered RNA ligase comprises at least a substitution or amino acid residue 75D, 250I, 268G, or 307R, or any combinations thereof, wherein the amino acid positions are relative to the reference sequence corresponding to residues 12 to 346 of SEQ ID NO: 2, or relative to the reference sequence corresponding to SEQ ID NO: 2. In some embodiments, the amino acid sequence of the engineered RNA ligase comprises at least a substitution G75D, D250I, E268G, or N307R, or any combinations thereof, wherein the amino acid positions are relative to the reference sequence corresponding to residues 12 to 346 of SEQ ID NO: 2, or relative to the reference sequence corresponding to SEQ ID NO: 2. In some embodiments, the amino acid sequence of the engineered RNA ligase comprises at least a substitution set at amino acid positions 75/250/268/307, wherein the amino acid positions are relative to the reference sequence corresponding to residues 12 to 346 of SEQ ID NO: 2, or relative to the reference sequence corresponding to SEQ ID NO: 2. In some embodiments, the amino acid sequence of the engineered RNA ligase comprises at least a substitution set 75D/250I/268G/307R, wherein the amino acid positions are relative to the reference sequence corresponding to residues 12 to 346 of SEQ ID NO: 2, or relative to the reference sequence corresponding to SEQ ID NO: 2.

[0190] In some embodiments, the amino acid sequence of the engineered RNA ligase comprises at least a substitution at amino acid position 38, 93, 192, 248, or 251, or an combinations thereof, wherein the amino acid positions are relative to the reference sequence corresponding to residues 12 to 346 of SEQ ID NO: 2, or relative to the reference sequence corresponding to SEQ ID NO: 2. In some embodiments, the amino acid sequence of the engineered RNA ligase comprises at least a substitution or amino acid residue 38S, 93K, 192E, 248F, or 251E, or any combinations thereof, wherein the amino acid positions are relative to the reference sequence corresponding to residues 12 to 346 of SEQ ID NO: 2, or relative to the reference sequence corresponding to SEQ ID NO: 2. In some embodiments, the amino acid sequence of the engineered RNA ligase comprises at least a substitution M38S, V93K, D192E, K248F, or S251E, or any combinations thereof, wherein the amino acid positions are relative to the reference sequence corresponding to residues 12 to 346 of SEQ ID NO: 2, or relative to the reference sequence corresponding to SEQ ID NO: 2. In some embodiments, the amino acid sequence of the engineered RNA ligase comprises at least a substitution set at amino acid positions 38/93/192/248/251, wherein the amino acid positions are relative to the reference sequence corresponding to residues 12 to 346 of SEQ ID NO: 2, or relative to the reference sequence corresponding to SEQ ID NO: 2. In some embodiments, the amino acid sequence of the engineered RNA ligase comprises at least a substitution set 38S/93K/192E/248F/251E, wherein the amino acid positions are relative to the reference sequence corresponding to residues 12 to 346 of SEQ ID NO: 2, or relative to the reference sequence corresponding to SEQ ID NO: 2.

[0191] In some embodiments, the amino acid sequence of the engineered RNA ligase comprises at least a substitution at amino acid position 38, 86, 101, 241, or 318, or an combinations thereof, wherein the amino acid positions are relative to the reference sequence corresponding to residues 12 to 346 of SEQ ID NO: 2, or relative to the reference sequence corresponding to SEQ ID NO: 2. In some embodiments, the amino acid sequence of the engineered RNA ligase comprises at least a substitution or amino acid residue 38A, 86D, 101P, 241G, or 318S, or any combinations thereof, wherein the amino acid positions are relative to the reference sequence corresponding to residues 12 to 346 of SEQ ID NO: 2, or relative to the reference sequence corresponding to SEQ ID NO: 2. In some embodiments, the amino acid sequence of the engineered RNA ligase comprises at least a substitution M38A, K86D, A101P, S241G, or F318S, or any combinations thereof, wherein the amino acid positions are relative to the reference sequence corresponding to residues 12 to 346 of SEQ ID NO: 2, or relative to the reference sequence corresponding to SEQ ID NO: 2. In some embodiments, the amino acid sequence of the engineered RNA ligase comprises at least a substitution set at amino acid positions 38/86/101/241/318, wherein the amino acid positions are relative to the reference sequence corresponding to residues 12 to 346 of SEQ ID NO: 2, or relative to the reference sequence corresponding to SEQ ID NO: 2. In some embodiments, the amino acid sequence of the engineered RNA ligase comprises at least a substitution set 38A/86D/101P/241G/318S, wherein the amino acid positions are relative to the reference sequence corresponding to residues 12 to 346 of SEQ ID NO: 2, or relative to the reference sequence corresponding to SEQ ID NO: 2.

[0192] In some embodiments, the amino acid sequence of the engineered RNA ligase comprises at least a substitution at amino acid position 122, 143, 212, or 295, or an combinations thereof, wherein the amino acid positions are relative to the reference sequence corresponding to residues 12 to 346 of SEQ ID NO: 2, or relative to the reference sequence corresponding to SEQ ID NO: 2. In some embodiments, the amino acid sequence of the engineered RNA ligase comprises at least a substitution or amino acid residue 122F, 143S, 212E, or 295V, or any combinations thereof, wherein the amino acid positions are relative to the reference sequence corresponding to residues 12 to 346 of SEQ ID NO: 2, or relative to the reference sequence corresponding to SEQ ID NO: 2. In some embodiments, the amino acid sequence of the engineered RNA ligase comprises at least a substitution V122F, V143S, T212E, or G295V, or any combinations thereof, wherein the amino acid positions are relative to the reference sequence corresponding to residues 12 to 346 of SEQ ID NO: 2, or relative to the reference sequence corresponding to SEQ ID NO: 2. In some embodiments, the amino acid sequence of the engineered RNA ligase comprises at least a substitution set at amino acid positions 122/143/212/295, wherein the amino acid positions are relative to the reference sequence corresponding to residues 12 to 346 of SEQ ID NO: 2, or relative to the reference sequence corresponding to SEQ ID NO: 2. In some embodiments, the amino acid sequence of the engineered RNA ligase comprises at least a substitution set 122F/143S/212E/295V, wherein the amino acid positions are relative to the reference sequence corresponding to residues 12 to 346 of SEQ ID NO: 2, or relative to the reference sequence corresponding to SEQ ID NO: 2.

[0193] In some embodiments, the amino acid sequence of the engineered RNA ligase comprises at least a substitution at amino acid position 291, 295, or 298, or an combinations thereof, wherein the amino acid positions are relative to the reference sequence corresponding to residues 12 to 346 of SEQ ID NO: 2, or relative to the reference sequence corresponding to SEQ ID NO: 2. In some embodiments, the amino acid sequence of the engineered RNA ligase comprises at least a substitution or amino acid residue 291Q, 295G, or 298V, or any combinations thereof, wherein the amino acid positions are relative to the reference sequence corresponding to residues 12 to 346 of SEQ ID NO: 2, or relative to the reference sequence corresponding to SEQ ID NO: 2. In some embodiments, the amino acid sequence of the engineered RNA ligase comprises at least a substitution A291Q, V295G, or S298V, or any combinations thereof, wherein the amino acid positions are relative to the reference sequence corresponding to residues 12 to 346 of SEQ ID NO: 2, or relative to the reference sequence corresponding to SEQ ID NO: 2. In some embodiments, the amino acid sequence of the engineered RNA ligase comprises at least a substitution set at amino acid positions 291/295/298, wherein the amino acid positions are relative to the reference sequence corresponding to residues 12 to 346 of SEQ ID NO: 2, or relative to the reference sequence corresponding to SEQ ID NO: 2. In some embodiments, the amino acid sequence of the engineered RNA ligase comprises at least a substitution set 291Q/295G/298V, wherein the amino acid positions are relative to the reference sequence corresponding to residues 12 to 346 of SEQ ID NO: 2, or relative to the reference sequence corresponding to SEQ ID NO: 2.

[0194] In some embodiments, the amino acid sequence of the engineered RNA ligase further comprises at least a substitution at amino acid position 2, 14, 15, 63, 69, 81, 85, 95, 138, 142, 149, 159, 171, 186, 195, 202, 266, 275, 283, 285, 303, 314, 333, or 339; a substitution or amino acid residue 181, 33L, 39Q/S, 86G, 89G/H/I/M/W, 116N, 117D, 119T, 144W, 154C, 156A/L/N/Q/T, 175K, 177P, 181D, 183V, 185G/K, 212I, 2141, 224Y, 2261, 230D, 247K, 256A, 257L, 260S, 280G/N, 288E, 291P, 296K, 306L, 307E/Q, 310K, 315S/T, 316L, 317A, 326R, 330M/R, 331L/R/W, 334R, 335D/H, 337L, 3421, or 345V; or any combinations thereof, wherein the amino acid positions are relative to the reference sequence corresponding to residues 12 to 346 of SEQ ID NO: 2, or relative to the reference sequence corresponding to SEQ ID NO: 2.

[0195] In some embodiments, the amino acid sequence of the engineered RNA ligase further comprises at least a substitution or amino acid residue 2E/G/V, 14K, 15E/L/M/P/Y, 18I, 33L, 39Q/S, 63V, 69D, 81Y, 85L, 86G, 89G/H/I/M/W, 95V, 116N, 117D, 119T, 138R, 142R, 144W, 149R/T, 154C, 156A/L/N/Q/T, 159F, 171E, 175K, 177P, 181D, 183V, 185G/K, 186D/R, 195G, 202Y, 2121, 2141, 224Y, 2261, 230D, 247K, 256A, 257L, 260S, 266L, 275N, 280G/N, 2831, 285K, 288E, 291P, 296K, 303Q, 306L, 307E/Q, 310K, 314W, 315S/T, 316L, 317A, 326R, 330M/R, 331L/R/W, 333V, 334R, 335D/H, 337L, 339P, 342I, or 345V, or any combinations thereof, wherein the amino acid positions are relative to the reference sequence corresponding to residues 12 to 346 of SEQ ID NO: 2, or relative to the reference sequence corresponding to SEQ ID NO: 2.

[0196] In some embodiments, the amino acid sequence of the engineered RNA ligase comprises at least a substitution or substitution set at amino acid position(s) 256, 258, 254, 251, 248, 37, 54, 232, 15, 71, 26, 116, 38, 25, 106/251, 52, 33, 247, 37/249/266/316/330/334/335, 21, 11/37/249/266/316, 261, 11/266/316, 11/248/249/266, 331, 11/248/249, 255, 37/249/266/316/334, 266, 11/37/156/249/335, 37/156/248/249/266/334, 334, 156, 11/266/316/334, 11/39/156/248/316, 11/249, 37/156,107/251, 156/249/316, 37/156/316, 11/37/156/249, 11/37/334, 194, 37/316,175, 11/156/249/316, 11/37, 252, 12, 37/266, 11/37/156/266, 11/37/156/248/266, 37/236/248/249, 37/156/248/249, 11/266/330/335, 249, 11/156/248/249/316, 37/249/316, 11, 11/156, 11/37/249, 330, 316, 156/249/266/335, 249/266/316/330/335, 11/156/249, 266/316/330/334/335, 156/248/249/316/334, 37/156/248/249/316, 156/266, 248/249, 156/249/316/330/335, 218, 37/156/248/249/266, 11/37/156/248/249/316, 37/156/316/330, 11/37/248/249/316/330, 11/37/248/249, 249/330/335, 11/37/156/330/334, 40, 11/37/148/249/316, 83, 323, 193, 335, or 257, wherein the amino acid positions are relative to the reference sequence corresponding to residues 12 to 346 of SEQ ID NO: 2, or relative to the reference sequence corresponding to SEQ ID NO: 2.

[0197] In some embodiments, the amino acid sequence of the engineered RNA ligase comprises at least a substitution or substitution set, or amino acid residue(s) 256A, 258P, 254L, 251S, 248T, 37M, 54L, 258M, 232S, 15M, 71T, 26L, 232M, 116L, 38S, 251L, 25S, 106G/251F, 52C, 33L, 251G, 256S, 247L, 37L/249R/266L/316L/330R/334R/335H, 21S, 11N/37L/249L/266L/316L, 261P, 11N/266L/316L, 11N/248T/249R/266L, 331D, 11N/248T/249L, 37F, 255V, 37L/249R/266L/316L/334R, 38L, 266L, 232R, 11N/37L/156Q/249R/335H, 37L/156Q/248T/249R/266L/334R, 334E, 156Q, 11N/266L/316L/334R, 11N/39P/156Q/248T/316L, 11N/249R, 37L/156Q, 107M/251R, 156Q/249R/316L, 37L/156Q/316L, 11N/37L/156Q/249L, 11N/37L/334R, 194A, 37L/316L, 175A, 11N/156Q/249L/316L, 11N/37L, 252Q, 37L, 12F, 11N/249L, 37L/266L, 11N/37L/156Q/266L, 11N/37L/156Q/248T/266L, 37L/236L/248T/249R, 37L/156Q/248T/249L, 11N/266L/330R/335H, 249L, 11N/156Q/248T/249R/316L, 37L/249L/316L, 11N, 11N/156Q, 11N/37L/249L, 330R, 316L, 156Q/249L/266L/335H, 249L/266L/316L/330R/335H, 11N/156Q/249L, 249R, 266L/316L/330R/334R/335H, 254V, 156Q/248T/249L/316L/334R, 33A, 37L/156Q/248T/249R/316L, 156Q/266L, 248T/249L, 25M, 156Q/249R/316L/330R/335H, 218F, 12V, 12T, 37L/156Q/248T/249L/266L, 12L, 11N/37L/156Q/248T/249L/316L, 37L/156Q/316L/330R, 11N/37L/248T/249R/316L/330R, 11N/37L/248T/249L, 249R/330R/335H, 11N/37L/156Q/330R/334R, 25L, 38R, 40D, 248T/249R, 11N/37L/148F/249L/316L, 83V, 323E, 193Q, 335H, 257G, or 258V, wherein the amino acid positions are relative to the reference sequence corresponding to residues 12 to 346 of SEQ ID NO: 2, or relative to the reference sequence corresponding to SEQ ID NO: 2.

[0198] In some embodiments, the amino acid sequence of the engineered RNA ligase comprises at least a substitution or substitution set or amino acid residue(s) K256A, E258P, K254L, K251S, K248T, D37M, F54L, E258M, T232S, Y15M, P71T, K26L, T232M, G116L, M38S, K251L, N25S, S106G/K251F, T52C, G33L, K251G, K256S, A247L, D37L/S249R/V266L/M316L/T330R/Q334R/N335H, N21S, G11N/D37L/S249L/V266L/M316L, E261P, G11N/V266L/M316L, G11N/K248T/S249R/V266L, 1331D, G11N/K248T/S249L, D37F, A255V, D37L/S249R/V266L/M316L/Q334R, M38L, V266L, T232R, G11N/D37L/T156Q/S249R/N335H, D37L/T156Q/K248T/S249R/V266L/Q334R, Q334E, T156Q, G11N/V266L/M316L/Q334R, G11N/H39P/T156Q/K248T/M316L, G11N/S249R, D37L/T156Q, V107M/K251R, T156Q/S249R/M316L, D37L/T156Q/M316L, G11N/D37L/T156Q/S249L, G11N/D37L/Q334R, T194A, D37L/M316L, Q175A, G11N/T156Q/S249L/M316L, G11N/D37L, P252Q, D37L, M12F, G11N/S249L, D37L/V266L,G11N/D37L/T156Q/V266L, G11N/D37L/T156Q/K248T/V266L, D37L/1236L/K248T/S249R, D37L/T156Q/K248T/S249L, G11N/V266L/T330R/N335H, S249L, G11N/T156Q/K248T/S249R/M316L, D37L/S249L/M316L, G11N, G11N/T156Q, G11N/D37L/S249L, T330R, M316L, T156Q/S249L/V266L/N335H, S249L/V266L/M316L/T330R/N335H, G11N/T156Q/S249L, S249R, V266L/M316L/T330R/Q334R/N335H, K254V, T156Q/K248T/S249L/M316L/Q334R, G33A, D37L/T156Q/K248T/S249R/M316L, T156Q/V266L, K248T/S249L, N25M, T156Q/S249R/M316L/T330R/N335H, Y218F, M12V, M12T, D37L/T156Q/K248T/S249L/V266L, M12L, G11N/D37L/T156Q/K248T/S249L/M316L, D37L/T156Q/M316L/T330R, G11N/D37L/K248T/S249R/M316L/T330R, G11N/D37L/K248T/S249L, S249R/T330R/N335H, G11N/D37L/T156Q/T330R/Q334R, N25L, M38R, T40D, K248T/S249R, G11N/D37L/Y148F/S249L/M316L, 183V, S323E, T193Q, N335H, V257G, or E258V, wherein the amino acid positions are relative to the reference sequence corresponding to residues 12 to 346 of SEQ ID NO: 2, or relative to the reference sequence corresponding to SEQ ID NO: 2.

[0199] In some embodiments, the amino acid sequence of the engineered RNA ligase comprises at least a substitution set at amino acid positions 11/37/156/232/249/266/316/334/335, 11/12/37/249/254/256/266/316, 11/12/37/230/249/266/316, 11/12/37/230/249/251/266/316, 11/12/37/230/249/251/254/256/266/316, 11/12/37/38/230/249/266/316, 11/37/230/249/251/266/316, 11/12/37/38/249/254/266/316, 11/37/230/249/256/266/316, 11/37/249/254/266/316, 11/37/230/249/266/316, 11/12/37/230/249/254/266/316, 11/12/37/38/230/249/251/256/266/316, 11/12/37/249/251/266/316, 11/12/37/249/251/254/256/266/316, 11/37/38/249/266/316, 11/12/37/230/249/256/266/316, 11/12/37/249/266/316, 11/12/25/37/38/230/249/251/266/316, 11/12/37/38/102/230/249/251/256/266/316, 11/12/37/249/256/266/316, 11/37/38/230/249/256/266/316, 11/37/249/256/266/316, 11/12/37/230/249/251/256/266/316, 11/37/230/249/251/254/266/316, 11/37/230/249/254/266/316, 11/37/249/251/254/266/316, 11/12/25/37/230/249/266/316, 11/37/38/230/249/266/316, 11/37/38/249/251/266/316, 11/12/37/38/230/249/256/266/316, 11/37/102/249/266/316, 11/37/249/251/266/316, 11/12/25/37/249/251/256/266/316, 11/12/37/102/249/256/266/316, 11/12/37/38/230/249/251/254/256/266/316, 11/12/37/249/251/256/266/316, 11/37/102/230/249/251/254/256/266/316, 11/12/37/38/249/251/266/316, 11/12/37/230/249/251/254/266/316, 11/37/156/248/249/266/316/334/335, 11/12/25/37/38/249/266/316, 11/12/37/102/230/249/251/254/266/316, 11/12/37/38/249/251/254/266/316, 11/12/37/249/251/254/266/316, 11/12/37/102/249/266/316, 11/37/38/230/249/251/254/256/266/316, 11/12/25/37/230/249/251/256/266/316, 11/12/37/230/249/266/311/316, 11/12/37/249/254/266/316, 11/37/38/230/249/251/254/266/316, 11/12/37/38/249/251/256/266/316, 11/37/156/249/266/316/334/335, 11/37/249/257/258/266/316/334, 11/12/25/37/38/249/251/256/266/316, 11/37/249/266/316/334, 11/12/25/37/230/249/254/256/266/316, 11/37/38/249/251/256/266/316, 11/12/37/38/230/249/251/254/266/316, 11/12/37/38/249/266/316, 11/37/249/257/258/266/316/334/335, 11/12/37/38/249/254/256/266/316, 11/37/232/248/249/257/258/266/316/334/335, 11/37/156/249/258/266/316/334/335, 11/12/37/102/230/249/254/266/316, 11/25/37/249/266/316, 11/37/156/249/257/258/266/316/334/335, 11/12/37/102/230/249/266/316, 11/37/156/248/249/257/258/266/316/334, 11/37/248/249/266/316/334/335, 11/37/232/249/257/258/266/316/334/335, 11/37/249/266/316/334/335, 11/37/156/249/266/316/334, 11/12/37/38/102/249/256/266/316, 11/37/156/249/257/266/316/334/335, 11/12/37/140/249/251/254/266/316, 11/37/249/251/254/256/266/316, 11/37/156/249/258/266/316/334, 11/37/156/248/249/266/316/330/335, 11/12/37/38/249/256/266/316, 11/37/232/249/266/316/334/335, 11/37/249/266/316/330/334/335, 11/37/156/248/249/266/316/334, 11/37/156/249/266/316/335, 11/37/249/257/266/316/334, 11/37/248/249/266/316/334, 11/37/232/248/249/266/316/334/335, 11/12/25/37/38/230/249/251/256/266/316, 11/37/249/266/316/330/335, 11/37/248/249/257/266/316/334/335, 11/37/232/248/249/266/316/334, 11/37/156/232/248/249/266/316/334/335, 11/37/232/249/257/266/316/330/334, 11/37/156/248/249/266/291/316/334/335, 11/37/156/232/248/249/257/258/266/316/334, 11/12/25/37/249/266/316, 11/37/156/248/249/266/316/330/334/335, 11/37/232/248/249/266/316/330/335, 11/37/156/232/249/266/316/330/334/335, 11/37/197/249/266/316, 11/37/249/266/316/338, 11/37/249/266/316/327, 11/37/192/249/266/316, 11/37/249/266/316/331, 11/37/249/266/316/326, 11/37/249/266/316/345, 11/37/101/249/266/316, 11/37/100/249/266/316, 11/37/141/249/266/316, 11/37/198/249/266/316, 11/37/64/249/266/316, 11/37/249/266/306/316, 11/37/249/266/316/317, 11/37/249/265/266/316, 11/37/249/266/296/316, 11/37/194/249/266/316, 11/37/62/249/266/316, 11/37/90/249/266/316, 11/37/249/266/307/316, 11/37/103/249/266/316, 11/37/210/249/266/316, 11/37/105/249/266/316, or 11/37/61/249/266/316, wherein the amino acid positions are relative to the reference sequence corresponding to residues 12 to 346 of SEQ ID NO: 2, or relative to the reference sequence corresponding to SEQ ID NO: 2.

[0200] In some embodiments, the amino acid sequence of the engineered RNA ligase comprises at least a substitution set or amino acid residues 11N/37L/156Q/232G/249L/266L/316L/334R/335H, 11N/12V/37L/249L/254V/256A/266L/316L, 11N/12V/37L/230T/249L/266L/316L, 11N/12L/37L/230T/249L/251T/266L/316L, 11N/12L/37L/230T/249L/251S/254V/256A/266L/316L, 11N/12A/37L/38R/230T/249L/266L/316L, 11N/37L/230T/249L/251S/266L/316L, 11N/12P/37L/38R/249L/254V/266L/316L, 11N/12V/37L/230T/249L/251T/266L/316L, 11N/37L/230T/249L/256A/266L/316L, 11N/37L/249L/254V/266L/316L, 11N/37L/230T/249L/266L/316L, 11N/12T/37L/230T/249L/251S/266L/316L, 11N/12T/37L/230T/249L/254V/266L/316L, 11N/12V/37L/38R/230T/249L/251T/256A/266L/316L, 11N/12L/37L/249L/251S/266L/316L, 11N/12T/37L/249L/251T/254V/256A/266L/316L, 11N/12V/37L/230T/249L/251S/266L/316L, 11N/37L/38R/249L/266L/316L, 11N/12T/37L/230T/249L/256A/266L/316L, 11N/12L/37L/249L/266L/316L, 11N/12V/37L/249L/266L/316L, 11N/12L/25M/37L/38R/230T/249L/251T/266L/316L, 11N/12L/37L/38R/102T/230T/249L/251T/256A/266L/316L, 11N/12L/37L/230T/249L/266L/316L, 11N/12V/37L/249L/256A/266L/316L, 11N/37L/38R/230T/249L/256A/266L/316L, 11N/12V/37L/230T/249L/251S/254V/256A/266L/316L, 11N/37L/249L/256A/266L/316L, 11N/12T/37L/230T/249L/251S/256A/266L/316L, 11N/12T/37L/249L/251T/266L/316L, 11N/37L/230T/249L/251S/254L/266L/316L, 11N/37L/230T/249L/254V/266L/316L, 11N/37L/249L/251S/254L/266L/316L, 11N/12T/25L/37L/230T/249L/266L/316L, 11N/12V/37L/230T/249L/251S/254L/256A/266L/316L, 11N/37L/38R/230T/249L/266L/316L, 11N/12T/37L/249L/251S/266L/316L, 11N/37L/38R/249L/251T/266L/316L, 11N/12V/37L/230T/249L/251S/256A/266L/316L, 11N/12L/37L/230T/249L/251T/254V/256A/266L/316L, 11N/12T/37L/38R/230T/249L/256A/266L/316L, 11N/12L/37L/230T/249L/256A/266L/316L, 11N/37L/102T/249L/266L/316L, 11N/37L/249L/251T/266L/316L, 11N/12V/25M/37L/249L/251T/256A/266L/316L, 11N/12T/37L/102T/249L/256A/266L/316L, 11N/37L/230T/249L/251T/266L/316L, 11N/12T/37L/230T/249L/251S/254L/256A/266L/316L, 11N/12V/37L/38R/230T/249L/251T/254V/256A/266L/316L, 11N/12T/37L/38R/230T/249L/266L/316L, 11N/12L/37L/38R/249L/254V/266L/316L, 11N/12L/37L/249L/251T/256A/266L/316L, 11N/12T/37L/230T/249L/266L/316L, 11N/37L/102T/230T/249L/251S/254V/256A/266L/316L, 11N/37L/230T/249L/251S/254V/266L/316L, 11N/12T/37L/230T/249L/251S/254V/256A/266L/316L, 11N/12T/37L/38R/249L/251S/266L/316L, 11N/12T/37L/230T/249L/251S/254V/266L/316L, 11N/12T/37L/230T/249L/251T/266L/316L, 11N/37L/156Q/248T/249L/266L/316L/334R/335H, 11N/12V/37L/38R/230T/249L/266L/316L, 11N/12T/25M/37L/38R/249L/266L/316L, 11N/12V/37L/102T/230T/249L/251T/254V/266L/316L, 11N/12L/37L/249L/256A/266L/316L, 11N/12T/37L/249L/266L/316L, 11N/37L/230T/249L/251T/254L/266L/316L, 11N/12V/25L/37L/38R/249L/266L/316L, 11N/12T/37L/38R/249L/251S/254V/266L/316L, 11N/12V/37L/249L/251S/254L/256A/266L/316L, 11N/12T/37L/249L/251T/254V/266L/316L, 11N/12T/37L/102T/249L/266L/316L, 11N/12V/37L/38R/249L/251S/266L/316L, 11N/12V/37L/230T/249L/251S/254L/266L/316L, 11N/12T/37L/249L/251T/256A/266L/316L, 11N/37L/38R/230T/249L/251S/254V/256A/266L/316L, 11N/12V/37L/230T/249L/251T/256A/266L/316L, 11N/12L/25M/37L/230T/249L/251S/256A/266L/316L, 11N/12T/37L/230T/249L/266L/311C/316L, 11N/12L/37L/38R/230T/249L/251S/254V/256A/266L/316L, 11N/12L/37L/230T/249L/251T/254L/266L/316L, 11N/12L/37L/249L/254V/266L/316L, 11N/37L/38R/230T/249L/251S/254V/266L/316L, 11N/12L/37L/38R/249L/251S/256A/266L/316L, 11N/12L/37L/38R/249L/251S/266L/316L, 11N/37L/156Q/249L/266L/316L/334R/335H, 11N/12A/37L/230T/249L/266L/316L, 11N/12P/37L/230T/249L/266L/316L, 11N/12T/37L/38R/249L/251T/266L/316L, 11N/37L/249L/257G/258P/266L/316L/334R, 11N/12L/25L/37L/38R/249L/251T/256A/266L/316L, 11N/37L/249L/266L/316L/334R, 11N/12T/25L/37L/230T/249L/254V/256A/266L/316L, 11N/12T/37L/249L/251S/256A/266L/316L, 11N/37L/38R/249L/251T/256A/266L/316L, 11N/12V/37L/249L/251S/266L/316L, 11N/12V/37L/249L/251T/254L/266L/316L, 11N/12V/37L/38R/230T/249L/251T/254V/266L/316L, 11N/12L/37L/38R/249L/266L/316L, 11N/12L/37L/249L/251S/254L/256A/266L/316L, 11N/37L/249L/257G/258P/266L/316L/334R/335H, 11N/12L/37L/38R/249L/254L/256A/266L/316L, 11N/12V/37L/249L/254L/266L/316L, 11N/12T/37L/249L/254L/266L/316L, 11N/12T/37L/38R/249L/266L/316L, 11N/37L/232G/248T/249L/257G/258P/266L/316L/334R/335H, 11N/12L/37L/102T/249L/266L/316L, 11N/37L/156Q/249L/258P/266L/316L/334R/335H, 11N/37L/156Q/249R/266L/316L/334R/335H, 11N/12T/37L/102T/230T/249L/254L/266L/316L, 11N/25M/37L/249L/266L/316L, 11N/12V/37L/249L/254L/256A/266L/316L, 11N/37L/156H/249L/266L/316L/334R/335H, 11N/37L/156Q/249L/257G/258P/266L/316L/334R/335H, 11N/12T/37L/102T/230T/249L/266L/316L, 11N/37L/156Q/248T/249L/257G/258P/266L/316L/334R, 11N/12T/37L/249L/256A/266L/316L, 11N/37L/248T/249R/266L/316L/334R/335H, 11N/37L/232G/249L/257G/258P/266L/316L/334R/335H, 11N/12T/37L/38R/249L/251T/254V/266L/316L, 11N/37L/249L/266L/316L/334R/335H, 11N/37L/156Q/249L/266L/316L/334R, 11N/12V/37L/38R/249L/254V/266L/316L, 11N/37L/249L/251T/254V/266L/316L, 11N/12T/37L/38R/102T/249L/256A/266L/316L, 11N/37L/156Q/249L/257G/266L/316L/334R/335H, 11N/37L/38R/249L/251S/256A/266L/316L, 11N/12T/37L/140I/249L/251S/254L/266L/316L, 11N/37L/249L/251S/254V/256A/266L/316L, 11N/12V/37L/249L/251T/266L/316L, 11N/37L/248T/249L/266L/316L/334R/335H, 11N/12T/37L/249L/254V/266L/316L, 11N/12V/37L/38R/249L/266L/316L, 11N/12V/37L/249L/251T/256A/266L/316L, 11N/37L/156Q/249L/258P/266L/316L/334R, 11N/37L/156Q/248T/249L/266L/316L/330R/335H, 11N/12T/37L/38R/249L/256A/266L/316L, 11N/37L/232G/249L/266L/316L/334R/335H, 11N/37L/156Q/249R/266L/316L/334R, 11N/37L/249L/266L/316L/330R/334R/335H, 11N/37L/156Q/248T/249L/266L/316L/334R, 11N/37L/156Q/249L/266L/316L/335H, 11N/37L/249L/257G/266L/316L/334R, 11N/37L/156H/248T/249L/266L/316L/334R/335H, 11N/37L/248T/249L/266L/316L/334R, 11N/37L/232G/248T/249L/266L/316L/334R/335H, 11N/37L/156H/248T/249L/266L/316L/334R, 11N/37L/156H/249L/266L/316L/334R, 11N/12T/25M/37L/38R/230T/249L/251S/256A/266L/316L, 11N/12V/37L/249L/251S/254V/256A/266L/316L, 11N/37L/156Q/248T/249R/266L/316L/334R/335H, 11N/37L/249L/266L/316L/330R/335H, 11N/37L/248T/249L/257G/266L/316L/334R/335H, 11N/37L/232G/248T/249L/266L/316L/334R, 11N/37L/156Q/232G/248T/249L/266L/316L/334R/335H, 11N/37L/232G/249L/257G/266L/316L/330R/334R, 11N/37L/156Q/248T/249L/266L/291T/316L/334R/335H, 11N/37L/156Q/232G/248T/249L/257G/258P/266L/316L/334R, 11N/12V/37L/38R/249L/251T/254L/266L/316L, 11N/12T/25L/37L/38R/249L/266L/316L, 11N/37L/156Q/232G/249R/266L/316L/334R/335H, 11N/12T/25M/37L/249L/266L/316L, 11N/37L/156Q/248T/249L/266L/316L/330R/334R/335H, 11N/37L/156Q/248T/249R/266L/316L/334R, 11N/37L/156H/232G/248T/249L/266L/316L/334R/335H, 11N/37L/232G/248T/249L/266L/316L/330R/335H, 11N/37L/156Q/232G/249L/266L/316L/330R/334R/335H, 11N/37L/197W/249L/266L/316L, 11N/37L/249L/266L/316L/338L, 11N/37L/249L/266L/316L/327S, 11N/37L/192F/249L/266L/316L, 11N/37L/249L/266L/316L/331S, 11N/37L/249L/266L/316L/326C, 11N/37L/249L/266L/316L/338G, 11N/37L/249L/266L/316L/345S, 11N/37L/249L/266L/316L/327G, 11N/37L/101V/249L/266L/316L, 11N/37L/100V/249L/266L/316L, 11N/37L/249L/266L/316L/331G, 11N/37L/141G/249L/266L/316L, 11N/37L/198M/249L/266L/316L, 11N/37L/249L/266L/316L/326L, 11N/37L/64W/249L/266L/316L, 11N/37L/249L/266L/306G/316L, 11N/37L/249L/266L/316L/345Q, 11N/37L/101W/249L/266L/316L, 11N/37L/100R/249L/266L/316L, 11N/37L/249L/266L/316L/331W, 11N/37L/249L/266L/316L/317F, 11N/37L/249L/266L/316L/338M, 11N/37L/249L/265F/266L/316L, 11N/37L/249L/266L/296W/316L, 11N/37L/194V/249L/266L/316L, 11N/37L/62V/249L/266L/316L, 11N/37L/249L/266L/316L/317W, 11N/37L/90F/249L/266L/316L, 11N/37L/249L/266L/307R/316L, 11N/37L/249L/266L/316L/317G, 11N/37L/100T/249L/266L/316L, 11N/37L/100L/249L/266L/316L, 11N/37L/194G/249L/266L/316L, 11N/37L/103G/249L/266L/316L, 11N/37L/62A/249L/266L/316L, 11N/37L/210G/249L/266L/316L, 11N/37L/105R/249L/266L/316L, or 11N/37L/61A/249L/266L/316L, wherein the amino acid positions are relative to the reference sequence corresponding to residues 12 to 346 of SEQ ID NO: 2, or relative to the reference sequence corresponding to SEQ ID NO: 2.

[0201] In some embodiments, the amino acid sequence of the engineered RNA ligase comprises at least a substitution set at amino acid positions 11/12/37/141/197/230/249/251/266/316/326/327, 11/12/37/100/101/230/249/251/266/316/338, 11/12/37/141/198/230/249/251/266/316/326, 11/12/37/64/100/101/230/249/251/266/316, 11/12/37/100/230/249/251/266/316/338, 11/12/37/101/141/198/230/249/251/266/316/326, 11/12/37/101/198/230/249/251/266/316/326/327, 11/12/37/198/230/249/251/266/316/326, 11/12/37/64/100/101/230/249/251/266/316/338/345, 11/12/37/197/230/249/251/266/316/326, 11/12/37/198/230/249/251/266/316/327, 11/12/37/141/198/230/249/251/266/316/327, 11/12/37/198/230/249/251/266/316/326/327, 11/12/37/197/230/249/251/266/316/326/327, 11/12/37/64/100/230/249/251/266/316/338, 11/12/37/64/100/101/156/197/230/249/251/266/316/338, 11/12/37/64/100/101/230/249/251/266/316/338, 11/12/37/100/197/230/249/251/266/316/338, 11/12/37/197/230/249/251/266/316/338, 11/12/37/101/197/230/249/251/266/316/326, 11/12/37/64/100/197/230/249/251/266/316/338, 11/12/37/101/198/230/249/251/266/316, 11/12/37/141/197/230/249/251/266/316/327, 11/12/37/64/100/101/197/230/249/251/266/316/338, 11/12/37/101/230/249/251/266/316/326, 11/12/37/101/197/230/249/251/266/316/326/327, 11/12/37/197/230/249/251/266/316/327, 11/12/37/197/230/249/251/266/316, 11/12/37/141/197/230/249/251/266/316, 11/12/37/101/230/249/251/266/316, 11/12/37/101/198/230/249/251/266/316/326, 11/12/37/64/197/198/230/249/251/266/316/338, 11/12/37/141/230/249/251/266/316, 11/12/37/101/141/230/249/251/266/316, 11/12/37/100/101/197/230/249/251/266/316/338, 11/12/37/141/230/249/251/266/316/326, 11/12/37/230/249/251/266/316/338, 11/12/37/230/249/251/266/316/326, 11/12/37/197/198/230/249/251/266/316/338, 11/12/37/64/101/230/249/251/266/316/338, 11/12/37/64/197/198/230/249/251/266/316, 11/12/37/101/197/230/249/251/266/316, 11/12/37/100/101/230/249/251/266/316, 11/12/37/100/109/197/230/249/251/266/316/338, 11/12/37/101/197/230/249/251/266/316/338, 11/12/37/197/198/230/249/251/266/316, 11/12/37/141/230/249/251/266/316/326/327, 11/12/37/100/197/230/249/251/266/316, 11/12/37/64/100/230/249/251/266/316, 11/12/37/64/197/230/249/251/266/316/338, 11/12/37/100/197/198/230/249/251/266/316, 11/12/37/101/230/249/251/266/316/338, 11/12/37/141/230/249/251/266/316/327, 11/12/37/101/230/249/251/266/306/316, 11/12/37/64/100/101/197/230/249/251/266/316, 11/12/37/101/230/249/251/266/316/326/327, 11/12/37/100/230/249/251/266/316, 11/12/37/230/249/251/266/316/327, 11/12/37/230/249/251/266/316/326/345, 11/12/37/64/100/101/197/198/230/249/251/266/316, 11/12/37/230/249/251/266/316/326/327, 11/12/37/64/101/230/249/251/266/316, 11/12/37/100/101/197/230/249/251/266/316, 11/12/37/101/230/249/251/266/316/327, 11/12/37/64/100/197/198/230/249/251/266/316/338, 11/12/37/230/249/251/266/306/316, 11/12/37/64/230/249/251/266/316/338, 11/12/37/101/141/230/249/251/266/316/326/327, 11/12/37/64/101/197/230/249/251/266/316/338, or 11/12/37/101/198/230/249/251/266/306/316/327, wherein the amino acid positions are relative to the reference sequence corresponding to residues 12 to 346 of SEQ ID NO: 2, or relative to the reference sequence corresponding to SEQ ID NO: 2.

[0202] In some embodiments, the amino acid sequence of the engineered RNA ligase comprises at least a substitution set or amino acid residues 11N/12T/37L/141G/197W/230T/249L/251S/266L/316L/326L/327S, 11N/12T/37L/100V/101V/230T/249L/251S/266L/316L/338L, 11N/12T/37L/141G/198M/230T/249L/251S/266L/316L/326L, 11N/12T/37L/64W/100V/101V/230T/249L/251S/266L/316L, 11N/12T/37L/100V/230T/249L/251S/266L/316L/338L, 11N/12T/37L/101V/141G/198M/230T/249L/251S/266L/316L/326L, 11N/12T/37L/101V/198M/230T/249L/251S/266L/316L/326L/327G, 11N/12T/37L/100V/101V/230T/249L/251S/266L/316L/338G, 11N/12T/37L/198M/230T/249L/251S/266L/316L/326L, 11N/12T/37L/64W/100V/101V/230T/249L/251S/266L/316L/338G/345Q, 11N/12T/37L/64W/100V/101V/230T/249L/251S/266L/316L/338L/345Q, 11N/12T/37L/197W/230T/249L/251S/266L/316L/326L, 11N/12T/37L/198M/230T/249L/251S/266L/316L/327S, 11N/12T/37L/141G/198M/230T/249L/251S/266L/316L/327S, 11N/12T/37L/100V/230T/249L/251S/266L/316L/338G, 11N/12T/37L/198M/230T/249L/251S/266L/316L/326L/327G, 11N/12T/37L/197W/230T/249L/251S/266L/316L/326L/327G, 11N/12T/37L/64W/100V/230T/249L/251S/266L/316L/338G, 11N/12T/37L/64W/100V/101V/156S/197W/230T/249L/251S/266L/316L/338L, 11N/12T/37L/64W/100V/101V/230T/249L/251S/266L/316L/338G, 11N/12T/37L/100V/197W/230T/249L/251S/266L/316L/338L, 11N/12T/37L/198M/230T/249L/251S/266L/316L/326L/327S, 11N/12T/37L/197W/230T/249L/251S/266L/316L/338L, 11N/12T/37L/101V/197W/230T/249L/251S/266L/316L/326L, 11N/12T/37L/64W/100V/197W/230T/249L/251S/266L/316L/338L, 11N/12T/37L/101V/198M/230T/249L/251S/266L/316L, 11N/12T/37L/141G/197W/230T/249L/251S/266L/316L/327S, 11N/12T/37L/198M/230T/249L/251S/266L/316L/327G, 11N/12T/37L/198M/230T/249L/251S/266L/316L/326C/327S, 11N/12T/37L/64W/100V/101V/197W/230T/249L/251S/266L/316L/338G, 11N/12T/37L/101V/230T/249L/251S/266L/316L/326L, 11N/12T/37L/101V/197W/230T/249L/251S/266L/316L/326L/327G, 11N/12T/37L/141G/197W/230T/249L/251S/266L/316L/326L/327G, 11N/12T/37L/100V/101W/230T/249L/251S/266L/316L/338G, 11N/12T/37L/197W/230T/249L/251S/266L/316L/327S, 11N/12T/37L/197W/230T/249L/251S/266L/316L, 11N/12T/37L/141G/197W/230T/249L/251S/266L/316L, 11N/12T/37L/101V/230T/249L/251S/266L/316L, 11N/12T/37L/101V/198M/230T/249L/251S/266L/316L/326C, 11N/12T/37L/64W/197W/198M/230T/249L/251S/266L/316L/338G, 11N/12T/37L/141G/230T/249L/251S/266L/316L, 11N/12T/37L/64W/100V/101W/230T/249L/251S/266L/316L/338G, 11N/12T/37L/101V/141G/230T/249L/251S/266L/316L, 11N/12T/37L/100V/101V/197W/230T/249L/251S/266L/316L/338L, 11N/12T/37L/141G/230T/249L/251S/266L/316L/326C, 11N/12T/37L/230T/249L/251S/266L/316L/338L, 11N/12T/37L/197W/230T/249L/251S/266L/316L/338G, 11N/12T/37L/230T/249L/251S/266L/316L/326L, 11N/12T/37L/197W/198M/230T/249L/251S/266L/316L/338G, 11N/12T/37L/197W/198M/230T/249L/251S/266L/316L/338L, 11N/12T/37L/64W/101W/230T/249L/251S/266L/316L/338L, 11N/12T/37L/64W/197W/198M/230T/249L/251S/266L/316L, 11N/12T/37L/101V/197W/230T/249L/251S/266L/316L, 11N/12T/37L/100V/101V/230T/249L/251S/266L/316L, 11N/12T/37L/141G/230T/249L/251S/266L/316L/326L, 11N/12T/37L/100V/109F/197W/230T/249L/251S/266L/316L/338L, 11N/12T/37L/101W/197W/230T/249L/251S/266L/316L/338L, 11N/12T/37L/64W/100V/101W/230T/249L/251S/266L/316L, 11N/12T/37L/197W/198M/230T/249L/251S/266L/316L, 11N/12T/37L/100V/101W/230T/249L/251S/266L/316L/338L, 11N/12T/37L/141G/230T/249L/251S/266L/316L/326C/327S, 11N/12T/37L/100V/197W/230T/249L/251S/266L/316L, 11N/12T/37L/197W/230T/249L/251S/266L/316L/326C/327G, 11N/12T/37L/64W/100V/230T/249L/251S/266L/316L, 11N/12T/37L/101V/230T/249L/251S/266L/316L/326C, 11N/12T/37L/100V/101W/230T/249L/251S/266L/316L, 11N/12T/37L/64W/197W/230T/249L/251S/266L/316L/338L, 11N/12T/37L/100V/197W/198M/230T/249L/251S/266L/316L, 11N/12T/37L/101W/230T/249L/251S/266L/316L, 11N/12T/37L/101W/230T/249L/251S/266L/316L/338L, 11N/12T/37L/141G/230T/249L/251S/266L/316L/327S, 11N/12T/37L/101V/230T/249L/251S/266L/306G/316L, 11N/12T/37L/64W/100V/101W/197W/230T/249L/251S/266L/316L, 11N/12T/37L/101V/230T/249L/251S/266L/316L/326L/327G, 11N/12T/37L/100V/230T/249L/251S/266L/316L, 11N/12T/37L/230T/249L/251S/266L/316L/327G, 11N/12T/37L/230T/249L/251S/266L/316L/326C/345S, 11N/12T/37L/64W/100V/101V/197W/198M/230T/249L/251S/266L/316L, 11N/12T/37L/230T/249L/251S/266L/316L/326C/327S, 11N/12T/37L/64W/101W/230T/249L/251S/266L/316L, 11N/12T/37L/100V/101V/197W/230T/249L/251S/266L/316L, 11N/12T/37L/101V/230T/249L/251S/266L/316L/327S, 11N/12T/37L/230T/249L/251S/266L/316L/338G, 11N/12T/37L/100V/101V/197W/230T/249L/251S/266L/316L/338G, 11N/12T/37L/100V/101W/197W/230T/249L/251S/266L/316L/338G, 11N/12T/37L/64W/100V/197W/198M/230T/249L/251S/266L/316L/338G, 11N/12T/37L/230T/249L/251S/266L/306G/316L, 11N/12T/37L/64W/230T/249L/251S/266L/316L/338G, 11N/12T/37L/64W/100V/101V/197W/230T/249L/251S/266L/316L, 11N/12T/37L/64W/197W/198M/230T/249L/251S/266L/316L/338L, 11N/12T/37L/101V/230T/249L/251S/266L/316L/327G, 11N/12T/37L/101V/141G/230T/249L/251S/266L/316L/326C/327S, 11N/12T/37L/64W/101W/197W/230T/249L/251S/266L/316L/338L, 11N/12T/37L/101W/230T/249L/251S/266L/316L/338G, or 11N/12T/37L/101V/198M/230T/249L/251S/266L/306G/316L/327S, wherein the amino acid positions are relative to the reference sequence corresponding to residues 12 to 346 of SEQ ID NO: 2, or relative to the reference sequence corresponding to SEQ ID NO: 2.

[0203] In some embodiments, the amino acid sequence of the engineered RNA ligase comprises at least a substitution set at amino acid positions 11/12/37/194/198/230/249/251/266/316/326/330/331, 11/12/37/198/230/249/251/266/298/316/326, 11/12/37/198/230/249/251/266/316/326/331, 11/12/37/192/193/194/198/230/249/251/266/298/316/326, 11/12/37/198/230/249/251/266/316/326/330, 11/12/37/192/198/230/249/251/266/316/326/330/331, 11/12/37/192/193/194/198/230/249/251/266/316/326/331, 11/12/37/198/230/249/251/266/298/316/326/330/331, 11/12/37/194/198/230/249/251/266/298/316/326/330/331, 11/12/37/192/193/198/230/249/251/266/316/326/330/331, 11/12/37/192/198/230/249/251/266/298/316/326/331, 11/12/37/192/193/198/230/249/251/266/316/326, 11/12/37/194/198/230/249/251/266/316/326/330, 11/12/37/60/100/156/198/230/249/251/266/316/326, 11/12/37/193/198/230/249/251/266/296/316/326/331, 11/12/37/198/230/249/251/266/298/316/326/331, 11/12/37/193/194/198/230/249/251/266/316/326/330/331, 11/12/37/194/198/230/249/251/266/316/326, 11/12/37/194/198/230/249/251/266/298/316/326/331, 11/12/37/193/198/230/249/251/266/298/316/326, 11/12/37/193/198/230/249/251/266/316/326/330, 11/12/37/192/198/230/249/251/266/316/326, 11/12/37/192/193/194/198/230/249/251/266/298/316/326/331, 11/12/37/192/193/194/198/230/249/251/266/298/316/326/330, 11/12/37/192/193/198/230/249/251/266/298/316/326/331, 11/12/37/100/156/198/230/249/251/266/316/326, 11/12/37/62/100/198/230/249/251/266/316/326, 11/12/37/198/230/249/251/266/298/316/326/330, 11/12/37/60/100/198/230/249/251/266/316/326, 11/12/37/192/193/198/230/249/251/266/298/316/326/330/331, 11/12/37/100/198/230/249/251/266/316/326, 11/12/37/193/194/198/230/249/251/266/298/316/326, 11/12/37/198/230/249/251/266/316/326/338, 11/12/37/62/198/230/249/251/266/316/326, 11/12/37/198/230/247/249/251/266/316/326, 11/12/18/37/198/230/249/251/266/316/326, 11/12/37/198/230/249/251/266/316/326, 11/12/37/198/230/249/251/254/266/316/326, 11/12/33/37/198/230/249/251/266/316/326, 11/12/37/198/230/249/251/261/266/316/326, 11/12/37/198/230/249/251/260/266/316/326, 11/12/37/117/198/230/249/251/266/316/326, 11/12/37/198/230/249/251/256/266/316/326, 11/12/37/198/230/249/251/255/266/316/326, 11/12/37/38/198/230/249/251/266/316/326, 11/37/198/230/249/251/266/316/326, 11/12/29/37/198/230/249/251/266/316/326, 11/12/25/37/198/230/249/251/266/316/326, or 11/12/37/198/230/249/251/252/266/316/326, wherein the amino acid positions are relative to the reference sequence corresponding to residues 12 to 346 of SEQ ID NO: 2, or relative to the reference sequence corresponding to SEQ ID NO: 2.

[0204] In some embodiments, the amino acid sequence of the engineered RNA ligase comprises at least a substitution set or amino acid residues 11N/12T/37L/194V/198M/230T/249L/251S/266L/316L/326L/330D/331W, 11N/12T/37L/198M/230T/249L/251S/266L/298S/316L/326L, 11N/12T/37L/198M/230T/249L/251S/266L/316L/326L/331W, 11N/12T/37L/192L/193K/194V/198M/230T/249L/251S/266L/298S/316L/326L, 11N/12T/37L/198M/230T/249L/251S/266L/316L/326L/330D, 11N/12T/37L/192L/198M/230T/249L/251S/266L/316L/326L/330D/331G, 11N/12T/37L/192L/193K/194V/198M/230T/249L/251S/266L/316L/326L/331S, 11N/12T/37L/198M/230T/249L/251S/266L/2981/316L/326L/330D/331S, 11N/12T/37L/194V/198M/230T/249L/251S/266L/298S/316L/326L/330D/331G, 11N/12T/37L/192L/193K/198M/230T/249L/251S/266L/316L/326L/330D/331S, 11N/12T/37L/192L/198M/230T/249L/251S/266L/298S/316L/326L/331S, 11N/12T/37L/192L/193K/198M/230T/249L/251S/266L/316L/326L, 11N/12T/37L/194V/198M/230T/249L/251S/266L/316L/326L/330D, 11N/12T/37L/198M/230T/249L/251S/266L/316L/326L/331G, 11N/12T/37L/192L/198M/230T/249L/251S/266L/298S/316L/326L/331W, 11N/12T/37L/60D/100R/156G/198M/230T/249L/251S/266L/316L/326L, 11N/12T/37L/193K/198M/230T/249L/251S/266L/296G/316L/326L/331W, 11N/12T/37L/198M/230T/249L/251S/266L/298S/316L/326L/331G, 11N/12T/37L/193K/194V/198M/230T/249L/251S/266L/316L/326L/330D/331W, 11N/12T/37L/194V/198M/230T/249L/251S/266L/316L/326L, 11N/12T/37L/194V/198M/230T/249L/251S/266L/298S/316L/326L/331G, 11N/12T/37L/193K/198M/230T/249L/251S/266L/298S/316L/326L, 11N/12T/37L/193K/198M/230T/249L/251S/266L/316L/326L/330D, 11N/12T/37L/192L/198M/230T/249L/251S/266L/316L/326L, 11N/12T/37L/192L/193K/194V/198M/230T/249L/251S/266L/298S/316L/326L/331S, 11N/12T/37L/192L/193K/194V/198M/230T/249L/251S/266L/298S/316L/326L/330D, 11N/12T/37L/192L/193K/198M/230T/249L/251S/266L/298S/316L/326L/331S, 11N/12T/37L/100R/156G/198M/230T/249L/251S/266L/316L/326L, 11N/12T/37L/198M/230T/249L/251S/266L/298S/316L/326L/331S, 11N/12T/37L/198M/230T/249L/251S/266L/2981/316L/326L/331G, 11N/12T/37L/62V/100V/198M/230T/249L/251S/266L/316L/326L, 11N/12T/37L/198M/230T/249L/251S/266L/298S/316L/326L/330D, 11N/12T/37L/193K/198M/230T/249L/251S/266L/2981/316L/326L, 11N/12T/37L/198M/230T/249L/251S/266L/316L/326L/331S, 11N/12T/37L/60D/100R/198M/230T/249L/251S/266L/316L/326L, 11N/12T/37L/192L/193K/198M/230T/249L/251S/266L/298S/316L/326L/330D/331S, 11N/12T/37L/192L/193K/194V/198M/230T/249L/251S/266L/298S/316L/326L/331W, 11N/12T/37L/192L/198M/230T/249L/251S/266L/316L/326L/330D/331S, 11N/12T/37L/100R/198M/230T/249L/251S/266L/316L/326L, 11N/12T/37L/193K/194V/198M/230T/249L/251S/266L/298S/316L/326L, 11N/12T/37L/194V/198M/230T/249L/251S/266L/298S/316L/326L/331S, 11N/12T/37L/198M/230T/249L/251S/266L/316L/326L/338L, 11N/12T/37L/62V/198M/230T/249L/251S/266L/316L/326L, 11N/12T/37L/198M/230T/247S/249L/251S/266L/316L/326L, 11N/12T/18H/37L/198M/230T/249L/251S/266L/316L/326L, 11N/12T/37A/198M/230T/249L/251S/266L/316L/326L, 11N/12T/37L/198M/230T/249L/251S/254S/266L/316L/326L, 11N/12T/33L/37L/198M/230T/249L/251S/266L/316L/326L, 11N/12T/37L/198M/230T/249L/251S/261T/266L/316L/326L, 11N/12T/37L/198M/230T/249L/251Y/266L/316L/326L, 11N/12T/37L/198M/230T/249L/251S/260G/266L/316L/326L, 11N/12T/37L/198M/230T/249L/251C/266L/316L/326L, 11N/12R/37L/198M/230T/249L/251S/266L/316L/326L, 11N/12T/37L/117A/198M/230T/249L/251S/266L/316L/326L, 11N/12T/37L/198M/230T/249L/251S/256S/266L/316L/326L, 11N/12T/37L/198M/230T/249L/251S/255Y/266L/316L/326L, 11N/12T/37L/198M/230T/249L/251S/255S/266L/316L/326L, 11N/12T/37L/38E/198M/230T/249L/251S/266L/316L/326L, 11N/37L/198M/230T/249L/251S/266L/316L/326L, 11N/12T/37L/198M/230T/249L/251T/266L/316L/326L, 11N/12T/37L/198M/230T/249L/251S/255V/266L/316L/326L, 11N/12T/29D/37L/198M/230T/249L/251S/266L/316L/326L, 11N/12T/37L/198M/230T/247R/249L/251S/266L/316L/326L, 11N/12T/25A/37L/198M/230T/249L/251S/266L/316L/326L, 11N/12T/37L/198M/230T/249L/251S/256E/266L/316L/326L, 11N/12T/37L/198M/230T/249L/251S/252A/266L/316L/326L, or 11N/12T/37L/198M/230T/249L/251S/261D/266L/316L/326L, wherein the amino acid positions are relative to the reference sequence corresponding to residues 12 to 346 of SEQ ID NO: 2, or relative to the reference sequence corresponding to SEQ ID NO: 2.

[0205] In some embodiments, the amino acid sequence of the engineered RNA ligase comprises at least a substitution set at amino acid positions 11/12/37/194/198/230/249/251/254/266/298/316/326/331, 11/12/18/37/194/198/230/249/251/254/266/298/316/326/331, 11/12/37/194/198/230/247/249/251/266/298/316/317/326/331, 11/12/37/194/198/230/249/251/266/298/316/317/326/331/342, 11/12/33/37/194/198/230/249/251/266/298/316/326/331, 11/12/18/37/156/194/198/230/249/251/254/266/298/316/326/331, 11/12/18/37/194/198/230/249/251/266/298/316/326/331, 11/12/37/156/194/198/230/249/251/266/298/316/326/331, 11/12/37/194/198/230/249/251/254/266/298/316/326/331/338, 11/12/37/194/198/230/249/251/254/266/298/307/316/326/331, 11/12/33/37/194/198/230/249/251/266/298/316/317/326/331, 11/12/37/194/198/230/249/251/266/298/316/326/331, 11/12/37/156/194/198/230/249/251/266/298/316/317/326/331, 11/12/37/156/194/198/230/249/251/265/266/298/316/317/326/331, 11/12/37/194/198/230/249/251/265/266/298/316/317/326/331, 11/12/37/156/194/198/230/249/251/254/266/298/316/326/331, 11/12/33/37/156/194/198/230/249/251/266/298/316/317/326/331, 11/12/37/194/198/230/249/251/266/298/316/317/326/331, 11/12/18/37/194/198/230/249/251/266/298/316/326/331/338, 11/12/37/194/198/230/249/251/266/298/316/326/331/338, 11/12/37/156/194/198/230/247/249/251/266/298/316/317/326/331, 11/12/37/194/198/230/247/249/251/265/266/298/316/317/326/331, 11/12/37/156/194/198/230/247/249/251/266/296/298/316/317/326/331, 11/12/18/37/194/198/230/249/251/266/298/307/316/326/331, 11/12/37/156/194/198/230/249/251/266/296/298/316/317/326/331, 11/12/37/156/194/198/230/247/249/251/266/298/316/326/331, 11/12/18/37/194/198/230/249/251/254/266/298/307/316/326/331, 11/12/37/194/198/230/249/251/266/298/307/316/326/331, 11/12/37/194/198/230/249/251/265/266/298/316/326/331, 11/12/18/37/156/194/198/230/249/251/266/298/316/326/331, 11/12/33/37/156/194/198/230/249/251/266/296/298/316/317/326/331, 11/12/18/37/156/194/198/230/249/251/254/266/298/316/326/331/338, 11/12/33/37/156/194/198/230/247/249/251/266/298/316/317/326/331, 11/12/37/194/198/230/249/251/266/296/298/316/326/331, 11/12/33/37/194/198/230/249/251/266/296/298/316/317/326/331, 11/12/37/156/194/198/230/249/251/266/296/298/316/326/331, 11/12/37/194/198/230/247/249/251/266/296/298/316/317/326/331, 11/12/37/194/198/230/249/251/266/296/298/316/317/326/331, 11/12/37/194/198/230/247/249/251/266/296/298/316/326/331, 11/12/33/37/156/194/198/230/249/251/266/298/316/326/331, 11/12/37/156/194/198/230/249/251/254/266/298/307/316/326/331, 11/12/18/37/156/194/198/230/249/251/266/298/307/316/326/331, or 11/12/33/37/194/198/230/249/251/265/266/298/316/326/331, wherein the amino acid positions are relative to the reference sequence corresponding to residues 12 to 346 of SEQ ID NO: 2, or relative to the reference sequence corresponding to SEQ ID NO: 2.

[0206] In some embodiments, the amino acid sequence of the engineered RNA ligase comprises at least a substitution set or amino acid residues 11N/12T/37L/194V/198M/230T/249L/251S/254S/266L/298S/316L/326L/331G, 11N/12T/18H/37L/194V/198M/230T/249L/251S/254S/266L/298S/316L/326L/331G, 11N/12T/37L/194V/198M/230T/247S/249L/251S/266L/298S/316L/317W/326L/331G, 11N/12T/37A/194V/198M/230T/249L/251S/266L/298S/316L/317W/326L/331G/342R, 11N/12T/33L/37L/194V/198M/230T/249L/251S/266L/298S/316L/326L/331G, 11N/12T/37L/194V/198M/230T/247S/249L/251S/266L/298S/316L/317F/326L/331G, 11N/12T/18H/37L/156G/194V/198M/230T/249L/251S/254S/266L/298S/316L/326L/331G, 11N/12T/18H/37L/194V/198M/230T/249L/251S/266L/298S/316L/326L/331G, 11N/12T/37L/156G/194V/198M/230T/249L/251S/266L/298S/316L/326L/331G, 11N/12T/37L/194V/198M/230T/249L/251S/254S/266L/298S/316L/326L/331G/338L, 11N/12T/37L/194V/198M/230T/249L/251S/254S/266L/298S/307R/316L/326L/331G, 11N/12T/33L/37A/194V/198M/230T/249L/251S/266L/298S/316L/317W/326L/331G, 11N/12T/37A/194V/198M/230T/249L/251S/266L/298S/316L/326L/331G, 11N/12T/37A/156G/194V/198M/230T/249L/251S/266L/298S/316L/317W/326L/331G, 11N/12T/37L/156G/194V/198M/230T/249L/251S/265F/266L/298S/316L/317W/326L/331G, 11N/12T/37L/194V/198M/230T/249L/251S/265F/266L/298S/316L/317W/326L/331G, 11N/12T/37L/156G/194V/198M/230T/249L/251S/254S/266L/298S/316L/326L/331G, 11N/12T/33L/37L/156G/194V/198M/230T/249L/251S/266L/298S/316L/317W/326L/331G, 11N/12T/37L/194V/198M/230T/249L/251S/266L/298S/316L/317F/326L/331G, 11N/12T/37L/156G/194V/198M/230T/249L/251S/266L/298S/316L/317F/326L/331G, 11N/12T/37L/194V/198M/230T/249L/251S/266L/298S/316L/317W/326L/331G, 11N/12T/37L/156G/194V/198M/230T/249L/251S/266L/298S/316L/317W/326L/331G, 11N/12T/37A/194V/198M/230T/249L/251S/266L/298S/316L/317W/326L/331G, 11N/12T/18H/37L/194V/198M/230T/249L/251S/266L/298S/316L/326L/331G/338M, 11N/12T/37L/194V/198M/230T/249L/251S/266L/298S/316L/326L/331G/338M, 11N/12T/37L/156G/194V/198M/230T/247S/249L/251S/266L/298S/316L/317W/326L/331G, 11N/12T/18H/37L/194V/198M/230T/249L/251S/266L/298S/316L/326L/331G/338L, 11N/12T/33L/37L/194V/198M/230T/249L/251S/266L/298S/316L/317W/326L/331G, 11N/12T/37A/194V/198M/230T/247S/249L/251S/265F/266L/298S/316L/317F/326L/331G, 11N/12T/37A/194V/198M/230T/249L/251S/266L/298S/316L/317F/326L/331G, 11N/12T/33L/37A/156G/194V/198M/230T/249L/251S/266L/298S/316L/317W/326L/331G, 11N/12T/37L/156G/194V/198M/230T/247S/249L/251S/266L/296W/298S/316L/317W/326L/331G, 11N/12T/18H/37L/194V/198M/230T/249L/251S/266L/298S/307R/316L/326L/331G, 11N/12T/37L/156G/194V/198M/230T/249L/251S/266L/296W/298S/316L/317W/326L/331G, 11N/12T/37L/156G/194V/198M/230T/247S/249L/251S/266L/298S/316L/326L/331G, 11N/12T/37A/194V/198M/230T/247S/249L/251S/266L/298S/316L/317F/326L/331G, 11N/12T/37L/156G/194V/198M/230T/249L/251S/265F/266L/298S/316L/317F/326L/331G, 11N/12T/18H/37L/194V/198M/230T/249L/251S/254S/266L/298S/307R/316L/326L/331G, 11N/12T/37L/194V/198M/230T/249L/251S/266L/298S/307R/316L/326L/331G, 11N/12T/37L/194V/198M/230T/249L/251S/265F/266L/298S/316L/326L/331G, 11N/12T/37L/194V/198M/230T/249L/251S/265F/266L/298S/316L/317F/326L/331G, 11N/12T/33L/37A/194V/198M/230T/249L/251S/266L/298S/316L/326L/331G, 11N/12T/18H/37L/156G/194V/198M/230T/249L/251S/266L/298S/316L/326L/331G, 11N/12T/33L/37L/156G/194V/198M/230T/249L/251S/266L/296W/298S/316L/317W/326L/331G, 11N/12T/18H/37L/156G/194V/198M/230T/249L/251S/254S/266L/298S/316L/326L/331G/338L, 11N/12T/37A/194V/198M/230T/249L/251S/265F/266L/298S/316L/317F/326L/331G, 11N/12T/33L/37A/156G/194V/198M/230T/247S/249L/251S/266L/298S/316L/317W/326L/331G, 11N/12T/37L/194V/198M/230T/249L/251S/266L/296W/298S/316L/326L/331G, 11N/12T/33L/37L/194V/198M/230T/249L/251S/266L/296W/298S/316L/317W/326L/331G, 11N/12T/37L/156G/194V/198M/230T/247S/249L/251S/266L/298S/316L/317F/326L/331G, 11N/12T/37L/156G/194V/198M/230T/249L/251S/266L/296W/298S/316L/326L/331G, 11N/12T/37L/194V/198M/230T/249L/251S/266L/298S/316L/326L/331G/338L, 11N/12T/37A/194V/198M/230T/249L/251S/265F/266L/298S/316L/317W/326L/331G, 11N/12T/37L/194V/198M/230T/247S/249L/251S/266L/296W/298S/316L/317F/326L/331G, 11N/12T/33L/37L/156G/194V/198M/230T/249L/251S/266L/298S/316L/317F/326L/331G, 11N/12T/37A/194V/198M/230T/249L/251S/266L/296W/298S/316L/317F/326L/331G, 11N/12T/37L/194V/198M/230T/247S/249L/251S/266L/296W/298S/316L/326L/331G, 11N/12T/33L/37A/156G/194V/198M/230T/249L/251S/266L/298S/316L/326L/331G, 11N/12T/37L/194V/198M/230T/249L/251S/266L/296W/298S/316L/317W/326L/331G, 11N/12T/37L/156G/194V/198M/230T/249L/251S/254S/266L/298S/307R/316L/326L/331G, 11N/12T/18H/37L/156G/194V/198M/230T/249L/251S/266L/298S/307R/316L/326L/331G, or 11N/12T/33L/37A/194V/198M/230T/249L/251S/265F/266L/298S/316L/326L/331G, wherein the amino acid positions are relative to the reference sequence corresponding to residues 12 to 346 of SEQ ID NO: 2, or relative to the reference sequence corresponding to SEQ ID NO: 2.

[0207] In some embodiments, the amino acid sequence of the engineered RNA ligase comprises at least a substitution set at amino acid positions 11/25/29/37/156/194/198/230/249/251/254/266/298/316/326/331, 11/37/194/198/230/249/251/254/255/256/257/266/298/316/326/331, 11/37/156/194/198/230/249/251/254/255/266/298/316/326/331, 11/12/37/194/198/230/247/249/251/252/254/266/298/316/326/331, 11/25/37/194/198/230/249/251/254/266/298/316/326/331, 11/37/194/198/230/249/251/254/266/298/316/326/331, 11/25/29/37/156/194/198/230/249/251/254/255/266/298/316/326/331, 11/12/37/194/198/230/249/251/254/256/266/298/316/326/331, 11/37/156/194/198/230/249/251/254/266/298/316/326/331, 11/25/37/156/194/198/230/249/251/254/255/256/257/261/266/298/316/326/331, 11/12/18/37/194/198/230/247/249/251/254/266/298/316/326/331, 11/12/25/37/194/198/230/249/251/254/255/256/257/266/298/316/326/331, 11/25/37/194/198/230/249/251/254/257/266/298/316/326/331, 11/12/37/194/198/230/249/251/254/255/257/266/298/316/326/331, 11/25/29/37/194/198/230/249/251/254/255/257/266/298/316/326/331, 11/12/37/194/198/230/249/251/254/256/257/266/298/316/326/331, 11/37/194/198/230/249/251/254/255/257/266/298/316/326/331, 11/37/156/194/198/230/249/251/254/255/256/257/266/298/316/326/331, 11/12/25/37/194/198/230/249/251/254/266/298/316/326/331, 11/12/18/37/38/194/198/230/249/251/252/254/266/298/316/326/331, 11/37/194/198/230/249/251/254/256/257/261/266/298/316/326/331, 11/29/37/194/198/230/249/251/254/266/298/316/326/331, 11/25/37/194/198/230/249/251/254/255/256/257/261/266/298/316/326/331, 11/12/37/38/194/198/230/249/251/254/266/298/316/326/331, 11/25/29/37/194/198/230/249/251/254/256/257/266/298/316/326/331, 11/12/29/37/194/198/230/249/251/254/257/266/298/316/326/331, 11/37/194/198/230/249/251/254/261/266/298/316/326/331, 11/12/37/194/198/230/249/251/254/266/298/316/326/331, 11/37/194/198/230/249/251/254/255/266/298/316/326/331, 11/29/37/156/194/198/230/249/251/254/256/257/266/298/316/326/331, 11/12/37/194/198/230/249/251/252/254/266/298/316/326/331, 11/12/37/194/198/230/249/251/254/255/257/261/266/298/316/326/331, 11/12/18/37/194/198/230/249/251/254/266/298/316/326/331, 11/12/29/37/194/198/230/249/251/254/255/257/266/298/316/326/331, 11/12/37/194/198/230/249/251/254/255/256/257/266/298/316/326/331, 11/25/29/37/156/194/198/230/249/251/254/256/257/266/298/316/326/331, 11/12/25/37/194/198/230/249/251/254/255/256/257/261/266/298/316/326/331, 11/12/29/37/194/198/230/249/251/254/255/256/257/261/266/298/316/326/331, 11/12/25/37/194/198/230/249/251/254/256/266/298/316/326/331, 11/12/18/37/38/194/198/230/247/249/251/252/254/266/298/316/326/327/331, 11/12/25/29/37/194/198/230/249/251/254/266/298/316/326/331, 11/25/37/156/194/198/230/249/251/254/255/257/266/298/316/326/331, 11/12/18/37/156/194/198/230/249/251/252/254/266/298/316/326/331, 11/37/194/198/230/249/251/254/255/261/266/298/316/326/331, 11/12/25/37/194/198/230/249/251/254/255/266/298/316/326/331, 11/37/194/198/230/249/251/254/255/256/261/266/298/316/326/331, 11/12/37/156/194/198/230/249/251/254/255/257/266/298/316/326/331, 11/12/37/156/194/198/230/249/251/254/257/266/298/316/326/331, 11/37/156/194/198/230/249/251/254/256/257/266/298/316/326/331, 11/12/25/37/156/194/198/230/249/251/254/256/257/266/298/316/326/331, 11/25/29/37/156/194/198/230/249/251/254/257/261/266/298/316/326/331, 11/12/25/37/194/198/230/249/251/254/261/266/298/316/326/331, 11/37/156/194/198/230/249/251/254/255/256/261/266/298/316/326/331, 11/25/29/37/194/198/230/249/251/254/255/256/257/266/298/316/326/331, 11/12/37/38/194/198/230/249/251/252/254/266/298/316/326/331, 11/12/37/194/198/230/249/251/254/255/266/298/316/326/331, 11/37/156/194/198/230/249/251/254/255/256/266/298/316/326/331, 11/25/29/37/194/198/230/249/251/254/261/266/298/316/326/331, 11/12/37/194/198/230/249/251/254/257/266/298/316/326/331, 11/37/194/198/230/249/251/254/255/256/266/298/316/326/331, 11/29/37/194/198/230/249/251/254/255/266/298/316/326/331, 11/37/194/198/230/249/251/254/255/257/261/266/298/316/326/331, 11/37/156/194/198/230/249/251/254/257/266/298/316/326/331, 11/12/37/192/194/198/230/249/251/252/254/266/298/316/326/331, 11/25/29/37/194/198/230/249/251/254/255/261/266/298/316/326/331, 11/37/156/194/198/230/249/251/254/255/257/266/298/316/326/331, 11/29/37/194/198/230/249/251/254/255/257/266/298/316/326/331, 11/29/37/194/198/230/249/251/254/256/257/266/298/316/326/331, 11/12/18/37/194/198/230/249/251/252/254/266/298/316/326/331, 11/12/37/156/194/198/230/249/250/251/254/266/298/316/326/331, 11/12/37/156/194/198/230/249/251/254/255/256/257/266/298/316/326/331, 11/12/25/37/194/198/230/249/251/254/257/266/298/316/326/331, 11/37/194/198/230/249/251/254/255/256/257/261/266/298/316/326/331, 11/12/25/37/156/194/198/230/249/251/254/261/266/298/316/326/331, 11/12/37/156/194/198/230/249/251/252/254/266/298/316/326/331, 11/25/37/194/198/230/249/251/254/255/256/257/266/298/316/326/331, 11/25/29/37/156/194/198/230/249/251/254/255/257/266/298/316/326/331, 11/12/29/37/156/194/198/230/249/251/254/266/298/316/326/331, 11/12/37/194/198/230/249/251/254/256/257/261/266/298/316/326/331, 11/12/25/37/156/194/198/230/249/251/254/255/256/257/266/298/316/326/331, 11/12/25/29/37/194/198/230/249/251/254/255/266/298/316/326/331, 11/29/37/156/194/198/230/249/251/254/266/298/316/326/331, 11/12/37/194/198/230/249/251/254/255/256/266/298/316/326/331, 11/12/37/38/194/198/230/249/250/251/252/254/266/298/316/326/331, 11/37/194/198/230/249/251/254/256/257/266/298/316/326/331, 11/12/37/60/194/198/230/249/251/254/266/298/316/326/331, 11/37/194/198/230/249/251/254/256/266/298/316/326/331, 11/37/156/194/198/230/249/251/254/256/266/298/316/326/331, 11/12/25/37/194/198/230/249/251/254/255/257/261/266/298/316/326/331, 11/25/29/37/194/198/230/249/251/254/255/256/261/266/298/316/326/331, 11/29/37/156/194/198/230/249/251/254/255/256/266/298/316/326/331, 11/25/37/156/194/198/230/249/251/254/255/256/266/298/316/326/331, 11/12/37/194/198/230/249/251/254/256/261/266/298/316/326/331, 11/25/29/37/156/194/198/230/249/251/254/261/266/298/316/326/331, 11/37/194/198/230/249/251/254/257/266/298/316/326/331, 11/12/37/156/194/198/230/249/251/254/255/256/261/266/298/316/326/331, 11/25/37/156/194/198/230/249/251/254/255/266/298/316/326/331, 11/25/29/37/156/194/198/230/249/251/254/255/257/261/266/298/316/326/331, 11/29/37/194/198/230/249/251/254/256/261/266/298/316/326/331, 11/12/29/37/156/194/198/230/249/251/254/261/266/298/316/326/331, 11/12/25/29/37/156/194/198/230/249/251/254/257/261/266/298/316/326/331, 11/25/37/194/198/230/249/251/254/255/256/261/266/298/316/326/331, or 11/37/156/194/198/230/249/251/254/255/261/266/298/316/326/331, wherein the amino acid positions are relative to the reference sequence corresponding to residues 12 to 346 of SEQ ID NO: 2, or relative to the reference sequence corresponding to SEQ ID NO: 2.

[0208] In some embodiments, the amino acid sequence of the engineered RNA ligase comprises at least a substitution set or amino acid residues 11N/25A/29D/37L/156G/194V/198M/230T/249L/251S/254S/266L/298S/316L/326L/331G, 11N/37L/194V/198M/230T/249L/251S/254S/255Y/256S/257D/266L/298S/316L/326L/331G, 11N/37L/156G/194V/198M/230T/249L/251S/254S/255V/266L/298S/316L/326L/331G, 11N/12T/37L/T194V/198M/230T/247R/249L/251S/252A/254S/266L/298S/316L/326L/331G, 11N/25A/37L/194V/198M/230T/249L/251S/254S/266L/298S/316L/326L/331G, 11N/37L/194V/198M/230T/249L/251S/254S/266L/298S/316L/326L/331G, 11N/25A/29D/37L/156G/194V/198M/230T/249L/251S/254S/255S/266L/298S/316L/326L/331G, 11N/12T/37L/194V/198M/230T/249L/251S/254S/256S/266L/298S/316L/326L/331G, 11N/37L/156G/194V/198M/230T/249L/251S/254S/266L/298S/316L/326L/331G, 11N/25A/37L/156G/194V/198M/230T/249L/251S/254S/255V/256S/257D/261D/266L/298S/316L/326L/331 G, 11N/12T/18H/37L/194V/198M/230T/247R/249L/251T/254S/266L/298S/316L/326L/331G, 11N/12T/25A/37L/194V/198M/230T/249L/251S/254S/255V/256S/257D/266L/298S/316L/326L/331G, 11N/25A/37L/194V/198M/230T/249L/251S/254S/257D/266L/298S/316L/326L/331G, 11N/12T/37L/194V/198M/230T/249L/251S/254S/255S/257D/266L/298S/316L/326L/331G, 11N/25A/29D/37L/194V/198M/230T/249L/251S/254S/255Y/257D/266L/298S/316L/326L/331G, 11N/12T/37L/194V/198M/230T/249L/251S/254S/256S/257D/266L/298S/316L/326L/331G, 11N/37L/194V/198M/230T/249L/251S/254S/255S/257D/266L/298S/316L/326L/331G, 11N/37L/156G/194V/198M/230T/249L/251S/254S/255N/256S/257D/266L/298S/316L/326L/331G, 11N/12T/25A/37L/194V/198M/230T/249L/251S/254S/266L/298S/316L/326L/331G, 11N/12T/18H/37L/38E/194V/198M/230T/249L/251T/252A/254S/266L/298S/316L/326L/331G, 11N/37L/194V/198M/230T/249L/251S/254S/256S/257D/261D/266L/298S/316L/326L/331G, 11N/29D/37L/194V/198M/230T/249L/251S/254S/266L/298S/316L/326L/331G, 11N/25A/37L/194V/198M/230T/249L/251S/254S/255V/256S/257D/261D/266L/298S/316L/326L/331G, 11N/12T/37L/38E/194V/198M/230T/249L/251S/254S/266L/298S/316L/326L/331G, 11N/25A/29D/37L/194V/198M/230T/249L/251S/254S/256S/257D/266L/298S/316L/326L/331G, 11N/12T/29D/37L/194V/198M/230T/249L/251S/254S/257D/266L/298S/316L/326L/331G, 11N/37L/194V/198M/230T/249L/251S/254S/261D/266L/298S/316L/326L/331G, 11N/12T/37L/194V/198M/230T/249L/251T/254S/266L/298S/316L/326L/331G, 11N/37L/156G/194V/198M/230T/249L/251S/254S/255N/266L/298S/316L/326L/331G, 11N/12T/37L/194V/198M/230T/249R/251T/254S/266L/298S/316L/326L/331G, 11N/37L/194V/198M/230T/249L/251S/254S/255V/266L/298S/316L/326L/331G, 11N/29D/37L/156G/194V/198M/230T/249L/251S/254S/256S/257D/266L/298S/316L/326L/331G, 11N/12T/37L/194V/198M/230T/249L/251S/252A/254S/266L/298S/316L/326L/331G, 11N/12T/37L/194V/198M/230T/249L/251S/254S/255V/257D/261D/266L/298S/316L/326L/331G, 11N/12T/18A/37L/194V/198M/230T/249L/251S/254S/266L/298S/316L/326L/331G, 11N/12T/29D/37L/194V/198M/230T/249L/251S/254S/255N/257D/266L/298S/316L/326L/331G, 11N/12T/37L/194V/198M/230T/249L/251S/254S/255Y/256S/257D/266L/298S/316L/326L/331G, 11N/25A/29D/37L/156G/194V/198M/230T/249L/251S/254S/256S/257D/266L/298S/316L/326L/331G, 11N/12T/25A/37L/194V/198M/230T/249L/251S/254S/255V/256S/257D/261D/266L/298S/316L/326L/331G, 11N/12T/29D/37L/194V/198M/230T/249L/251S/254S/255Y/256S/257D/261D/266L/298S/316L/326L/331G, 11N/12T/25A/37L/194V/198M/230T/249L/251S/254S/256S/266L/298S/316L/326L/331G, 11N/12T/18H/37L/38E/194V/198M/230T/247R/249L/251S/252A/254S/266L/298S/316L/326L/327M/331G, 11N/12T/18H/37L/194V/198M/230T/247R/249L/251S/254S/266L/298S/316L/326L/331G, 11N/12T/25A/29D/37L/194V/198M/230T/249L/251S/254S/266L/298S/316L/326L/331G, 11N/25A/37L/156G/194V/198M/230T/249L/251S/254S/255V/257D/266L/298S/316L/326L/331G, 11N/12T/37L/194V/198M/230T/249L/251S/254S/255V/257D/266L/298S/316L/326L/331G, 11N/37L/194V/H198M/N230T/S249L/K251S/K254S/A255N/V266L/M298S/M316L/K326L/1331G, 11N/12T/18H/37L/156G/194V/198M/230T/249L/251T/252A/254S/266L/298S/316L/326L/331G, 11N/37L/194V/198M/230T/249L/251S/254S/255V/261D/266L/298S/316L/326L/331G, 11N/12T/25A/37L/194V/198M/230T/249L/251S/254S/255V/266L/298S/316L/326L/331G, 11N/37L/194V/198M/230T/249L/251S/254S/255V/256S/261D/266L/298S/316L/326L/331G, 11N/12T/37L/156G/194V/198M/230T/249L/251S/254S/255S/257D/266L/298S/316L/326L/331G, 11N/12T/37L/156G/194V/198M/230T/249L/251S/254S/257D/266L/298S/316L/326L/331G, 11N/37L/156G/194V/198M/230T/249L/251S/254S/256S/257D/266L/298S/316L/326L/331G, 11N/37L/156G/194V/198M/230T/249L/251S/254S/255Y/266L/298S/316L/326L/331G, 11N/12T/25A/37L/156G/194V/198M/230T/249L/251S/254S/256S/257D/266L/298S/316L/326L/331G, 11N/25A/29D/37L/156G/194V/198M/230T/249L/251S/254S/257D/261D/266L/298S/316L/326L/331G, 11N/12T/25A/37L/194V/198M/230T/249L/251S/254S/261D/266L/298S/316L/326L/331G, 11N/37L/156G/194V/198M/230T/249L/251S/254S/255Y/256S/261D/266L/298S/316L/326L/331G, 11N/25A/29D/37L/194V/198M/230T/249L/251S/254S/255Y/256S/257D/266L/298S/316L/326L/331G, 11N/12T/37L/38E/194V/198M/230T/249L/251S/252A/254S/266L/298S/316L/326L/331G, 11N/37L/156G/194V/198M/230T/249L/251S/254S/255V/256S/257D/266L/298S/316L/326L/331G, 11N/12T/37L/194V/198M/230T/249L/251S/254S/255S/266L/298S/316L/326L/331G, 11N/12T/37L/194V/198M/230T/249R/251S/252A/254S/266L/298S/316L/326L/331G, 11N/37L/156G/194V/198M/230T/249L/251S/254S/255Y/256S/266L/298S/316L/326L/331G, 11N/25A/29D/37L/194V/198M/230T/249L/251S/254S/261D/266L/298S/316L/326L/331G, 11N/12T/37L/194V/198M/230T/249L/251S/254S/257D/266L/298S/316L/326L/331G, 11N/37L/194V/198M/230T/249L/251S/254S/255N/256S/266L/298S/316L/326L/331G, 11N/29D/37L/194V/198M/230T/249L/251S/254S/255N/266L/298S/316L/326L/331G, 11N/37L/194V/198M/230T/249L/251S/254S/255V/257D/261D/266L/298S/316L/326L/331G, 11N/37L/194V/198M/230T/249L/251S/254S/255Y/257D/266L/298S/316L/326L/331G, 11N/37L/156G/194V/198M/230T/249L/251S/254S/257D/266L/298S/316L/326L/331G, 11N/12T/37L/192N/194V/198M/230T/249R/251T/252A/254S/266L/298S/316L/326L/331G, 11N/25A/29D/37L/194V/198M/230T/249L/251S/254S/255N/256S/257D/266L/298S/316L/326L/331G, 11N/25A/29D/37L/194V/198M/230T/249L/251S/254S/255V/261D/266L/298S/316L/326L/331G, 11N/37L/156G/194V/198M/230T/249L/251S/254S/255Y/257D/266L/298S/316L/326L/331G, 11N/29D/37L/194V/198M/230T/249L/251S/254S/255V/257D/266L/298S/316L/326L/331G, 11N/29D/37L/194V/198M/230T/249L/251S/254S/256S/257D/266L/298S/316L/326L/331G, 11N/12T/18A/37L/194V/198M/230T/249L/251S/252A/254S/266L/298S/316L/326L/331G, 11N/12T/37L/194V/198M/230T/249R/251S/254S/266L/298S/316L/326L/331G, 11N/12T/37L/156G/194V/198M/230T/249L/250I/251S/254S/266L/298S/316L/326L/331G, 11N/12T/37L/38E/194V/198M/230T/249L/251T/252A/254S/266L/298S/316L/326L/331G, 11N/12T/37L/156G/194V/198M/230T/249L/251S/254S/255Y/256S/257D/266L/298S/316L/326L/331G, 11N/12T/25A/37L/194V/198M/230T/249L/251S/254S/257D/266L/298S/316L/326L/331G, 11N/37L/194V/198M/230T/249L/251S/254S/255V/256S/257D/261D/266L/298S/316L/326L/331G, 11N/12T/25A/37L/156G/194V/198M/230T/249L/251S/254S/261D/266L/298S/316L/326L/331G, 11N/12T/37L/156G/194V/198M/230T/249L/251S/252A/254S/266L/298S/316L/326L/331G, 11N/25A/37L/194V/198M/230T/249L/251S/254S/255V/256S/257D/266L/298S/316L/326L/331G, 11N/25A/29D/37L/156G/194V/198M/230T/249L/251S/254S/255S/257D/266L/298S/316L/326L/331G, 11N/12T/29D/37L/156G/194V/198M/230T/249L/251S/254S/266L/298S/316L/326L/331G, 11N/12T/37L/194V/198M/230T/249L/251T/252A/254S/266L/298S/316L/326L/331G, 11N/12T/37L/194V/198M/230T/249L/251S/254S/256S/257D/261D/266L/298S/316L/326L/331G, 11N/12T/25A/37L/156G/194V/198M/230T/249L/251S/254S/255Y/256S/257D/266L/298S/316L/326L/331G, 11N/37L/156G/194V/198M/230T/249L/251S/254S/255Y/256S/257D/266L/298S/316L/326L/331G, 11N/12T/37L/156G/194V/198M/230T/249R/251T/252A/254S/266L/298S/316L/326L/331G, 11N/12T/25A/29D/37L/194V/198M/230T/249L/251S/254S/255V/266L/298S/316L/326L/331G, 11N/29D/37L/156G/194V/198M/230T/249L/251S/254S/266L/298S/316L/326L/331G, 11N/12T/37L/194V/198M/230T/249L/251S/254S/255V/256S/266L/298S/316L/326L/331G, 11N/37L/194V/198M/230T/249L/251S/254S/255Y/256S/266L/298S/316L/326L/331G, 11N/12T/37L/38E/194V/198M/230T/249L/250I/251S/252A/254S/266L/298S/316L/326L/331G, 11N/12T/37L/194V/198M/230T/247R/249R/251S/252A/254S/266L/298S/316L/326L/331G, 11N/37L/194V/198M/230T/249L/251S/254S/256S/257D/266L/298S/316L/326L/331G, 11N/37L/156G/194V/198M/230T/249L/251S/254S/255S/257D/266L/298S/316L/326L/331G, 11N/37L/156G/194V/198M/230T/249L/251S/254S/255V/257D/266L/298S/316L/326L/331G, 11N/12T/37L/60S/194V/198M/230T/249L/251S/254S/266L/298S/316L/326L/331G, 11N/37L/194V/198M/230T/249L/251S/254S/255Y/256S/261D/266L/298S/316L/326L/331G, 11N/37L/194V/198M/230T/249L/251S/254S/256S/266L/298S/316L/326L/331G, 11N/37L/194V/198M/230T/249L/251S/254S/255S/266L/298S/316L/326L/331G, 11N/12T/37L/194V/198M/230T/249L/251S/254S/255S/257D/261D/266L/298S/316L/326L/331G, 11N/37L/156G/194V/198M/230T/249L/251S/254S/256S/266L/298S/316L/326L/331G, 11N/37L/194V/198M/230T/249L/251S/254S/255Y/257D/261D/266L/298S/316L/326L/331G, 11N/12T/25A/37L/194V/198M/230T/249L/251S/254S/255V/257D/261D/266L/298S/316L/326L/331G, 11N/25A/29D/37L/194V/198M/230T/249L/251S/254S/255N/256S/261D/266L/298S/316L/326L/331G, 11N/37L/194V/198M/230T/249L/251S/254S/255V/257D/266L/298S/316L/326L/331G, 11N/29D/37L/156G/194V/198M/230T/249L/251S/254S/255V/256S/266L/298S/316L/326L/331G, 11N/12T/37L/194V/198M/230T/249L/251S/254S/255S/256S/266L/298S/316L/326L/331G, 11N/25A/37L/156G/194V/198M/230T/249L/251S/254S/255V/256S/266L/298S/316L/326L/331G, 11N/12T/37L/194V/198M/230T/247R/249L/251T/252A/254S/266L/298S/316L/326L/331G, 11N/12T/37L/194V/198M/230T/249L/251S/254S/256S/261D/266L/298S/316L/326L/331G, 11N/12T/37L/38E/194V/198M/230T/249L/251T/254S/266L/298S/316L/326L/331G, 11N/25A/29D/37L/156G/194V/198M/230T/249L/251S/254S/261D/266L/298S/316L/326L/331G, 11N/37L/194V/198M/230T/249L/251S/254S/257D/266L/298S/316L/326L/331G, 11N/12T/37L/156G/194V/198M/230T/249L/251S/254S/255N/256S/261D/266L/298S/316L/326L/331G, 11N/25A/37L/156G/194V/198M/230T/249L/251S/254S/255S/266L/298S/316L/326L/331G, 11N/12T/25A/37L/194V/198M/230T/249L/251S/254S/255S/266L/298S/316L/326L/331G, 11N/25A/29D/37L/156G/194V/198M/230T/249L/251S/254S/255V/257D/261D/266L/298S/316L/326L/331G, 11N/29D/37L/194V/198M/230T/249L/251S/254S/256S/261D/266L/298S/316L/326L/331G, 11N/12T/37L/156G/194V/198M/230T/249L/251S/254S/255V/257D/266L/298S/316L/326L/331G, 11N/12T/29D/37L/156G/194V/198M/230T/249L/251S/254S/261D/266L/298S/316L/326L/331G, 11N/37L/194V/198M/230T/249L/251S/254S/255S/257D/261D/266L/298S/316L/326L/331G, 11N/12T/25A/29D/37L/156G/194V/198M/230T/249L/251S/254S/257D/261D/266L/298S/316L/326L/331G, 11N/25A/37L/194V/198M/230T/249L/251S/254S/255V/256S/261D/266L/298S/316L/326L/331G, or 11N/37L/156G/194V/198M/230T/249L/251S/254S/255V/261D/266L/298S/316L/326L/331G, wherein the amino acid positions are relative to the reference sequence corresponding to residues 12 to 346 of SEQ ID NO: 2, or relative to the reference sequence corresponding to SEQ ID NO: 2.

[0209] In some embodiments, the amino acid sequence of the engineered RNA ligase comprises at least a substitution set at amino acid positions 11/12/37/194/198/230/249/251/254/266/298/316/326/331, 11/12/28/37/194/198/230/249/251/254/266/298/316/326/331, 11/12/37/89/194/198/230/249/251/254/266/298/316/326/331, 11/12/37/95/194/198/230/249/251/254/266/298/316/326/331, 11/12/37/143/194/198/230/249/251/254/266/298/316/326/331, 11/12/37/157/194/198/230/249/251/254/266/298/316/326/331, 11/12/37/181/194/198/230/249/251/254/266/298/316/326/331, 11/12/37/183/194/198/230/249/251/254/266/298/316/326/331, 11/12/37/185/194/198/230/249/251/254/266/298/316/326/331, 11/12/37/190/194/198/230/249/251/254/266/298/316/326/331, 11/12/37/194/198/213/230/249/251/254/266/298/316/326/331, or 11/12/37/194/198/214/230/249/251/254/266/298/316/326/331, wherein the amino acid positions are relative to the reference sequence corresponding to residues 12 to 346 of SEQ ID NO: 2, or relative to the reference sequence corresponding to SEQ ID NO: 2.

[0210] In some embodiments, the amino acid sequence of the engineered RNA ligase comprises at least a substitution set or amino acid residues 11N/12T/37L/157V/194V/198M/230T/249L/251S/254S/266L/298S/316L/326L/331G, 11N/12T/37L/183L/194V/198M/230T/249L/251S/254S/266L/298S/316L/326L/331G, 11N/12T/37L/95A/194V/198M/230T/249L/251S/254S/266L/298S/316L/326L/331G, 11N/12T/37L/183V/194V/198M/230T/249L/251S/254S/266L/298S/316L/326L/331G, 11N/12T/37L/185P/194V/198M/230T/249L/251S/254S/266L/298S/316L/326L/331G, 11N/12T/37L/181E/194V/198M/230T/249L/251S/254S/266L/298S/316L/326L/331G, 11N/12T/37L/194V/198M/213D/230T/249L/251S/254S/266L/298S/316L/326L/331G, 11N/12T/37L/89M/194V/198M/230T/249L/251S/254S/266L/298S/316L/326L/331G, 11N/12T/37L/194V/198M/230T/249L/251S/254S/266L/298S/316L/326L/331G, 11N/12T/28M/37L/194V/198M/230T/249L/251S/254S/266L/298S/316L/326L/331G, 11N/12T/37L/190M/194V/198M/230T/249L/251S/254S/266L/298S/316L/326L/331G, 11N/12T/37L/194V/198M/214L/230T/249L/251S/254S/266L/298S/316L/326L/331G, 11N/12T/37L/143A/194V/198M/230T/249L/251S/254S/266L/298S/316L/326L/331G, 11N/12T/37L/89Q/194V/198M/230T/249L/251S/254S/266L/298S/316L/326L/331G, or 11N/12T/37L/95G/194V/198M/230T/249L/251S/254S/266L/298S/316L/326L/331G, wherein the amino acid positions are relative to the reference sequence corresponding to residues 12 to 346 of SEQ ID NO: 2, or relative to the reference sequence corresponding to SEQ ID NO: 2.

[0211] In some embodiments, the amino acid sequence of the engineered RNA ligase comprises at least a substitution set at amino acid positions 11/25/37/95/157/194/198/230/249/251/254/266/298/316/326/331, 11/25/37/95/183/185/194/198/214/230/249/251/254/266/298/316/326/331, 11/25/37/89/183/194/198/230/249/251/254/266/298/316/326/331, 11/25/28/37/89/143/183/194/198/230/249/251/254/266/298/316/326/331, 11/25/37/28/143/157/194/198/230/249/251/254/266/298/316/326/331, 11/25/37/181/183/194/198/230/249/251/254/266/298/316/326/331, 11/25/37/143/181/183/194/198/214/230/249/251/254/266/298/316/326/331, 11/25/37/143/181/183/194/198/230/249/251/254/266/298/316/326/331, 11/25/37/89/143/183/194/198/230/249/251/254/266/298/316/326/331, 11/25/28/37/143/181/183/194/198/230/249/251/254/266/298/316/326/331, 11/25/37/143/157/194/198/230/249/251/254/266/298/316/326/331, 11/25/37/95/181/183/194/198/230/249/251/254/266/298/316/326/331, 11/25/37/157/194/198/230/249/251/254/266/298/316/326/331, 11/25/37/143/183/194/198/230/249/251/254/266/298/316/326/331, 11/25/37/89/143/157/183/194/198/230/249/251/254/266/298/316/326/331, 11/25/37/89/95/157/194/198/230/249/251/254/266/298/316/326/331, 11/25/37/89/157/194/198/230/249/251/254/266/298/316/326/331, 11/25/37/89/95/143/181/194/198/230/249/251/254/266/298/316/326/331, 11/25/37/95/143/194/198/230/249/251/254/266/298/316/326/331, 11/25/37/89/157/183/194/198/214/230/249/251/254/266/298/316/326/331, 11/25/37/143/194/198/214/230/249/251/254/266/298/316/326/331, 11/25/37/194/198/230/249/251/254/266/298/316/326/331, 11/25/37/143/181/183/185/194/198/230/249/251/254/266/298/316/326/331, 11/25/37/143/183/194/198/214/230/249/251/254/266/298/316/326/331, 11/25/28/37/95/183/194/198/214/230/249/251/254/266/298/316/326/331, 11/25/37/89/143/157/194/198/230/249/251/254/266/298/316/326/331, 11/25/28/37/95/194/198/230/249/251/254/266/298/316/326/331, 11/25/37/95/143/183/185/194/198/230/249/251/254/266/298/316/326/331, or 11/25/37/95/143/157/183/194/198/230/249/251/254/266/298/316/326/331, wherein the amino acid positions are relative to the reference sequence corresponding to residues 12 to 346 of SEQ ID NO: 2, or relative to the reference sequence corresponding to SEQ ID NO: 2.

[0212] In some embodiments, the amino acid sequence of the engineered RNA ligase comprises at least a substitution set or amino acid residues 11N/25A/37L/95A/157V/194V/198M/230T/249L/251S/254S/266L/298S/316L/326L/331G, 11N/25A/37L/95G/183V/185P/194V/198M/214L/230T/249L/251S/254S/266L/298S/316L/326L/331G, 11N/25A/37L/89M/183V/194V/198M/230T/249L/251S/254S/266L/298S/316L/326L/331G, 11N/25A/28M/37L/89G/143M/183L/194V/198M/230T/249L/251S/254S/266L/298S/316L/326L/331G, 11N/25A/37L/28M/143M/157V/194V/198M/230T/249L/251S/254S/266L/298S/316L/326L/331G, 11N/25A/37L/181E/183V/194V/198M/230T/249L/251S/254S/266L/298S/316L/326L/331G, 11N/25A/37L/143A/181E/183V/194V/198M/214L/230T/249L/251S/254S/266L/298S/316L/326L/331G, 11N/25A/37L/143A/181E/183V/194V/198M/230T/249L/251S/254S/266L/298S/316L/326L/331G, 11N/25A/37L/89G/143M/183L/194V/198M/230T/249L/251S/254S/266L/298S/316L/326L/331G, 11N/25A/28M/37L/143M/181E/183L/194V/198M/230T/249L/251S/254S/266L/298S/316L/326L/331G, 11N/25A/37L/143M/157V/194V/198M/230T/249L/251S/254S/266L/298S/316L/326L/331G, 11N/25A/37L/95A/181E/183L/194V/198M/230T/249L/251S/254S/266L/298S/316L/326L/331G, 11N/25A/37L/157V/194V/198M/230T/249L/251S/254S/266L/298S/316L/326L/331G, 11N/25A/37L/143A/183L/194V/198M/230T/249L/251S/254S/266L/298S/316L/326L/331G, 11N/25A/37L/143A/157V/194V/198M/230T/249L/251S/254S/266L/298S/316L/326L/331G, 11N/25A/37L/89G/143A/157V/183L/194V/198M/230T/249L/251S/254S/266L/298S/316L/326L/331G, 11N/25A/37L/89M/95A/157V/194V/198M/230T/249L/251S/254S/266L/298S/316L/326L/331G, 11N/25A/37L/89M/157V/194V/198M/230T/249L/251S/254S/266L/298S/316L/326L/331G, 11N/25A/37L/89G/95A/143A/181E/194V/198M/230T/249L/251S/254S/266L/298S/316L/326L/331G, 11N/25A/37L/95A/143A/194V/198M/230T/249L/251S/254S/266L/298S/316L/326L/331G, 11N/25A/37L/89M/157V/183L/194V/198M/214L/230T/249L/251S/254S/266L/298S/316L/326L/331G, 11N/25A/37L/143M/194V/198M/214L/230T/249L/251S/254S/266L/298S/316L/326L/331G, 11N/25A/37L/194V/198M/230T/249L/251S/254S/266L/298S/316L/326L/331G, 11N/25A/37L/143M/181E/183V/185P/194V/198M/230T/249L/251S/254S/266L/298S/316L/326L/331G, 11N/25A/37L/143M/183L/194V/198M/214L/230T/249L/251S/254S/266L/298S/316L/326L/331G, 11N/25A/28M/37L/95A/183V/194V/198M/214L/230T/249L/251S/254S/266L/298S/316L/326L/331G, 11N/25A/37L/89M/143A/157V/194V/198M/230T/249L/251S/254S/266L/298S/316L/326L/331G, 11N/25A/28M/37L/95A/194V/198M/230T/249L/251S/254S/266L/298S/316L/326L/331G, 11N/25A/37L/95A/143M/183V/185P/194V/198M/230T/249L/251S/254S/266L/298S/316L/326L/331G, or 11N/25A/37L/95A/143A/157V/183L/194V/198M/230T/249L/251S/254S/266L/298S/316L/326L/331G, wherein the amino acid positions are relative to the reference sequence corresponding to residues 12 to 346 of SEQ ID NO: 2, or relative to the reference sequence corresponding to SEQ ID NO: 2.

[0213] In some embodiments, the amino acid sequence of the engineered RNA ligase comprises at least a substitution set at amino acid positions 11/25/37/83/89/137/150/157/183/194/198/214/230/249/251/254/266/298/316/326/331, 11/25/37/89/157/183/194/198/213/214/230/249/251/254/266/298/316/326/331, 11/25/37/89/137/157/183/194/198/214/230/249/251/254/266/298/316/326/331, 11/25/37/89/150/157/183/190/194/198/214/230/249/251/254/266/298/316/326/331, 11/25/37/89/143/150/157/183/194/198/214/230/249/251/254/266/298/316/326/331, 11/25/37/60/89/143/150/157/183/190/194/198/214/230/249/251/254/266/298/316/326/331, 11/25/37/60/89/150/157/183/190/194/198/213/214/230/249/251/254/266/298/316/326/331, 11/25/37/89/104/137/154/157/183/194/198/214/230/249/251/254/266/298/316/326/331, 11/25/37/89/123/137/157/183/194/198/214/230/249/251/254/266/298/316/326/331, 11/25/37/89/137/150/154/157/183/190/194/198/214/230/249/251/254/266/298/316/326/331, 11/25/37/89/123/143/150/157/183/194/198/214/230/249/251/254/266/298/316/326/331, 11/25/37/60/89/104/143/150/157/183/194/198/213/214/230/249/251/254/266/298/316/326/331, 11/25/37/60/89/95/143/157/183/190/194/198/214/230/249/251/254/266/298/316/326/331, 11/25/37/89/123/137/157/183/190/194/198/214/230/249/251/254/266/298/316/326/331, 11/25/37/60/89/123/157/183/194/198/214/230/249/251/254/266/298/316/326/331, 11/25/37/89/104/123/157/183/194/198/214/230/249/251/254/266/298/316/326/331, or 11/25/37/60/89/123/143/157/183/194/198/214/230/249/251/254/266/298/316/326/331, wherein the amino acid positions are relative to the reference sequence corresponding to residues 12 to 346 of SEQ ID NO: 2, or relative to the reference sequence corresponding to SEQ ID NO: 2.

[0214] In some embodiments, the amino acid sequence of the engineered RNA ligase comprises at least a substitution set or amino acid residue 11N/25A/37L/83L/89M/137R/150D/157V/183L/194V/198M/214L/230T/249L/251S/254S/266L/298S/316L/326L/331G, 11N/25A/37R/89M/157V/183L/194V/198M/213R/214L/230T/249L/251S/254S/266L/298S/316L/326L/331G, 11N/25A/37L/89M/137R/157V/183L/194V/198M/214L/230T/249L/251S/254S/266L/298S/316L/326L/331G, 11N/25A/37L/89M/150D/157V/183L/190M/194V/198M/214L/230T/249L/251S/254S/266L/298S/316L/326L/331G, 11N/25A/37L/89M/143A/150D/157V/183L/194V/198M/214L/230T/249L/251S/254S/266L/298S/316L/326L/331G, 11N/25A/37L/89M/143T/150D/157V/183L/194V/198M/214L/230T/249L/251S/254S/266L/298S/316L/326L/331G, 11N/25A/37L/60A/89M/143A/150D/157V/183L/190M/194V/198M/214L/230T/249L/251S/254S/266L/298S/316L/326L/331G, 11N/25A/37L/60A/89M/150D/157V/183L/190M/194V/198M/213R/214L/230T/249L/251S/254S/266L/298S/316L/326L/331G, 11N/25A/37L/89M/104T/137R/154V/157V/183L/194V/198M/214L/230T/249L/251S/254S/266L/298S/316L/326L/331G, 11N/25A/37L/89M/123K/137R/157V/183L/194V/198M/214L/230T/249L/251S/254S/266L/298S/316L/326L/331G, 11N/25A/37L/89M/137R/150D/154V/157V/183L/190M/194V/198M/214L/230T/249L/251S/254S/266L/298 S/316L/326L/331G, 11N/25A/37L/89M/123K/143T/150D/157V/183L/194V/198M/214L/230T/249L/251S/254S/266L/298S/316L/326L/331G, 11N/25A/37L/60A/89M/104T/143A/150D/157V/I183L/194V/198M/213R/214L/230T/249L/251S/254S/266L/298S/316L/326L/331G, 11N/25A/37L/60A/89M/95G/143T/157V/183L/190M/194V/198M/214L/230T/249L/251S/254S/266L/298S/316L/326L/331G, 11N/25A/37L/89M/123R/137R/157V/183L/190M/194V/198M/214L/230T/249L/251S/254S/266L/298S/316L/326L/331G, 11N/25A/37L/60A/89M/123R/157V/183L/194V/198M/214L/230T/249L/251S/254S/266L/298S/316L/326L/331G, 11N/25A/37L/89M/104T/123R/157V/183L/194V/198M/214L/230T/249L/251S/254S/266L/298S/316L/326L/331G, or 11N/25A/37L/60A/89M/123R/143A/157V/183L/194V/198M/214L/230T/249L/251S/254S/266L/298S/316L/326L/331G, wherein the amino acid positions are relative to the reference sequence corresponding to residues 12 to 346 of SEQ ID NO: 2, or relative to the reference sequence corresponding to SEQ ID NO: 2.

[0215] In some embodiments, the amino acid sequence of the engineered RNA ligase comprises at least a substitution set at amino acid positions 11/25/37/38/89/157/183/194/198/214/230/249/251/254/266/298/316/326/331, 11/25/37/89/157/183/194/198/214/230/249/251/254/266/298/316/326/331, 11/25/37/89/157/183/194/198/214/230/249/251/254/255/266/298/316/326/331, 11/23/25/37/89/157/183/194/198/214/230/249/251/254/266/298/316/326/331, 11/25/33/37/89/157/183/194/198/214/230/249/251/254/266/298/316/326/331, 11/25/37/89/157/183/194/198/214/226/230/249/251/254/266/298/316/326/331, 11/25/37/89/157/183/194/198/214/230/251/254/266/298/316/326/331, 11/25/29/37/89/157/183/194/198/214/230/249/251/254/266/298/316/326/331, 10/11/25/37/89/157/183/194/198/214/230/249/251/254/266/298/316/326/331, 11/25/37/89/157/183/194/198/214/230/249/250/251/254/266/298/316/326/331, 11/25/37/75/89/157/183/194/198/214/230/249/251/254/266/298/316/326/331, 11/25/37/77/89/157/183/194/198/214/230/249/251/254/266/298/316/326/331, 11/25/37/89/157/183/194/198/214/228/230/249/251/254/266/298/316/326/331, 11/25/37/81/89/157/183/194/198/214/230/249/251/254/266/298/316/326/331, 11/25/37/89/157/183/194/198/214/224/230/249/251/254/266/298/316/326/331, 11/25/37/64/89/157/183/194/198/214/230/249/251/254/266/298/316/326/331, 11/25/37/89/157/183/194/198/214/230/249/251/266/298/316/326/331, 11/25/37/89/157/183/194/198/214/230/249/251/254/266/268/298/316/326/331, 11/25/37/65/89/157/183/194/198/214/230/249/251/254/266/298/316/326/331, 11/25/37/89/157/183/194/198/214/230/232/249/251/254/266/298/316/326/331, 11/25/37/89/157/183/194/198/214/230/249/251/254/266/298/316/326/331/332, 11/25/37/89/157/183/194/198/214/230/249/251/254/266/298/316/326/330/331, 11/25/37/89/101/157/183/194/198/214/230/249/251/254/266/298/316/326/331, 11/25/37/89/157/183/194/198/214/230/249/251/254/266/298/307/316/326/331, 11/25/37/89/137/157/183/194/198/214/230/249/251/254/266/298/316/326/331, 11/25/37/89/157/183/194/198/214/223/230/249/251/254/266/298/316/326/331, 11/25/37/89/157/183/194/198/214/230/249/251/254/266/280/298/316/326/331, 11/25/37/89/157/183/194/198/214/230/249/251/254/266/289/298/316/326/331, 11/25/37/89/157/183/194/198/214/230/249/251/254/266/288/298/316/326/331, 11/25/37/89/157/183/194/198/214/230/249/251/254/266/298/316/326/331/342, 11/25/37/89/93/157/183/194/198/214/230/249/251/254/266/298/316/326/331, 11/25/37/89/157/183/194/198/214/230/241/249/251/254/266/298/316/326/331, 11/25/37/89/126/157/183/194/198/214/230/249/251/254/266/298/316/326/331, 11/25/37/89/157/183/194/198/214/230/249/251/254/266/277/298/316/326/331, 11/25/37/87/89/157/183/194/198/214/230/249/251/254/266/298/316/326/331, 11/25/37/89/157/183/194/198/214/230/247/249/251/254/266/298/316/326/331, 11/25/37/89/157/183/194/198/214/230/243/249/251/254/266/298/316/326/331, 11/25/37/84/89/157/183/194/198/214/230/249/251/254/266/298/316/326/331, 11/25/37/83/89/157/183/194/198/214/230/249/251/254/266/298/316/326/331, 11/25/37/89/157/183/192/194/198/214/230/249/251/254/266/298/316/326/331, 11/25/37/89/105/157/183/194/198/214/230/249/251/254/266/298/316/326/331, 11/25/29/37/89/157/183/194/198/214/250/230/249/251/254/266/298/316/326/331, 11/25/29/37/75/77/89/157/183/194/198/214/230/249/250/251/254/255/266/298/316/326/331, 11/25/37/77/89/157/183/194/198/214/226/230/249/251/254/255/266/298/316/326/331, 11/25/37/89/157/183/194/198/214/230/249/251/254/250/255/266/298/316/326/331, 11/25/29/37/75/89/157/183/194/198/214/226/230/249/251/254/255/266/298/316/326/331, 11/25/29/37/75/77/89/157/183/194/198/214/230/249/251/254/266/298/316/326/331, 11/25/29/37/75/77/89/157/183/194/198/214/226/230/249/251/254/266/298/316/326/331, 11/25/29/37/75/77/89/157/183/194/198/214/230/249/251/254/255/266/298/316/326/331, 11/25/29/37/89/157/183/194/198/214/226/230/249/251/254/266/298/316/326/331, 11/25/29/37/89/157/183/194/198/214/230/249/251/254/255/266/298/316/326/331, 11/25/33/37/89/157/183/194/198/214/228/230/249/251/254/266/298/316/326/331, 11/25/33/37/89/157/183/194/198/214/230/251/254/266/298/316/326/331, 11/25/33/37/38/89/157/183/194/198/214/228/230/249/251/254/266/298/316/326/331, 11/25/33/37/38/89/157/183/194/198/214/230/249/251/254/266/298/316/326/331, 11/25/37/75/89/157/183/194/198/214/230/249/250/251/254/255/266/298/316/326/331, 11/25/37/75/89/157/183/194/198/214/226/230/249/251/254/266/298/316/326/331, 11/25/37/75/89/157/183/194/198/214/226/230/249/250/251/254/255/266/298/316/326/331, 11/25/37/75/77/89/157/183/194/198/214/230/249/251/254/266/298/316/326/331, 11/25/37/75/77/89/157/183/194/198/214/230/249/251/254/255/266/298/316/326/331, 11/25/37/75/77/89/157/183/194/198/214/230/249/250/251/254/255/266/298/316/326/331, 11/25/37/75/77/89/157/183/194/198/214/226/230/249/250/251/254/255/266/298/316/326/331, 11/25/37/75/77/89/157/183/194/198/214/230/249/250/251/254/266/298/316/326/331, 11/25/37/75/89/157/183/194/198/214/230/249/251/254/255/266/298/316/326/331, 11/25/37/75/89/157/183/194/198/214/230/249/250/251/254/266/298/316/326/331, 11/25/37/89/157/183/194/198/214/226/230/249/251/254/255/266/298/316/326/331, 11/25/37/89/157/183/194/198/214/228/230/251/254/266/298/316/326/331, 11/25/37/38/89/157/183/194/198/214/228/230/249/251/254/266/298/316/326/331, 11/25/37/38/89/157/183/194/198/214/230/251/254/266/291/298/316/326/331, 10/11/25/37/89/157/183/194/198/214/228/230/249/251/254/266/298/316/326/331, 10/11/25/33/37/89/157/183/194/198/214/230/249/251/254/266/298/316/326/331, 10/11/25/33/37/38/89/157/183/194/198/214/230/249/251/254/266/298/316/326/331, 10/11/25/33/37/38/89/157/183/194/198/214/230/251/254/266/298/316/326/331, 10/11/25/33/37/89/157/183/194/198/214/228/230/249/251/254/266/298/316/326/331, 10/11/25/33/37/89/157/183/194/198/214/230/251/254/266/298/316/326/331, 10/11/25/33/37/38/89/157/183/194/198/214/228/230/249/251/254/266/298/316/326/331, 10/11/25/37/89/157/183/194/198/214/230/251/254/266/298/316/326/331, 10/11/25/37/38/89/157/183/194/198/214/228/230/249/251/254/266/298/316/326/331, 10/11/25/37/38/89/157/183/194/198/214/230/249/251/254/266/298/316/326/331, 10/11/25/37/38/89/157/183/194/198/214/228/230/251/254/266/298/316/326/331, 11/25/37/77/89/157/183/194/198/214/230/249/250/251/254/266/298/316/326/331, 11/25/37/77/89/157/183/194/198/214/230/249/250/251/254/255/266/298/316/326/331, 11/25/37/77/89/157/183/194/198/214/226/230/249/251/254/266/298/316/326/331, 77/11/25/37/89/157/183/194/198/214/226/230/249/251/254/255/266/298/316/326/331, 11/25/37/77/89/157/183/194/198/214/230/249/251/254/255/266/298/316/326/331, 11/25/37/89/157/183/194/198/214/230/249/250/251/254/255/266/298/316/326/331, 11/23/25/37/89/157/183/194/198/214/226/230/249/251/254/255/266/298/316/326/331, or 11/23/25/37/89/157/183/194/198/214/226/230/249/251/254/266/298/316/326/331, wherein the amino acid positions are relative to the reference sequence corresponding to residues 12 to 346 of SEQ ID NO: 2, or relative to the reference sequence corresponding to SEQ ID NO: 2.

[0216] In some embodiments, the amino acid sequence of the engineered RNA ligase comprises at least a substitution set or amino acid residue 11N/25A/37L/38V/89M/157V/183L/194V/198M/214L/230T/249L/251S/254S/266L/298S/316L/326L/331G, 11N/25A/37L/89M/157V/183L/194V/198M/214L/230T/249K/251S/254S/266L/298S/316L/326L/331G, 11N/25A/37L/89M/157V/183L/194V/198M/214L/230T/249L/251S/254S/255S/266L/298S/316L/326L/331G, 11N/23K/25A/37L/89M/157V/183L/194V/198M/214L/230T/249L/251S/254S/266L/298S/316L/326L/331G, 11N/25A/33L/37L/89M/157V/183L/194V/198M/214L/230T/249L/251S/254S/266L/298S/316L/326L/331G, 11N/25G/37L/89M/157V/183L/194V/198M/214L/230T/249L/251S/254S/266L/298S/316L/326L/331G, 11N/25A/37L/89M/157V/183L/194V/198M/214L/226R/230T/249L/251S/254S/266L/298S/316L/326L/331G, 11N/25A/37L/89M/157V/183L/194V/198M/214L/230T/251S/254S/266L/298S/316L/326L/331G, 11N/25A/29S/37L/89M/157V/183L/194V/198M/214L/230T/249L/251S/254S/266L/298S/316L/326L/331G, 11N/25A/37M/89M/157V/183L/194V/198M/214L/230T/249L/251S/254S/266L/298S/316L/326L/331G, 11N/25A/37L/38A/89M/157V/183L/194V/198M/214L/230T/249L/251S/254S/266L/298S/316L/326L/331G, 10F/11N/25A/37L/89M/157V/183L/194V/198M/214L/230T/249L/251S/254S/266L/298S/316L/326L/331G, 11N/25A/37L/89M/157V/183L/194V/198M/214L/230T/249L/250S/251S/254S/266L/298S/316L/326L/331G, 11N/25A/37L/75D/89M/157V/183L/194V/198M/214L/230T/249L/251S/254S/266L/298S/316L/326L/331G, 11N/25A/37L/89M/157V/183L/194V/198M/214L/230V/249L/251S/254S/266L/298S/316L/326L/331G, 11N/25A/37L/77M/89M/157V/183L/194V/198M/214L/230T/249L/251S/254S/266L/298S/316L/326L/331G, 11N/25A/37L/89M/157V/183L/194V/198M/214L/230T/249L/251E/254S/266L/298S/316L/326L/331G, 11N/23T/25A/37L/89M/157V/183L/194V/198M/214L/230T/249L/251S/254S/266L/298S/316L/326L/331G, 11N/25A/33V/37L/89M/157V/183L/194V/198M/214L/230T/249L/251S/254S/266L/298S/316L/326L/331G, 11N/25A/37L/89M/157V/183L/194V/198M/214L/228L/230T/249L/251S/254S/266L/298S/316L/326L/331G, 11N/25A/37L/81Y/89M/157V/183L/194V/198M/214L/230T/249L/251S/254S/266L/298S/316L/326L/331G, 11N/25A/37L/89M/157V/183L/194V/198M/214L/224A/230T/249L/251S/254S/266L/298S/316L/326L/331G, 11N/25A/37L/64Q/89M/157V/183L/194V/198M/214L/230T/249L/251S/254S/266L/298S/316L/326L/331G, 11N/25A/37L/89M/157V/183L/194V/198M/214L/230T/249L/251S/266L/298S/316L/326L/331G, 11N/25A/37L/89M/157V/183L/194V/198M/214L/230T/249L/251S/254S/266L/268F/298S/316L/326L/331G, 11N/25A/37L/65C/89M/157V/183L/194V/198M/214L/230T/249L/251S/254S/266L/298S/316L/326L/331G, 11N/25A/37L/89M/157V/183L/194V/198M/214L/230T/232N/249L/251S/254S/266L/298S/316L/326L/331G, 11N/25A/37L/89M/157V/183L/194V/198M/214L/230T/249L/251S/254S/266L/298S/316L/326L/331G/332E, 11N/25A/37K/89M/157V/183L/194V/198M/214L/230T/249L/251S/254S/266L/298S/316L/326L/331G, 11N/25A/37L/89M/157V/183L/194V/198M/214L/230T/249L/251S/254S/266L/298S/316L/326L/331R, 11N/25A/37L/89M/157V/183L/194V/198M/214L/230T/249L/251S/254S/266L/298S/316L/326L/330K/331G, 11N/25A/37L/89M/101P/157V/183L/194V/198M/214L/230T/249L/251S/254S/266L/298S/316L/326L/331G, 11N/25A/37L/89M/157V/183L/194V/198M/214L/230T/249L/251S/254S/266L/268G/298S/316L/326L/331G, 11N/25A/37L/89M/157V/183L/194V/198M/214L/230T/249L/251S/254S/266L/298S/307R/316L/326L/331G, 11N/25A/37L/89M/157V/183L/194V/198M/214L/224Q/230T/249L/251S/254S/266L/298S/316L/326L/331G, 11N/25A/37L/89M/137N/157V/183L/194V/198M/214L/230T/249L/251S/254S/266L/298S/316L/326L/331G, 11N/25A/37L/89M/157V/183L/194V/198M/214L/223C/230T/249L/251S/254S/266L/298S/316L/326L/331G, 11N/25A/37L/89M/157V/183L/194V/198M/214L/230T/249L/251S/254S/266L/280N/298S/316L/326L/331G, 11N/25A/37L/89M/157V/183L/194V/198M/214L/230T/249L/251S/254S/266L/2891/298S/316L/326L/331G, 11N/25A/37L/89M/157V/183L/194V/198M/214L/230T/249L/251S/254S/266L/288E/298S/316L/326L/331G, 11N/25A/37L/89M/157V/183L/194V/198M/214L/230T/249L/251S/254S/266L/298S/316L/326L/331G/342T, 11N/25A/37L/89M/93K/157V/183L/194V/198M/214L/230T/249L/251S/254S/266L/298S/316L/326L/331G, 11N/25A/37L/89M/157V/183L/194V/198M/214L/230T/249L/251S/254S/266L/298S/316L/326L/331G, 11N/25A/37L/89M/157V/183L/194V/198M/214L/230T/249L/251S/254S/266L/268M/298S/316L/326L/331G, 11N/25A/37L/89M/157V/183L/194V/198M/214L/230T/249L/251S/254S/266L/298S/316L/326L/331G, 11N/25A/37L/89M/157V/183L/194V/198M/214L/230T/241Q/249L/251S/254S/266L/298S/316L/326L/331G, 11N/25A/37L/89M/126M/157V/183L/194V/198M/214L/230T/249L/251S/254S/266L/298S/316L/326L/331G 11N/25A/37L/89M/157V/183L/194V/198M/214L/230T/249L/251S/254S/266L/277A/298S/316L/326L/331G, 11N/25A/37L/87E/89M/157V/183L/194V/198M/214L/230T/249L/251S/254S/266L/298S/316L/326L/331G, 11N/25A/37L/89M/157V/183L/194V/198M/214L/230T/247I/249L/251S/254S/266L/298S/316L/326L/331G, 11N/25A/37L/89M/157V/183L/194V/198M/214L/230T/243H/249L/251S/254S/266L/298S/316L/326L/331G, 11N/25A/37L/84V/89M/157V/183L/194V/198M/214L/230T/249L/251S/254S/266L/298S/316L/326L/331G, 11N/25A/37L/83A/89M/157V/183L/194V/198M/214L/230T/249L/251S/254S/266L/298S/316L/326L/331G, 11N/25A/37L/89M/157V/183L/192E/194V/198M/214L/230T/249L/251S/254S/266L/298S/316L/326L/331G, 11N/25A/37L/89M/105K/157V/183L/194V/198M/214L/230T/249L/251S/254S/266L/298S/316L/326L/331G, 11N/25G/29S/37L/89M/157V/183L/194V/198M/214L/230T/249L/251S/254S/266L/298S/316L/326L/331G, 11N/25G//29S/37L/89M/157V/183L/194V/198M/214L/250S/230T/249L/251S/254S/266L/298S/316L/326L/331G, 11N/25G/29S/37L/75D/77M/89M/157V/183L/194V/198M/214L/230T/249L/250S/251S/254S/255S/266L/298 S/316L/326L/331G, 11N/25G/37L/75D/89M/157V/183L/194V/198M/214L/230V/249L/251S/254S/266L/298S/316L/326L/331G, 11N/25G/37L/77M/89M/157V/183L/194V/198M/214L/226R/230T/249L/251S/254S/255S/266L/298S/316L/326L/331G, 11N/25G/37L/89M/157V/183L/194V/198M/214L/230V/249L/251S/254S/266L/298S/316L/326L/331G, 11N/25A/37L/89M/157V/183L/194V/198M/214L/230T/249L/251S/254S/250S/255S/266L/298S/316L/326L/331G, 11N/25A/29S/37L/75D/89M/157V/183L/194V/198M/214L/226R/230V/249L/251S/254S/255S/266L/298S/316L/326L/331G, 11N/25A/29S/37L/75D/77M/89M/157V/183L/194V/198M/214L/230T/249L/251S/254S/266L/298S/316L/326 L/331G, 11N/25A/29S/37L/75D/77M/89M/157V/183L/194V/198M/214L/226R/230T/249L/251S/254S/266L/298S/316L/326L/331G, 11N/25A/29S/37L/75D/77M/89M/157V/183L/194V/198M/214L/230V/249L/251S/254S/255S/266L/298S/316L/326L/331G, 11N/25A/29S/37L/89M/157V/183L/194V/198M/214L/226R/230T/249L/251S/254S/266L/298S/316L/326L/331G, 11N/25A/29S/37L/89M/157V/183L/194V/198M/214L/226R/230V/249L/251S/254S/266L/298S/316L/326L/I 331G, 11N/25A/29S/37L/89M/157V/183L/194V/198M/214L/230V/249L/251S/254S/255S/266L/298S/316L/326L/13 31G, 11N/25A/33V/37L/89M/157V/183L/194V/198M/214L/228L/230T/249L/251S/254S/266L/298S/316L/326L/331G, 11N/25A/33V/37L/89M/157V/183L/194V/198M/214L/230T/249K/251S/254S/266L/298S/316L/326L/331G, 11N/25A/33V/37L/89M/157V/183L/194V/198M/214L/230T/251S/254S/266L/298S/316L/326L/331G, 11N/25A/33V/37M/89M/157V/183L/194V/198M/214L/228L/230T/249L/251S/254S/266L/298S/316L/326L/331G, 11N/25A/33V/37M/38A/89M/157V/183L/194V/198M/214L/228L/230T/249L/251S/254S/266L/298S/316L/326L/331G, 11N/25A/33V/37M/38A/89M/157V/183L/194V/198M/214L/228L/230T/249K/251S/254S/266L/298S/316L/326L/331G, 11N/25A/33V/37L/38V/89M/157V/183L/194V/198M/214L/230T/249L/251S/254S/266L/298S/316L/326L/331G, 11N/25A/37L/75D/89M/157V/183L/194V/198M/214L/230T/249L/250S/251S/254S/255S/266L/298S/316L/326L/331G, 11N/25A/37L/75D/89M/157V/183L/194V/198M/214L/226R/230T/249L/251S/254S/266L/298S/316L/326L/331G, 11N/25A/37L/75D/89M/157V/183L/194V/198M/214L/226R/230T/249L/250S/251S/254S/255S/266L/298S/316L/326L/331G, 11N/25A/37L/75D/89M/157V/183L/194V/198M/214L/226R/230V/249L/250S/251S/254S/255S/266L/298S/316L/326L/331G, 11N/25A/37L/75D/77M/89M/157V/183L/194V/198M/214L/230T/249L/251S/254S/266L/298S/316L/326L/331G, 11N/25A/37L/75D/77M/89M/157V/183L/194V/198M/214L/230T/249L/251S/254S/255S/266L/298S/316L/326L/331G, 11N/25A/37L/75D/77M/89M/157V/183L/194V/198M/214L/230T/249L/250S/251S/254S/255S/266L/298S/316L/326L/331G, 11N/25A/37L/89M/157V/183L/194V/198M/214L/230T/249L/251S/254S/266L/298S/316L/326L/331G, 11N/25A/37L/75D/77M/89M/157V/183L/194V/198M/214L/226R/230T/249L/250S/251S/254S/255S/266L/298S/316L/326L/331G, 11N/25A/37L/75D/77M/89M/157V/183L/194V/198M/214L/230V/249L/251S/254S/266L/298S/316L/326L/331G, 11N/25A/37L/75D/77M/89M/157V/183L/194V/198M/214L/230V/249L/250S/251S/254S/266L/298S/316L/326L/331G, 11N/25A/37L/75D/89M/157V/183L/194V/198M/214L/230V/249L/251S/254S/266L/298S/316L/326L/331G, 11N/25A/37L/75D/89M/157V/183L/194V/198M/214L/230V/249L/251S/254S/255S/266L/298S/316L/326L/331G, 11N/25A/37L/75D/89M/157V/183L/194V/198M/214L/230V/249L/250S/251S/254S/266L/298S/316L/326L/331G, 11N/25A/37L/89M/157V/183L/194V/198M/214L/226R/230T/249L/251S/254S/266L/298S/316L/326L/331G, 11N/25A/37L/89M/157V/183L/194V/198M/214L/230T/249L/251S/254S/255S/266L/298S/316L/326L/331G, 11N/25A/37L/89M/157V/183L/194V/198M/214L/226R/230V/249L/251S/254S/266L/298S/316L/326L/331G, 11N/25A/37L/89M/157V/183L/194V/198M/214L/226R/230V/249L/251S/254S/255S/266L/298S/316L/326L/331G, 11N/25A/37M/89M/157V/183L/194V/198M/214L/228L/230T/249L/251S/254S/266L/298S/316L/326L/331G, 11N/25A/37M/89M/157V/183L/194V/198M/214L/228L/230T/251S/254S/266L/298S/316L/326L/331G, 11N/25A/37M/38A/89M/157V/183L/194V/198M/214L/230T/249L/251S/254S/266L/298S/316L/326L/331G, 11N/25A/37M/38A/89M/157V/183L/194V/198M/214L/228L/230T/249L/251S/254S/266L/298S/316L/326L/331G, 11N/25A/37M/38V/89M/157V/183L/194V/198M/214L/228L/230T/249K/251S/254S/266L/298S/316L/326L/331G, 11N/25A/37M/38V/89M/157V/183L/194V/198M/214L/230T/249K/251S/254S/266L/298S/316L/326L/331G, 11N/25A/37L/38A/89M/157V/183L/194V/198M/214L/230T/251S/254S/266L/291T/298S/316L/326L/331G, 10F/11N/25A/37L/89M/157V/183L/194V/198M/214L/228L/230T/249L/251S/254S/266L/298S/316L/326L/331G, 10F/11N/25A/37L/89M/157V/183L/194V/198M/214L/228L/230T/249K/251S/254S/266L/298S/316L/326L/331G, 10F/11N/25A/33L/37L/89M/157V/183L/194V/198M/214L/230T/249K/251S/254S/266L/298S/316L/326L/331G, 10F/11N/25A/33L/37M/89M/157V/183L/194V/198M/214L/230T/249L/251S/254S/266L/298S/316L/326L/331G, 10F/11N/25A/33L/37M/38A/89M/157V/183L/194V/198M/214L/230T/249K/251S/254S/266L/298S/316L/326L/331G, 10F/11N/25A/33L/37L/38A/89M/157V/183L/194V/198M/214L/230T/251S/254S/266L/298S/316L/326L/331 G, 10F/11N/25A/33L/37L/38V/89M/157V/183L/194V/198M/214L/230T/249L/251S/254S/266L/298S/316L/326 L/331G, 10F/11N/25A/33V/37L/89M/157V/183L/194V/198M/214L/230T/249K/251E/254S/266L/298S/316L/326L/331G, 10F/11N/25A/33V/37M/89M/157V/183L/194V/198M/214L/230T/249L/251S/254S/266L/298S/316L/326L/331G, 10F/11N/25A/33V/37M/89M/157V/183L/194V/198M/214L/228L/230T/249L/251S/254S/266L/298S/316L/326L/331G, 10F/11N/25A/33V/37M/89M/157V/183L/194V/198M/214L/230T/249K/251S/254S/266L/298S/316L/326L/331G, 10F/11N/25A/33V/37M/89M/157V/183L/194V/198M/214L/230T/251S/254S/266L/298S/316L/326L/331G, 10F/11N/25A/33V/37M/38A/89M/157V/183L/194V/198M/214L/228L/230T/249K/251S/254S/266L/298S/316L/326L/331G, 10F/11N/25A/33V/37M/38V/89M/157V/183L/194V/198M/214L/230T/249L/251S/254S/266L/298S/316L/326L/331G, 10F/11N/25A/33V/37M/38V/89M/157V/183L/194V/198M/214L/228L/230T/249K/251S/254S/266L/298S/316L/326L/331G, 10F/11N/25A/33V/37M/38V/89M/157V/183L/194V/198M/214L/230T/249K/251S/254S/266L/298S/316L/326L/331G, 10F/11N/25A/37L/89M/157V/183L/194V/198M/214L/230T/249K/251S/254S/266L/298S/316L/326L/331G, 10F/11N/25A/37L/89M/157V/183L/194V/198M/214L/230T/251S/254S/266L/298S/316L/326L/331G, 10F/11N/25A/37M/89M/157V/183L/194V/198M/214L/230T/249L/251S/254S/266L/298S/316L/326L/331G, 10F/11N/25A/37M/89M/157V/183L/194V/198M/214L/228L/230T/249L/251S/254S/266L/298S/316L/326L/331G, 10F/11N/25A/37M/89M/157V/183L/194V/198M/214L/228L/230T/249K/251S/254S/266L/298S/316L/326L/331G, 10F/11N/25A/37M/89M/157V/183L/194V/198M/214L/230T/249K/251S/254S/266L/298S/316L/326L/331G, 10F/11N/25A/37M/38A/89M/157V/183L/194V/198M/214L/228L/230T/249L/251S/254S/266L/298S/316L/326L/331G, 10F/11N/25A/37M/38A/89M/157V/183L/194V/198M/214L/228L/230T/249K/251S/254S/266L/298S/316L/326L/331G, 10F/11N/25A/37M/38V/89M/157V/183L/194V/198M/214L/230T/249L/251S/254S/266L/298S/316L/326L/331G, 10F/11N/25A/37M/38V/89M/157V/183L/194V/198M/214L/228L/230T/249L/251S/254S/266L/298S/316L/326L/331G, 10F/11N/25A/37M/38V/89M/157V/183L/194V/198M/214L/228L/230T/251S/254S/266L/298S/316L/326L/331G, 10F/11N/25A/37L/38A/89M/157V/183L/194V/198M/214L/230T/249K/251S/254S/266L/298S/316L/326L/331G, 10F/11N/25A/37L/38V/89M/157V/183L/194V/198M/214L/230T/249L/251S/254S/266L/298S/316L/326L/331G, 10F/11N/25A/37L/38V/89M/157V/183L/194V/198M/214L/230T/249L/251S/254S/266L/298S/316L/326L/331G, 11N/25A/37L/89M/157V/183L/194V/198M/214L/228L/230T/249L/251S/254S/266L/298S/316L/326L/331G, 11N/25A/37L/89M/157V/183L/194V/198M/214L/230T/249L/251S/254S/266L/298S/316L/326L/331G, 11N/25A/37L/77M/89M/157V/183L/194V/198M/214L/230T/249L/250S/251S/254S/266L/298S/316L/326L/331G, 11N/25A/37L/77M/89M/157V/183L/194V/198M/214L/230T/249L/250S/251S/254S/255S/266L/298S/316L/326L/331G, 11N/25A/37L/77M/89M/157V/183L/194V/198M/214L/226R/230T/249L/251S/254S/266L/298S/316L/326L/331G, 77M/11N/25A/37L/89M/157V/183L/194V/198M/214L/226R/230T/249L/251S/254S/255S/266L/298S/316L/3 26L/331G, 11N/25A/37L/77M/89M/157V/183L/194V/198M/214L/230V/249L/251S/254S/266L/298S/316L/326L/331G, 11N/25A/37L/77M/89M/157V/183L/194V/198M/214L/230V/249L/251S/254S/255S/266L/298S/316L/326L/331G, 11N/25A/37L/89M/157V/183L/194V/198M/214L/230V/249L/251S/254S/255S/266L/298S/316L/326L/331G, 11N/25A/37L/89M/157V/183L/194V/198M/214L/230V/249L/250S/251S/254S/266L/298S/316L/326L/331G, 11N/25A/37L/89M/157V/183L/194V/198M/214L/230V/249L/250S/251S/254S/255S/266L/298S/316L/326L/331G, 11N/23T/25G/37L/89M/157V/183L/194V/198M/214L/226R/230T/249L/251S/254S/255S/266L/298S/316L/326L/331G, 11N/23T/25G/37L/89M/157V/183L/194V/198M/214L/226R/230V/249L/251S/254S/266L/298S/316L/326L/331G, or 11N/23T/25G/37L/89M/157V/183L/194V/198M/214L/230V/249L/251S/254S/266L/298S/316L/326L/331G, wherein the amino acid positions are relative to the reference sequence corresponding to residues 12 to 346 of SEQ ID NO: 2, or relative to the reference sequence corresponding to SEQ ID NO: 2.

[0217] In some embodiments, the amino acid sequence of the engineered RNA ligase comprises at least a substitution set at amino acid positions 11/25/37/86/89/157/183/194/198/214/230/249/251/254/266/298/316/326/331, 11/25/37/89/157/183/194/198/214/230/249/251/254/255/266/298/316/326/331, 11/25/37/89/157/183/194/198/214/230/249/251/254/266/298/306/316/326/331, 11/25/37/89/157/183/194/198/214/230/249/250/251/254/266/298/316/326/331, 11/25/37/75/89/157/183/194/198/214/230/249/251/254/266/298/316/326/331, 11/25/37/89/157/183/194/198/214/230/249/251/254/266/298/316/318/326/331, 11/25/37/89/157/183/194/198/214/230/249/251/254/266/298/316/326/331/335, 11/25/37/89/157/183/194/198/214/241/230/249/251/254/266/298/316/326/331, 11/25/37/89/157/183/194/198/214/230/248/249/251/254/266/298/316/326/331, 11/25/37/89/157/183/194/198/214/230/249/251/254/266/298/316/326/331/344, 11/25/37/38/89/157/183/194/198/214/230/249/251/254/266/298/316/326/331, 11/25/37/89/157/183/194/198/214/230/249/251/254/266/272/298/316/326/331, 11/25/37/83/89/157/183/194/198/214/230/249/251/254/266/298/316/326/331, 11/25/37/89/157/183/194/198/214/230/249/251/254/257/266/298/316/326/331, 11/25/37/89/157/183/194/198/214/230/249/251/254/258/266/298/316/326/331, 11/25/37/89/157/183/194/198/214/230/249/251/254/266/298/316/323/326/331, wherein the amino acid positions are relative to the reference sequence corresponding to residues 12 to 346 of SEQ ID NO: 2, or relative to the reference sequence corresponding to SEQ ID NO: 2.

[0218] In some embodiments, the amino acid sequence of the engineered RNA ligase comprises at least a substitution set or amino acid residue 11N/25A/37L/86D/89M/157V/183L/194V/198M/214L/230T/249L/251S/254S/266L/298S/316L/326L/331G, 11N/25A/37L/89M/157V/183L/194V/198M/214L/230T/249L/251S/254S/255V/266L/298S/316L/326L/331G, 11N/25A/37L/89M/157V/183L/194V/198M/214L/230T/249L/251S/254S/266L/298S/306T/316L/326L/331G, 11N/25A/37L/89M/157V/183L/194V/198M/214L/230T/249L/250I/251S/254S/266L/298S/316L/326L/331G, 11N/25A/37L/75A/89M/157V/183L/194V/198M/214L/230T/249L/251S/254S/266L/298S/316L/326L/331G, 11N/25A/37L/89M/157V/183L/194V/198M/214L/230T/249L/251S/254S/266L/298S/316L/318S/326L/331G, 11N/25A/37L/89M/157V/183L/194V/198M/214L/230T/249L/251S/254S/266L/298S/316L/326L/331G/335Q, 11N/25A/37L/89M/157V/183L/194V/198M/214L/241G/230T/249L/251S/254S/266L/298S/316L/326L/331G, 11N/25A/37L/89M/157V/183L/194V/198M/214L/230T/249L/250E/251S/254S/266L/298S/316L/326L/331G, 11N/25A/37L/89M/157V/183L/194V/198M/214L/230T/248F/249L/251S/254S/266L/298S/316L/326L/331G, 11N/25A/37L/89M/157V/183L/194V/198M/214L/230T/249L/251S/254S/266L/298S/316L/326L/331G/344K, 11N/25A/37L/38S/89M/157V/183L/194V/198M/214L/230T/249L/251S/254S/266L/298S/316L/326L/331G, 11N/25A/37L/89M/157V/183L/194V/198M/214L/230T/249L/251S/254S/266L/272S/298S/316L/326L/331G, 11N/25A/37L/83G/89M/157V/183L/194V/198M/214L/230T/249L/251S/254S/266L/298S/316L/326L/331G, 11N/25A/37L/89M/157V/183L/194V/198M/214L/230T/249L/251S/254S/266L/298S/306L/316L/326L/331G, 11N/25A/37L/89M/157V/183L/194V/198M/214L/230T/249L/251S/254S/266L/272M/298S/316L/326L/331G, 11N/25A/37L/89M/157V/183L/194V/198M/214L/230T/248G/249L/251S/254S/266L/298S/316L/326L/331G, 11N/25A/37L/89M/157V/183L/194V/198M/214L/230T/249L/251S/254S/257E/266L/298S/316L/326L/331G, 11N/25A/37L/89M/157V/183L/194V/198M/214L/230T/249L/251S/254S/258M/266L/298S/316L/326L/331G, 11N/25A/37L/89M/157V/183L/194V/198M/214L/230T/249L/251S/254S/266L/298S/316L/323G/326L/331G, wherein the amino acid positions are relative to the reference sequence corresponding to residues 12 to 346 of SEQ ID NO: 2, or relative to the reference sequence corresponding to SEQ ID NO: 2.

[0219] In some embodiments, the amino acid sequence of the engineered RNA ligase comprises at least a substitution set at amino acid positions 11/25/29/37/89/101/157/183/194/198/214/226/230/249/251/254/266/298/316/326/331, 11/25/29/37/89/157/183/194/198/214/226/230/249/251/254/266/291/298/316/326/331, 11/25/29/37/89/157/183/194/198/214/226/230/249/251/254/266/291/298/307/316/326/331, 11/25/29/37/89/157/183/194/198/214/226/230/249/251/254/266/298/316/326/331, 11/25/29/33/37/75/89/157/183/194/198/214/226/230/249/251/254/266/298/316/326/331, 11/25/29/33/37/75/89/157/183/194/198/214/226/230/249/251/254/266/291/298/316/326/331, 11/25/29/33/37/38/89/157/183/194/198/214/226/230/249/251/254/266/298/316/326/331, 11/25/29/33/37/89/93/157/183/194/198/214/226/230/249/251/254/266/298/316/326/331, 11/25/29/37/38/75/89/157/183/194/198/214/226/230/249/251/254/266/291/298/307/316/326/331, 11/25/29/37/38/75/89/157/183/194/198/214/226/230/249/250/251/254/266/298/316/326/331, 11/25/29/37/38/75/89/93/157/183/194/198/214/226/230/249/251/254/266/271/298/316/326/331, 11/25/29/37/38/89/93/157/183/194/198/214/226/230/249/251/254/266/298/316/326/331, 10/11/25/29/37/75/89/157/183/194/198/214/226/230/249/251/254/266/298/316/326/331, 10/11/25/29/37/38/75/89/157/183/194/198/214/226/230/249/251/254/266/298/316/326/331, 10/11/25/29/37/38/75/89/157/183/194/198/214/226/230/249/251/254/266/291/298/316/326/331, 10/11/25/29/37/38/75/89/93/157/183/194/198/214/226/230/249/251/254/266/298/316/326/331, 11/25/29/37/64/89/157/183/194/198/214/224/226/230/249/251/254/266/298/316/326/331, 11/25/29/37/89/157/183/194/198/214/224/226/230/249/251/254/266/298/316/326/331, 11/23/25/29/37/89/101/157/183/194/198/214/226/230/249/251/254/266/298/307/316/326/331, 11/23/25/29/37/89/157/183/194/198/214/226/230/249/251/254/266/268/298/316/326/331, 11/23/25/29/37/64/89/157/183/194/198/214/224/226/230/249/251/266/298/316/326/331, 11/23/25/29/37/64/81/89/157/183/194/198/214/226/230/249/251/254/266/298/316/326/331, 11/23/25/29/37/89/157/183/194/198/214/224/226/230/249/251/254/266/268/298/316/326/331, 11/23/25/29/37/89/157/183/194/198/214/224/226/230/249/251/266/298/316/326/331, 11/23/25/29/37/89/157/183/194/198/214/226/230/249/251/254/266/298/316/326/331, 11/23/25/29/37/64/89/157/183/194/198/214/224/226/230/249/251/254/266/298/316/326/331, 11/25/29/37/64/89/157/183/194/198/214/226/230/249/251/254/266/298/316/326/331, 11/25/29/37/75/89/157/183/194/198/214/226/230/249/251/254/266/298/307/316/326/331, 11/25/29/37/89/93/157/183/194/198/214/226/230/249/251/254/266/298/316/326/331, 11/25/29/33/37/38/75/89/157/183/194/198/214/226/230/249/251/254/266/298/316/326/331, 11/25/29/37/75/89/157/183/194/198/214/226/230/249/251/254/266/298/316/326/331, 11/25/29/37/38/75/89/93/157/183/194/198/214/226/230/249/251/254/266/291/298/316/326/331, 11/23/25/29/37/89/157/183/194/198/214/226/230/249/251/266/298/316/326/331, wherein the amino acid positions are relative to the reference sequence corresponding to residues 12 to 346 of SEQ ID NO: 2, or relative to the reference sequence corresponding to SEQ ID NO: 2.

[0220] In some embodiments, the amino acid sequence of the engineered RNA ligase comprises at least a substitution set or amino acid residues 11N/25A/29S/37L/89M/101P/157V/183L/194V/198M/214L/226R/230V/249L/251S/254S/266L/298S/316L/326L/331G, 11N/25A/29S/37L/89M/157V/183L/194V/198M/214L/226R/230V/249L/251S/254S/266L/291T/298S/316L/326L/331G, 11N/25A/29S/37L/89M/157V/183L/194V/198M/214L/226R/230V/249L/251S/254S/266L/291T/298S/307R/316L/326L/331G, 11N/25A/29S/37L/89M/157V/183L/194V/198M/214L/226R/230V/249L/251S/254S/266L/298S/316L/326L/331R, 11N/25A/29S/33V/37L/75D/89M/157V/183L/194V/198M/214L/226R/230V/249L/251S/254S/266L/298S/316L/326L/331G, 11N/25A/29S/33V/37L/75D/89M/157V/183L/194V/198M/214L/226R/230V/249K/251S/254S/266L/291T/298S/316L/326L/331R, 11N/25A/29S/33V/37L/38A/89M/157V/183L/194V/198M/214L/226R/230V/249L/251S/254S/266L/298S/316L/326L/331G, 11N/25A/29S/33V/37L/89M/93K/157V/183L/194V/198M/214L/226R/230V/249K/251S/254S/266L/298S/316L/326L/331G, 11N/25A/29S/37L/38A/75D/89M/157V/183L/194V/198M/214L/226R/230V/249L/251S/254S/266L/291T/29 8S/307R/316L/326L/331G, 11N/25A/29S/37L/38V/75D/89M/157V/183L/194V/198M/214L/226R/230V/249K/250S/251S/254S/266L/298S/316L/326L/331G, 11N/25A/29S/37L/38V/75D/89M/93K/157V/183L/194V/198M/214L/226R/230V/249L/251S/254S/266L/271 G/298S/316L/326L/331G, 11N/25A/29S/37L/38V/89M/93K/157V/183L/194V/198M/214L/226R/230V/249L/251S/254S/266L/298S/316L/326L/331G, 10F/11N/25A/29S/37L/75D/89M/157V/183L/194V/198M/214L/226R/230V/249L/251S/254S/266L/298S/316L/326L/331G, 10F/11N/25A/29S/37L/38A/75D/89M/157V/183L/194V/198M/214L/226R/230V/249L/251S/254S/266L/298 S/316L/326L/331G, 10F/11N/25A/29S/37L/38V/75D/89M/157V/183L/194V/198M/214L/226R/230V/249L/251S/254S/266L/291 T/298S/316L/326L/331G, 10F/11N/25A/29S/37L/38V/75D/89M/157V/183L/194V/198M/214L/226R/230V/249K/251S/254S/266L/298 S/316L/326L/331G, 10F/11N/25A/29S/37L/38V/75D/89M/93K/157V/183L/194V/198M/214L/226R/230V/249L/251S/254S/266L/298S/316L/326L/331G, 11N/25A/29S/37L/64Q/89M/157V/183L/194V/198M/214L/224A/226R/230V/249L/251S/254S/266L/298S/316L/326L/331G, 11N/25A/29S/37L/89M/157V/183L/194V/198M/214L/224A/226R/230V/249L/251S/254S/266L/298S/316L/326L/331G, 11N/25A/29S/37L/89M/157V/183L/194V/198M/214L/224Q/226R/230V/249L/251S/254S/266L/298S/316L/326L/331G, 11N/23T/25A/29S/37L/89M/101P/157V/183L/194V/198M/214L/226R/230V/249L/251S/254S/266L/298S/307K/316L/326L/331G, 11N/23T/25A/29S/37L/89M/157V/183L/194V/198M/214L/226R/230V/249L/251S/254S/266L/268F/298S/316L/326L/331G, 11N/23T/25A/29S/37K/64Q/89M/157V/183L/194V/198M/214L/224A/226R/230V/249L/251S/266L/298S/316L/326L/331G, 11N/23T/25A/29S/37L/64Q/81Y/89M/157V/183L/194V/198M/214L/226R/230V/249L/251S/254S/266L/298 S/316L/326L/331G, 11N/23T/25A/29S/37L/89M/157V/183L/194V/198M/214L/224A/226R/230V/249L/251S/254S/266L/268F/298S/316L/326L/331G, 11N/23T/25A/29S/37L/89M/157V/183L/194V/198M/214L/224A/226R/230V/249L/251S/266L/298S/316L/326L/331G, 11N/23T/25A/29S/37L/89M/157V/183L/194V/198M/214L/226R/230V/249L/251S/254S/266L/298S/316L/326L/331G, 11N/23T/25A/29S/37L/64Q/89M/157V/183L/194V/198M/214L/224A/226R/230V/249L/251S/254S/266L/298S/316L/326L/331G, 11N/25A/29S/37L/64Q/89M/157V/183L/194V/198M/214L/226R/230V/249L/251S/254S/266L/298S/316L/326L/331G, 11N/25A/29S/37L/75D/89M/157V/183L/194V/198M/214L/226R/230V/249K/251S/254S/266L/298S/307R/316L/326L/331G, 11N/25A/29S/37L/89M/93K/157V/183L/194V/198M/214L/226R/230V/249L/251S/254S/266L/298S/316L/326L/331G, 11N/25A/29S/33V/37L/38A/75D/89M/157V/183L/194V/198M/214L/226R/230V/249K/251S/254S/266L/298 S/316L/326L/331G, 11N/25A/29S/37L/75D/89M/157V/183L/194V/198M/214L/226R/230V/249K/251S/254S/266L/298S/316L/326L/331G, 11N/25S/29S/37L/38V/75D/89M/93K/157V/183L/194V/198M/214L/226R/230V/249L/251S/254S/266L/291 T/298S/316L/326L/331G, 11N/25A/29S/33V/37L/38A/75D/89M/157V/183L/194V/198M/214L/226R/230V/249L/251S/254S/266L/298 S/316L/326L/331G, 11N/25A/29S/37L/75D/89M/157V/183L/194V/198M/214L/226R/230V/249L/251S/254S/266L/298S/316L/326L/331G, 11N/23T/25A/29S/37L/89M/157V/183L/194V/198M/214L/226R/230V/249L/251S/266L/298S/316L/326L/331G, wherein the amino acid positions are relative to the reference sequence corresponding to residues 12 to 346 of SEQ ID NO: 2, or relative to the reference sequence corresponding to SEQ ID NO: 2.

[0221] In some embodiments, the amino acid sequence of the engineered RNA ligase comprises at least a substitution set at amino acid positions 11/23/25/29/37/38/65/89/157/183/192/194/198/214/226/230/249/251/266/298/316/326/331, 11/23/25/29/37/38/65/89/157/183/194/198/214/226/230/249/251/266/298/316/326/331, 11/23/25/29/37/38/65/89/157/183/194/198/214/224/226/230/249/251/266/298/316/326/331, 11/23/25/29/37/38/64/89/157/183/194/198/214/226/230/249/251/266/298/316/326/331, 11/23/25/29/37/89/93/157/183/194/198/214/226/230/249/251/266/298/307/316/326/331, 11/23/25/29/37/38/89/157/183/194/198/214/226/230/249/251/266/298/316/326/331, 11/23/25/29/37/38/89/157/183/194/198/214/224/226/230/249/251/266/298/316/326/331, 11/23/25/29/37/38/89/157/183/192/194/198/214/224/226/230/249/251/266/298/316/326/331, 11/23/25/29/37/65/89/157/183/194/198/214/226/230/249/251/266/298/316/326/331, 11/23/25/29/37/89/157/183/192/194/198/214/224/226/230/249/251/266/298/316/326/331, 11/23/25/29/37/75/89/157/183/194/198/214/226/230/249/251/266/298/307/316/326/331, 11/23/25/29/37/75/89/157/183/194/198/214/226/230/249/250/251/266/268/298/307/316/326/331, 11/23/25/29/37/89/157/183/194/198/214/226/230/249/250/251/266/268/298/307/316/326/331/342, 11/23/25/29/37/89/157/183/194/198/214/224/226/230/249/251/266/298/316/326/331, 11/23/25/29/37/65/89/157/183/192/194/198/214/226/230/249/251/266/298/316/326/331, 11/23/25/29/37/89/157/183/194/198/214/226/230/249/251/266/268/298/316/326/331, 11/23/25/29/37/64/89/157/183/192/194/198/214/226/230/249/251/266/298/316/326/331, 11/23/25/29/37/89/157/183/194/198/214/226/230/249/250/251/266/268/291/298/316/326/331/342, 11/23/25/29/37/75/89/93/157/183/194/198/214/226/230/249/251/266/298/307/316/326/331/342, 11/23/25/29/37/89/157/183/194/198/214/226/230/249/250/251/266/291/298/316/326/331, 11/23/25/29/37/38/64/89/157/183/192/194/198/214/226/230/249/251/266/298/316/326/331, 11/23/25/29/37/38/64/89/157/183/194/198/214/224/226/230/249/251/266/298/316/326/331, 11/23/25/29/37/38/64/86/89/157/183/192/194/198/214/226/230/241/249/251/266/298/316/326/331, 11/23/25/29/37/38/89/157/183/194/198/214/226/230/249/251/266/298/316/326/331//342, 11/23/25/29/37/89/157/183/194/198/214/226/230/248/249/250/251/266/298/307/316/326/331, 11/23/25/29/37/75/77/89/157/183/194/198/214/226/230/249/250/251/266/268/298/307/316/326/331/342, 11/23/25/29/37/89/93/157/183/194/198/214/226/230/249/251/266/268/298/316/326/331, 11/23/25/29/37/89/157/183/192/194/198/214/226/230/249/251/266/298/316/326/331, 11/23/25/29/37/38/89/157/183/192/194/198/214/226/230/249/251/266/298/316/326/331, 11/23/25/29/37/64/89/157/183/194/198/214/226/230/249/251/266/298/316/326/331, wherein the amino acid positions are relative to the reference sequence corresponding to residues 12 to 346 of SEQ ID NO: 2, or relative to the reference sequence corresponding to SEQ ID NO: 2.

[0222] In some embodiments, the amino acid sequence of the engineered RNA ligase comprises at least a substitution set or amino acid residue 11N/23T/25A/29S/37L/38A/65C/89M/157V/183L/192E/194V/198M/214L/226R/230V/249L/251S/266L/298 S/316L/326L/331G, 11N/23T/25A/29S/37L/38T/65C/89M/157V/183L/194V/198M/214L/226R/230V/249L/251S/266L/298S/316 L/326L/331G, 11N/23T/25A/29S/37L/38A/65C/89M/157V/183L/194V/198M/214L/224R/226R/230V/249L/251S/266L/298 S/316L/326L/331G, 11N/23T/25A/29S/37L/38A/64Q/89M/157V/183L/194V/198M/214L/226R/230V/249L/251S/266L/298S/316 L/326L/331G, 11N/23T/25A/29S/37L/89M/93K/157V/183L/194V/198M/214L/226R/230V/249L/251S/266L/298S/307R/316L/326L/331G, 11N/23T/25A/29S/37L/38A/89M/157V/183L/194V/198M/214L/226R/230V/249L/251S/266L/298S/316L/326L/331G, 11N/23T/25A/29S/37L/38A/89M/157V/183L/194V/198M/214L/224A/226R/230V/249L/251S/266L/298S/316L/326L/331G, 11N/23T/25A/29S/37L/38A/89M/157V/183L/192E/194V/198M/214L/224R/226R/230V/249L/251S/266L/298S/316L/326L/331G, 11N/23T/25A/29S/37L/65C/89M/157V/183L/194V/198M/214L/226R/230V/249L/251S/266L/298S/316L/326L/331G, 11N/23T/25A/29S/37L/38A/89M/157V/183L/192E/194V/198M/214L/224A/226R/230V/249L/251S/266L/298S/316L/326L/331G, 11N/23T/25A/29S/37L/89M/157V/183L/192E/194V/198M/214L/224A/226R/230V/249L/251S/266L/298S/316L/326L/331G, 11N/23T/25A/29S/37L/75D/89M/157V/183L/194V/198M/214L/226R/230V/249L/251S/266L/298S/307R/31 6L/326L/331G, 11N/23T/25A/29S/37L/75D/89M/157V/183L/194V/198M/214L/226R/230V/249L/250I/251S/266L/268G/298S/307R/316L/326L/331G, 11N/23T/25A/29S/37L/89M/157V/183L/194V/198M/214L/226R/230V/249L/250I/251S/266L/268G/298S/307R/316L/326L/331G/342T, 11N/23T/25A/29S/37L/89M/157V/183L/194V/198M/214L/224R/226R/230V/249L/251S/266L/298S/316L/326L/331G, 11N/23T/25A/29S/37L/65C/89M/157V/183L/192E/194V/198M/214L/226R/230V/249L/251S/266L/298S/316L/326L/331G, 11N/23T/25A/29S/37L/89M/157V/183L/194V/198M/214L/226R/230V/249L/251S/266L/268G/298S/316L/326L/331G, 11N/23T/25A/29S/37L/64Q/89M/157V/183L/192E/194V/198M/214L/226R/230V/249L/251S/266L/298S/316L/326L/331G, 11N/23T/25A/29S/37L/89M/157V/183L/194V/198M/214L/226R/230V/249L/2501/251S/266L/268G/291T/298S/316L/326L/331G/342T, 11N/23T/25A/29S/37L/75D/89M/93K/157V/183L/194V/198M/214L/226R/230V/249K/251S/266L/298S/307R/316L/326L/331G/342T, 11N/23T/25A/29S/37L/89M/157V/183L/194V/198M/214L/226R/230V/249L/250I/251S/266L/291T/298S/316L/326L/331G, 11N/23T/25A/29S/37L/38A/64Q/89M/157V/183L/192E/194V/198M/214L/226R/230V/249L/251S/266L/298 S/316L/326L/331G, 11N/23T/25A/29S/37L/38A/64Q/89M/157V/183L/194V/198M/214L/224R/226R/230V/249L/251S/266L/298 S/316L/326L/331G, 11N/23T/25A/29S/37L/89M/93K/157V/183L/194V/198M/214L/226R/230V/249K/251S/266L/298S/307R/316L/326L/331G, 11N/23T/25A/29S/37L/38A/64Q/86G/89M/157V/183L/192E/194V/198M/214L/226R/230V/241R/249L/251 S/266L/298S/316L/326L/331G, 11N/23T/25A/29S/37L/38A/89M/157V/183L/194V/198M/214L/226R/230V/249L/251S/266L/298S/316L/326L/331G/342T, 11N/23T/25A/29S/37L/89M/157V/183L/192E/194V/198M/214L/224R/226R/230V/249L/251S/266L/298S/316L/326L/331G, 11N/23T/25A/29S/37L/89M/157V/183L/194V/198M/214L/226R/230V/248G/249L/250I/251S/266L/298S/307R/316L/326L/331G, 11N/23T/25A/29S/37L/75D/77M/89M/157V/183L/194V/198M/214L/226R/230V/249L/250I/251S/266L/268 G/298S/307R/316L/326L/331G/342T, 11N/23T/25A/29S/37L/89M/93K/157V/183L/194V/198M/214L/226R/230V/249L/251S/266L/268G/298S/316L/326L/331G, 11N/23T/25A/29S/37L/89M/157V/183L/192E/194V/198M/214L/226R/230V/249L/251S/266L/298S/316L/326L/331G, 11N/23T/25A/29S/37L/38A/89M/157V/183L/192E/194V/198M/214L/226R/230V/249L/251S/266L/298S/316L/326L/331G, 11N/23T/25A/29S/37L/64Q/89M/157V/183L/194V/198M/214L/226R/230V/249L/251S/266L/298S/316L/326L/331G, wherein the amino acid positions are relative to the reference sequence corresponding to residues 12 to 346 of SEQ ID NO: 2, or relative to the reference sequence corresponding to SEQ ID NO: 2.

[0223] In some embodiments, the amino acid sequence of the engineered RNA ligase comprises at least a substitution set at amino acid positions 11/23/25/29/37/38/75/89/157/183/194/198/214/226/230/248/249/250/251/266/268/298/307/316/326/331, 11/23/25/29/37/38/75/89/157/183/194/198/214/226/230/248/249//250/250/251/266/268/277/298/307/316/326/331, 11/23/25/29/37/75/89/157/183/194/198/214/226/230/248/249/250/251/266/268/298/307/316/326/331, 11/23/25/29/37/38/75/89/93/157/183/192/194/198/214/226/230/248/249/250/251/266/268/298/307/316/326/331, 11/23/25/29/37/38/75/89/157/183/192/194/198/214/226/230/248/249/250/251/266/268/298/307/316/326/331, 11/23/25/29/37/75/89/157/183/194/198/214/226/230/249/250/250/251/266/268/298/307/316/326/331, 11/23/25/29/37/75/89/157/183/194/198/214/226/230/248/249/250/251/266/268/298/307/316/326/331/344, 11/23/25/29/37/75/89/157/183/192/194/198/214/226/230/248/249/250/251/266/268/298/307/316/326/331, 11/23/25/29/37/38/75/89/93/157/183/194/198/214/226/230/249/250/251/266/268/277/298/307/316/326/331, 11/23/25/29/37/38/75/89/157/183/194/198/214/226/230/249/250/251/255/266/268/280/298/307/316/318/326/331, 11/23/25/29/37/38/75/86/89/157/183/194/198/214/226/230//241/249/250/251/255/266/268/280/298/307/316/318/326/331/335, 11/23/25/29/37/38/75/89/157/183/194/198/214/226/230/249/250/251/266/268/298/307/316/326/331, 11/23/25/29/37/75/89/157/183/194/198/214/226/230/249/250/251/255/266/268/298/307/316/326/331, 11/23/25/29/37/75/89/157/183/194/198/214/226/230/249/250/251/266/268/298/307/316/318/326/331, 11/23/25/29/37/38/75/89/101/157/183/194/198/214/226/230/249/250/251/255/266/268/280/298/307/316/326/331, 11/23/25/29/37/3875/89/157/183/194/198/214/226/230/249/250/251/266/268/298/307/316/318/326/331/335, 11/23/25/29/37/38/75/89/157/183/194/198/214/226/230/249/250/251/255/266/268/298/307/316/318/326/331, 11/23/25/29/37/75/89/157/183/192/194/198/214/226/230/249/250/251/266/268/298/307/316/326/331/344, 11/23/25/29/37/38/75/89/157/183/194/198/214/226/230/249/250/251/266/268/298/307/316/326/331/335, 11/23/25/29/37/75/89/157/183/194/198/214/226/230/249/250/251/266/268/298/307/316/318/326/331/335, 11/23/25/29/37/38/75/89/157/183/194/198/214/226/230/249/250/251/266/268/277/298/307/316/326/331, 11/23/25/29/37/38/75/89/93/157/183/194/198/214/226/230/249/250/251/266/268/298/307/316/326/331, 11/23/25/29/37/75/89/157/183/192/194/198/214/226/230/249/250/251/266/268/298/307/316/326/331, 11/23/25/29/37/38/64/75/89/157/183/194/198/214/226/230/249/250/251/266/268/298/307/316/318/326/331, 11/23/25/29/37/38/64/75/89/157/183/194/198/214/226/230/241/249/250/251/255/266/268/298/307/316/318/326/331, 11/23/25/29/37/75/89/157/183/194/198/214/226/230/249/250/251/266/268/298/307/316/326/331, 11/23/25/29/37/64/75/89/101/157/183/194/198/214/226/230/249/250/251/255/266/268/280/298/307/316/318/326/331, 11/23/25/29/37/38/75/89/101/157/183/194/198/214/226/230/249/250/251/255/266/268/280/298/307/316/318/326/331/335, 11/23/25/29/37/64/75/89/157/183/194/198/214/226/230/249/250/251/266/268/298/307/316/318/326/331, 11/23/25/29/37/38/64/75/89/157/183/194/198/214/226/230/249/250/251/255/266/268/298/307/316//318/326/331, 11/23/25/29/37/75/89/157/183/194/198/214/226/230/241/249/250/251/255/266/268/280/298/307/316/318/326/331, 11/23/25/29/37/38/75/86/89/101/157/183/194/198/214/226/230/241/249/250/251/266/268/298/307/316/318/326/331, 11/23/25/29/37/38/75/89/157/183/194/198/214/226/230/241/249/250/251/266/268/298/307/316/326/331, 11/23/25/29/37/38/75/89/157/183/194/198/214/226/230/249/250/251/255/266/268/298/307/316/318/326/331/335, 11/23/25/29/37/38/64/75/89/101/157/183/194/198/214/226/230/249/250/251/266/268/298/307/316/318/326/331, 11/23/25/29/37/38/75/64/89/157/183/194/198/214/226/230/249/250/251/255/266/268/280/298/307/316/318/326/331, 11/23/25/29/37/75/89/157/183/194/198/214/226/230/241/249/250/251/255/266/268/298/307/316//318/326/331. 11/23/25/29/37/38/75/89/157/183/194/198/214/226/230/241/249/250/251/266/268/298/307/316/326/331/335, wherein the amino acid positions are relative to the reference sequence corresponding to residues 12 to 346 of SEQ ID NO: 2, or relative to the reference sequence corresponding to SEQ ID NO: 2.

[0224] In some embodiments, the amino acid sequence of the engineered RNA ligase comprises at least a substitution set or amino acid residue 11N/23T/25A/29S/37L/38S/75D/89M/157V/183L/194V/198M/214L/226R/230V/248F/249L/250I/251E/266L/268G/298S/307R/316L/326L/331G, 11N/23T/25A/29S/37L/38S/75D/89M/157V/183L/194V/198M/214L/226R/230V/248F/249L//250E/250I/251 E/266L/268G/277A/298S/307R/316L/326L/331G, 11N/23T/25A/29S/37L/75D/89M/157V/183L/194V/198M/214L/226R/230V/248F/249L/250E/251E/266L/268G/298S/307R/316L/326L/331G, 11N/23T/25A/29S/37L/38S/75D/89M/93K/157V/183L/192E/194V/198M/214L/226R/230V/248F/249L/250I/251E/266L/268G/298S/307R/316L/326L/331G, 11N/23T/25A/29S/37L/38S/75D/89M/157V/183L/192E/194V/198M/214L/226R/230V/248F/249L/250I/251E/266L/268G/298S/307R/316L/326L/331G, 11N/23T/25A/29S/37L/75D/89M/157V/183L/194V/198M/214L/226R/230V/249L/250E/250I/251E/266L/268 G/298S/307R/316L/326L/331G, 11N/23T/25A/29S/37L/38S/75D/89M/157V/183L/194V/198M/214L/226R/230V/248F/249L/250E/251E/266 L/268G/298S/307R/316L/326L/331G, 11N/23T/25A/29S/37L/75D/89M/157V/183L/194V/198M/214L/226R/230V/248F/249L/250I/251E/266L/268 G/298S/307R/316L/326L/331G/344K, 11N/23T/25A/29S/37L/75D/89M/157V/183L/192E/194V/198M/214L/226R/230V/248F/249L/250E/251R/266L/268G/298S/307R/316L/326L/331G, 11N/23T/25A/29S/37L/38S/75D/89M/157V/183L/194V/198M/214L/226R/230V/248F/249L/250E/251S/266 L/268G/298S/307R/316L/326L/331G, 11N/23T/25A/29S/37L/38S/75D/89M/93K/157V/183L/194V/198M/214L/226R/230V/249L/250E/251E/266L/268G/277A/298S/307R/316L/326L/331G, 11N/23T/25A/29S/37L/38A/75D/89M/157V/183L/194V/198M/214L/226R/230V/249L/250I/251S/255V/266 L/268G/280N/298S/307R/316L/318S/326L/331G, 11N/23T/25A/29S/37L/75D/89M/157V/183L/194V/198M/214L/226R/230V/248F/249L/250I/251S/266L/268 G/298S/307R/316L/326L/331G, 11N/23T/25A/29S/37L/38A/75D/86D/89M/157V/183L/194V/198M/214L/226R/230V/241G/249L/250I/251S/255V/266L/268G/280N/298S/307R/316L/318S/326L/331G/335Q, 11N/23T/25A/29S/37L/38A/75D/89M/157V/183L/194V/198M/214L/226R/230V/249L/250I/251S/266L/268 G/298S/307R/316L/326L/331G, 11N/23T/25A/29S/37L/75D/89M/157V/183L/194V/198M/214L/226R/230V/249L/250I/251S/255S/266L/268 G/298S/307R/316L/326L/331G, 11N/23T/25A/29S/37L/75D/89M/157V/183L/194V/198M/214L/226R/230V/249L/250I/251S/266L/268G/298S/307R/316L/318S/326L/331G, 11N/23T/25A/29S/37L/38A/75D/89M/101P/157V/183L/194V/198M/214L/226R/230V/249L/250I/251S/255 S/266L/268G/280N/298S/307R/316L/326L/331G, 11N/23T/25A/29S/37L/38A/75D/89M/157V/183L/194V/198M/214L/226R/230V/249L/2501/251S/266L/268 G/298S/307R/316L/318S/326L/331G/335Q, 11N/23T/25A/29S/37L/38A/75D/89M/157V/183L/194V/198M/214L/226R/230V/249L/250I/251S/255V/266 L/268G/298S/307R/316L/318S/326L/331G, 11N/23T/25A/29S/37L/75D/89M/157V/183L/192E/194V/198M/214L/226R/230V/249L/250E/251E/266L/268G/298S/307R/316L/326L/331G/344K, 11N/23T/25A/29S/37L/38A/75D/89M/157V/183L/194V/198M/214L/226R/230V/249L/250I/251S/266L/268 G/298S/307R/316L/326L/331G/335Q, 11N/23T/25A/29S/37L/75D/89M/157V/183L/194V/198M/214L/226R/230V/249L/2501/251S/266L/268G/298S/307R/316L/318S/326L/331G/335Q, 11N/23T/25A/29S/37L/38S/75D/89M/157V/183L/194V/198M/214L/226R/230V/249L/250I/251S/266L/268 G/277A/298S/307R/316L/326L/331G, 11N/23T/25A/29S/37L/38S/75D/89M/93K/157V/183L/194V/198M/214L/226R/230V/249L/250I/251E/266L/268G/298S/307R/316L/326L/331G, 11N/23T/25A/29S/37L/75D/89M/157V/183L/192E/194V/198M/214L/226R/230V/249L/250I/251E/266L/268 G/298S/307R/316L/326L/331G, 11N/23T/25A/29S/37L/75D/89M/157V/183L/194V/198M/214L/226R/230V/249L/250I/251S/255S/266L/268 G/298S/307R/316L/326L/331G, 11N/23T/25A/29S/37L/38A/64Q/75D/89M/157V/183L/194V/198M/214L/226R/230V/249L/2501/251S/266L/268G/298S/307R/316L/318S/326L/331G, 11N/23T/25A/29S/37L/75D/89M/157V/183L/194V/198M/214L/226R/230V/248I/249L/250I/251S/266L/268 G/298S/307R/316L/326L/331G, 11N/23T/25A/29S/37L/38A/64Q/75D/89M/157V/183L/194V/198M/214L/226R/230V/241G/249L/2501/251S/255V/266L/268G/298S/307R/316L/318S/326L/331G, 11N/23T/25A/29S/37L/75D/89M/157V/183L/194V/198M/214L/226R/230V/249L/250I/251E/266L/268G/298S/307R/316L/326L/331G, 11N/23T/25A/29S/37L/64Q/75D/89M/101P/157V/183L/194V/198M/214L/226R/230V/249L/250I/251S/255 V/266L/268G/280N/298S/307R/316L/318S/326L/331G, 11N/23T/25A/29S/37L/38A/75D/89M/101P/157V/183L/194V/198M/214L/226R/230V/249L/250I/251S/255 V/266L/268G/280N/298S/307R/316L/318S/326L/331G/335Q, 11N/23T/25A/29S/37L/75D/89M/157V/183L/194V/198M/214L/226R/230V/249L/250I/251S/266L/268G/298S/307R/316L/326L331G, 11N/23T/25A/29S/37L/38S/75D/89M/157V/183L/194V/198M/214L/226R/230V/249L/250I/251R/266L/268 G/277A/298S/307R/316L/326L/331G, 11N/23T/25A/29S/37L/64Q/75D/89M/157V/183L/194V/198M/214L/226R/230V/249L/250I/251S/266L/268 G/298S/307R/316L/318S/326L/331G, 11N/23T/25A/29S/37L/38A/64Q/75D/89M/157V/183L/194V/198M/214L/226R/230V/249L/250I/251S/255V/266L/268G/298S/307R/316L/318S/326L/331G, 11N/23T/25A/29S/37L/75D/89M/157V/183L/194V/198M/214L/226R/230V/241G/249L/250I/251S/255S/266 L/268G/280N/298S/307R/316L/318S/326L/331G, 11N/23T/25A/29S/37L/75D/89M/157V/183L/194V/198M/214L/226R/230V/249L/2501/251S/255V/266L/268G/298S/307R/316L/326L/331G, 11N/23T/25A/29S/37L/38A/75D/86D/89M/101P/157V/183L/194V/198M/214L/226R/230V/241G/249L/250I/251S/266L/268G/298S/307R/316L/318S/326L/331G, 11N/23T/25A/29S/37L/38A/75D/89M/157V/183L/194V/198M/214L/226R/230V/241G/249L/250I/251S/266 L/268G/298S/307R/316L/326L/331G, 11N/23T/25A/29S/37L/38A/75D/89M/157V/183L/194V/198M/214L/226R/230V/249L/250I/251S/255S/266 L/268G/298S/307R/316L/318S/326L/331G/335Q, 11N/23T/25A/29S/37L/38A/64Q/75D/89M/101P/157V/183L/194V/198M/214L/226R/230V/249L/250I/251S/266L/268G/298S/307R/316L/318S/326L/331G, 11N/23T/25A/29S/37L/38A/75D/64Q/89M/157V/183L/194V/198M/214L/226R/230V/249L/250I/251S/255V/266L/268G/280N/298S/307R/316L/318S/326L/331G, 11N/23T/25A/29S/37L/75D/89M/157V/183L/194V/198M/214L/226R/230V/241G/249L/250I/251S/255S/266 L/268G/298S/307R/316L//318S/326L/331G, 11N/23T/25A/29S/37L/38A/75D/89M/157V/183L/194V/198M/214L/226R/230V/241G/249L/250I/251S/266 L/268G/298S/307R/316L/326L/331G/335Q, wherein the amino acid positions are relative to the reference sequence corresponding to residues 12 to 346 of SEQ ID NO: 2, or relative to the reference sequence corresponding to SEQ ID NO: 2.

[0225] In some embodiments, the amino acid sequence of the engineered RNA ligase comprises at least a substitution at an amino acid position provided in Tables 5.1, 6.1, 6.2, 7.1, 8.1, 8.2, 9.1, 10.1, 11.1, 12.1, 13.1, 14.1, 15.1, 16.1, 17.1, 18.1, 19.1, 20.1, 21.1, 22.1, 23.1, 24.1, 25.1, and 26.1, wherein the amino acid positions are relative to the reference sequence corresponding to residues 12 to 346 of SEQ ID NO: 2, or relative to the reference sequence corresponding to SEQ ID NO: 2.

[0226] In some embodiments, the amino acid sequence of the engineered RNA ligase comprises at least one substitution provided in Tables 5.1, 6.1, 6.2, 7.1, 8.1, 8.2, 9.1, 10.1, 11.1, 12.1, 13.1, 14.1, 15.1, 16.1, 17.1, 18.1, 19.1, 20.1, 21.1, 22.1, 23.1, 24.1, 25.1, and 26.1, wherein the amino acid positions are relative to the reference sequence corresponding to residues 12 to 346 of SEQ ID NO: 2, or relative to the reference sequence corresponding to SEQ ID NO: 2.

[0227] In some embodiments, the amino acid sequence of the engineered RNA ligase comprises at least a substitution or substitution set at the amino acid position(s) provided in Tables 5.1, 6.1, 6.2, 7.1, 8.1, 8.2, 9.1, 10.1, 11.1, 12.1, 13.1, 14.1, 15.1, 16.1, 17.1, 18.1, 19.1, 20.1, 21.1, 22.1, 23.1, 24.1, 25.1, and 26.1, wherein the amino acid positions are relative to the reference sequence corresponding to residues 12 to 346 of SEQ ID NO: 2, or relative to the reference sequence corresponding to SEQ ID NO: 2.

[0228] In some embodiments, the amino acid sequence of the engineered RNA ligase comprises at least a substitution or substitution set of an RNA ligase variant provided in Tables 5.1, 6.1, 6.2, 7.1, 8.1, 8.2, 9.1, 10.1, 11.1, 12.1, 13.1, 14.1, 15.1, 16.1, 17.1, 18.1, 19.1, 20.1, 21.1, 22.1, 23.1, 24.1, 25.1, and 26.1, wherein the amino acid positions are relative to the reference sequence corresponding to residues 12 to 346 of SEQ ID NO: 2, or relative to the reference sequence corresponding to SEQ ID NO: 2.

[0229] In some embodiments, the engineered RNA ligase comprises an amino acid sequence having at least 70%, 75%, 80%, 81%, 82%, 83%, 84%, 85%, 86%, 87%, 88%, 89%, 90%, 91%, 92%, 93%, 94%, 95%, 96%, 97%, 98%, 99%, or more sequence identity to a reference sequence comprising a substitution or substitution set of an RNA ligase variant provided in Tables 5.1, 6.1, 6.2, 7.1, 8.1, 8.2, 9.1, 10.1, 11.1, 12.1, 13.1, 14.1, 15.1, 16.1, 17.1, 18.1, 19.1, 20.1, 21.1, 22.1, 23.1, 24.1, 25.1, and 26.1, wherein the amino acid positions are relative to the reference sequence corresponding to residues 12 to 346 of SEQ ID NO: 2, or relative to the reference sequence corresponding to SEQ ID NO: 2.

[0230] In some embodiments, the engineered RNA ligase comprises an amino acid sequence having at least 70%, 75%, 80%, 81%, 82%, 83%, 84%, 85%, 86%, 87%, 88%, 89%, 90%, 91%, 92%, 93%, 94%, 95%, 96%, 97%, 98%, 99%, or more sequence identity to the reference sequence corresponding to residues 12 to 346 of SEQ ID NO: 54, 244, 648, 862, 956, 1088, 1416, 1612, 1840, 1866, 1954, 2062, 2674, 2754, or 2786, or to the reference sequence corresponding to SEQ ID NO: 54, 244, 648, 862, 956, 1088, 1416, 1612, 1840, 1866, 1954, 2062, 2674, 2754, or 2786.

[0231] In some embodiments, the engineered RNA ligase comprises an amino acid sequence having at least 70%, 75%, 80%, 81%, 82%, 83%, 84%, 85%, 86%, 87%, 88%, 89%, 90%, 91%, 92%, 93%, 94%, 95%, 96%, 97%, 98%, 99%, or more sequence identity to the reference sequence corresponding to residues 12 to 346 of an even-numbered SEQ ID NO. of SEQ ID NOs: 4-1470 and 1478-3058, or to the reference sequence corresponding to an even-numbered SEQ ID NO. of SEQ ID NOs: 4-1470 and 1478-3058.

[0232] In some embodiments, the engineered RNA ligase comprises an amino acid sequence having at least 70%, 75%, 80%, 81%, 82%, 83%, 84%, 85%, 86%, 87%, 88%, 89%, 90%, 91%, 92%, 93%, 94%, 95%, 96%, 97%, 98%, 99%, or more sequence identity to the reference sequence corresponding to residues 12 to 346 of SEQ ID NO: 54, 244, 648, 862, 956, 1088, 1416, 1612, 1840, 1866, 1954, 2062, 2674, 2754, or 2786, or to the reference sequence corresponding to SEQ ID NO: 54, 244, 648, 862, 956, 1088, 1416, 1612, 1840, 1866, 1954, 2062, 2674, 2754, or 2786, wherein the amino acid sequence comprises one or more substitutions relative to the reference sequence corresponding to residues 12 to 346 of SEQ ID NO: 54, 244, 648, 862, 956, 1088, 1416, 1612, 1840, 1866, 1954, 2062, 2674, 2754, or 2786, or relative to the reference sequence corresponding to SEQ ID NO: 54, 244, 648, 862, 956, 1088, 1416, 1612, 1840, 1866, 1954, 2062, 2674, 2754, or 2786.

[0233] In some embodiments, the engineered RNA ligase comprises an amino acid sequence having at least 70%, 75%, 80%, 81%, 82%, 83%, 84%, 85%, 86%, 87%, 88%, 89%, 90%, 91%, 92%, 93%, 94%, 95%, 96%, 97%, 98%, 99%, or more sequence identity to the reference sequence corresponding to residues 12 to 346 of an even-numbered SEQ ID NO. of SEQ ID NOs: 4-1470 and 1478-3058, or to the reference sequence corresponding to an even-numbered SEQ ID NO. of SEQ ID NOs: 4-1470 and 1478-3058, wherein the amino acid sequence comprises one or more substitutions relative to the reference sequence corresponding to residues 12 to 346 of SEQ ID NO: 54, 244, 648, 862, 956, 1088, 1416, 1612, 1840, 1866, 1954, 2062, 2674, 2754, or 2786, or relative to the reference sequence corresponding to SEQ ID NO: 54, 244, 648, 862, 956, 1088, 1416, 1612, 1840, 1866, 1954, 2062, 2674, 2754, or 2786.

[0234] In some embodiments, the amino acid sequence of the engineered RNA ligase comprises at least a substitution at amino acid position 10, 11, 12, 13, 15, 17, 18, 21, 23, 25, 26, 28, 29, 30, 32, 33, 37, 38, 39, 40, 41, 42, 45, 52, 54, 56, 57, 58, 60, 61, 62, 64, 65, 67, 71, 73, 74, 75, 77, 80, 81, 83, 84, 86, 87, 89, 90, 91, 93, 95, 97, 99, 100, 101, 102, 103, 104, 105, 106, 107, 109, 113, 114, 116, 117, 119, 121, 122, 123, 125, 126, 127, 128, 129, 131, 135, 137, 140, 141, 143, 144, 148, 150, 154, 156, 157, 158, 159, 160, 161, 162, 165, 169, 170, 171, 173, 175, 177, 178, 179, 181, 183, 184, 185, 190, 191, 192, 193, 194, 197, 198, 204, 206, 208, 210, 212, 213, 214, 215, 218, 223, 224, 226, 228, 229, 230, 232, 236, 238, 241, 243, 247, 248, 249, 250, 251, 252, 253, 254, 255, 256, 257, 258, 260, 261, 264, 265, 266, 267, 268, 270, 271, 272, 274, 276, 277, 280, 282, 283, 286, 288, 289, 290, 291, 292, 294, 295, 296, 297, 298, 299, 300, 301, 302, 305, 306, 307, 310, 311, 315, 316, 317, 318, 323, 324, 325, 326, 327, 330, 331, 332, 334, 335, 336, 337, 338, 341, 342, 344, 345, or 346, or any combinations thereof, wherein the amino acid positions are relative to the reference sequence corresponding to residues 12 to 346 of SEQ ID NO: 54, 244, 648, 862, 956, 1088, 1416, 1612, 1840, 1866, 1954, 2062, 2674, 2754, or 2786, or relative to the reference sequence corresponding to SEQ ID NO: 54, 244, 648, 862, 956, 1088, 1416, 1612, 1840, 1866, 1954, 2062, 2674, 2754, or 2786.

[0235] In some embodiments, the amino acid sequence of the engineered RNA ligase comprises at least a substitution or an amino acid residue 10F, 11G/N, 12A/F/L/M/P/R/T/V, 13W, 15M, 17P, 18A/H, 21S, 23K/T, 25A/D/F/G/L/M/S/T, 26L, 28A/L/M/V, 29D/S, 30A/L/T/V/W, 32E, 33A/I/L/T/V, 37A/F/K/L/M/R, 38A/E/L/R/S/T/V, 39P, 40D/I/P/S, 41E/I, 42T, 45S, 52C, 54L, 56I/L, 57V, 58M, 60A/C/D/R/S/V, 61A, 62A/V, 64A/Q/W, 65C, 67R, 71T, 73Q/W, 74D, 75A/D, 77M, 80E, 81Y, 83A/E/G/L/T/V, 84V, 86D/G/L, 87E, 89C/D/E/G/L/M/N/Q/R/S/T/V/W/Y, 90E/F, 91A/E/V, 93K/V, 95A/C/G/I, 97A/E, 99I, 100A/G/H/L/R/S/T/V, 101P/V/W, 102T, 103G/V, 104T, 105K/L/R, 106G/L/M/Q/R/V/W, 107M/S, 109F/L, 113L/M, 114E, 116L, 117A/Q, 119L, 121N, 122C/F/G/L/Q/T/W, 123K/R, 125K/T, 126M, 127P, 128E, 129L/W, 131T, 135A/H/M/Q/V, 137N/R, 140I, 141D/G, 143A/C/E/F/H/M/S/T/V, 144L, 148F, 150D/L, 154S/V, 156G/H/Q/S, 157F/L/Q/V, 158R/S, 159F, 160R, 161M/V, 162C, 165M, 169G/N, 170H/Y, 171S, 173M, 175A, 177K, 178V, 179E, 181E/N/P/R/S, 183L/V, 184L, 185C/F/G/K/M/P/S/T/V, 190I/M, 191C, 192D/E/F/L/N, 193K/Q, 194A/G/V, 197W, 198M, 204W, 206L, 208H/I/K/L/P/T, 210G/V, 212E/G/I/K/L, 213D/N/R/T, 214A/C/H/K/L/Q/Y, 215G/T, 218F, 223C, 224A/Q/R, 226R, 228D/L, 229W, 230T/V, 232G/M/N/R/S, 236L/V, 238K/S/V, 241E/G/Q/R, 243H, 247I/L/R/S, 248F/G/I/K/T, 249K/L/R/S, 250E/I/S, 251C/E/F/G/L/R/S/T/Y, 252A/Q, 253L/W, 254E/L/N/Q/S/V, 255N/S/V/Y, 256A/E/G/M/S/W, 257D/E/G, 258D/M/P/V, 260G, 261D/P/T, 264A/E/G/S/V, 265A/F, 266C/I/L, 267I/M, 268F/G/M, 270L/M/V, 271A/E/G/T, 272M/S, 274A, 276A/G/M/V, 277A, 280L/N/W, 282A/M, 283C/V, 286D/E/F/M/V, 288E/L/R/W, 289A/D/E/I/P/T, 290D/H/N/P, 291H/L/Q/R/S/T/W, 292N/S, 294A/S/V/Y, 295C/F/K/L/M/P/Q/R/S/T/V/Y, 296E/G/L/Q/W, 297A/I/L, 298C/I/K/R/S/V, 299E/I/K/Q/R/T/V, 300A, 301A/F/I/L/M/V, 302A/C/I/L/S, 305V, 306G/L/T, 307K/R, 310H/L/M/N/Q/R/S/T, 311C, 315E/S, 316I/L/Y, 317E/F/G/Q/V/W, 318A/E/G/S, 323E/G, 324D/G/M, 325L, 326C/L, 327E/G/M/S, 330A/D/E/G/K/R, 331D/G/R/S/W, 332E/H/W, 334E/R, 335H/Q, 336I/L/M, 337A/V, 338G/L/M, 341A, 342R/S/T, 344K, 345Q/S, or 346S, or any combinations thereof, wherein the amino acid positions are relative to the reference sequence corresponding to residues 12 to 346 of SEQ ID NO: 54, 244, 648, 862, 956, 1088, 1416, 1612, 1840, 1866, 1954, 2062, 2674, 2754, or 2786, or relative to the reference sequence corresponding to SEQ ID NO: 54, 244, 648, 862, 956, 1088, 1416, 1612, 1840, 1866, 1954, 2062, 2674, 2754, or 2786.

[0236] In some embodiments, the amino acid sequence of the engineered RNA ligase comprises at least a substitution at amino acid position 10, 11, 12, 13, 17, 21, 23, 25, 26, 28, 29, 30, 32, 37, 38, 40, 41, 42, 45, 52, 54, 56, 57, 58, 60, 61, 62, 64, 65, 67, 71, 73, 74, 75, 77, 80, 83, 84, 87, 90, 91, 93, 97, 99, 100, 101, 102, 103, 104, 105, 106, 107, 109, 113, 114, 121, 122, 123, 125, 126, 127, 128, 129, 131, 135, 137, 140, 141, 143, 148, 150, 157, 158, 160, 161, 162, 165, 169, 170, 173, 178, 179, 184, 190, 191, 192, 193, 194, 197, 198, 204, 206, 208, 210, 213, 215, 218, 223, 228, 229, 232, 236, 238, 241, 243, 248, 249, 250, 251, 252, 253, 254, 255, 258, 261, 264, 265, 267, 268, 270, 271, 272, 274, 276, 277, 282, 286, 289, 290, 292, 294, 295, 297, 298, 299, 300, 301, 302, 305, 311, 318, 323, 324, 325, 327, 332, 336, 338, 341, 344, or 346; a substitution or amino acid residue 18A/H, 33A/I/T/V, 39P, 86D/L, 89C/D/E/L/N/Q/R/S/T/V/Y, 95A/C/G/I, 116L, 117A/Q, 119L, 144L, 154S/V, 156G/H/S, 171S, 175A, 177K, 181E/N/P/R/S, 183L, 212E/G/K/L, 224A/Q/R, 226R, 230T/V, 247I/L/R/S, 256E/G/M/S/W, 257D/E/G, 260G, 280L/W, 283C/V, 288L/R/W, 291S, 296E/G/L/Q/W, 306G/T, 307K/R, 310H/L/M/N/Q/R/S/T, 315E, 316I/Y, 317E/F/G/Q/V/W, 326C/L, 330A/D/E/G/K, 331D/G/S, 334E, 335Q, 337A/V, 338G/L/M, 342R/S/T, or 345Q/S; or any combinations thereof, wherein the amino acid positions are relative to the reference sequence corresponding to residues 12 to 346 of SEQ ID NO: 54, 244, 648, 862, 956, 1088, 1416, 1612, 1840, 1866, 1954, 2062, 2674, 2754, or 2786, or relative to the reference sequence corresponding to SEQ ID NO: 54, 244, 648, 862, 956, 1088, 1416, 1612, 1840, 1866, 1954, 2062, 2674, 2754, or 2786.

[0237] In some embodiments, the amino acid sequence of the engineered RNA ligase comprises at least a substitution or amino acid residue 10F, 11G/N, 12A/F/L/M/P/R/T/V, 13W, 17P, 18A/H, 21S, 23K/T, 25A/D/F/G/L/M/S/T, 26L, 28A/L/M/V, 29D/S, 30A/L/T/V/W, 32E, 33A/I/T/V, 37A/F/K/L/M/R, 38A/E/L/R/S/T/V, 39P, 40D/I/P/S, 41E/I, 42T, 45S, 52C, 54L, 56I/L, 57V, 58M, 60A/C/D/R/S/V, 61A, 62A/V, 64A/Q/W, 65C, 67R, 71T, 73Q/W, 74D, 75A/D, 77M, 80E, 83A/E/G/L/T/V, 84V, 86D/L, 87E, 89C/D/E/L/N/Q/R/S/T/V/Y,90E/F,91A/E/V, 93K/V, 95A/C/G/I, 97A/E, 991, 100A/G/H/L/R/S/T/V, 101P/V/W, 102T, 103G/V, 104T, 105K/L/R, 106G/L/M/Q/R/V/W, 107M/S, 109F/L, 113L/M, 114E, 116L, 117A/Q, 119L, 121N, 122C/F/G/L/Q/T/W, 123K/R, 125K/T, 126M, 127P, 128E, 129L/W, 131T, 135A/H/M/Q/V, 137N/R, 140I, 141D/G, 143A/C/E/F/H/M/S/T/V, 144L, 148F, 150D/L, 154S/V, 156G/H/S, 157F/L/Q/V, 158R/S, 160R, 161M/V, 162C, 165M, 169G/N, 170H/Y, 171S, 173M, 175A, 177K, 178V, 179E, 181E/N/P/R/S, 183L, 184L, 185C/F/M/P/S/T/V, 190I/M, 191C, 192D/E/F/L/N, 193K/Q, 194A/G/V, 197W, 198M, 204W, 206L, 208H/I/K/L/P/T, 210G/V, 212E/G/K/L, 213D/N/R/T, 214A/C/H/K/Q/Y, 215G/T, 218F, 223C, 224A/Q/R, 226R, 228D/L, 229W, 230T/V, 232G/M/N/R/S, 236L/V, 238K/S/V, 241E/G/Q/R, 243H, 247I/L/R/S, 248F/G/I/K/T, 249K/L/R/S, 250E/I/S, 251C/E/F/G/L/R/S/T/Y, 252A/Q, 253L/W, 254E/K/L/N/Q/S/V,255N/S/V/Y, 256E/G/M/S/W, 257D/E/G, 258D/M/P/V, 260G, 261D/P/T, 264A/E/G/S/V, 265A/F, 266C/I, 267I/M, 268F/G/M, 270L/M/V, 271A/E/G/T, 272M/S, 274A, 276A/G/M/V, 277A, 280L/W, 282A/M, 283C/V, 286D/E/F/M/V, 288L/R/W, 289A/D/E/I/P/T, 290D/H/N/P, 291H/L/Q/R/S/T/W, 291S, 292N/S, 294A/S/V/Y, 295C/F/K/L/M/P/Q/R/S/T/V/Y, 295G, 296E/G/L/Q/W, 297A/I/L, 298I/S, 298C/K/R/V, 299E/I/K/Q/R/T/V, 300A, 301A/F/I/L/M/V, 302A/C/I/L/S, 305V, 306G/T, 307K/R, 310H/L/M/N/Q/R/S/T, 311C, 315E, 316I/Y, 317E/F/G/Q/V/W, 318A/E/G/S, 323E/G, 324D/G/M, 325L, 326C/L, 327E/G/M/S, 330A/D/E/G/K, 331D/G/S, 332E/H/W, 334E, 335Q, 336I/L/M, 337A/V, 338G/L/M, 341A, 342R/S/T, 344K, 345Q/S, 346S, or any combinations thereof, wherein the amino acid positions are relative to the reference sequence corresponding to residues 12 to 346 of SEQ ID NO: 54, 244, 648, 862, 956, 1088, 1416, 1612, 1840, 1866, 1954, 2062, 2674, 2754, or 2786, or relative to the reference sequence corresponding to SEQ ID NO: 54, 244, 648, 862, 956, 1088, 1416, 1612, 1840, 1866, 1954, 2062, 2674, 2754, or 2786.

[0238] In some embodiments, the amino acid sequence of the engineered RNA ligase comprises at least a substitution at amino acid position 11, 12, 23, 25, 29, 37, 38, 75, 86, 89, 93, 101, 122, 143, 157, 183, 192, 194, 198, 212, 214, 230, 241, 248, 249, 250, 251, 254, 266, 268, 280, 291, 295, 298, 307, 316, 318, 326, 330, or 331, or any combinations thereof, wherein the amino acid positions are relative to the reference sequence corresponding to residues 12 to 346 of SEQ ID NO: 54, 244, 648, 862, 956, 1088, 1416, 1612, 1840, 1866, 1954, 2062, 2674, 2754, or 2786, or relative to the reference sequence corresponding to SEQ ID NO: 54, 244, 648, 862, 956, 1088, 1416, 1612, 1840, 1866, 1954, 2062, 2674, 2754, or 2786.

[0239] In some embodiments, the amino acid sequence of the engineered RNA ligase comprises at least a substitution or an amino acid residue 11G/N, 12A/F/L/M/P/R/T/V, 23K/T, 25A/D/F/G/L/M/S/T, 29D/S, 37A/F/K/L/M/R, 38A/E/L/R/S/T/V, 75A/D, 86D/G/L, 89C/D/E/G/L/M/N/Q/R/S/T/V/W/Y, 93K/V, 101P/V/W, 122C/F/G/L/Q/T/W, 143A/C/E/F/H/M/S/T/V, 157F/L/Q/V, 183L/V, 192D/E/F/L/N, 194A/G/V, 198M, 212E/G/I/K/L, 214A/C/H/K/L/Q/Y, 230T/V, 241E/G/Q/R, 248F/G/I/K/T, 249K/L/R/S, 250E/I/S, 251C/E/F/G/L/R/S/T/Y, 254E/L/N/Q/S/V, 266C/I/L, 268F/G/M, 280L/N/W, 291H/L/Q/R/S/T/W, 295C/F/K/L/M/P/Q/R/S/T/V/Y, 298C/I/K/R/S/V, 307K/R, 316I/L/Y, 318A/E/G/S, 326C/L, 330A/D/E/G/K/R, or 331D/G/R/S/W, or any combinations thereof, wherein the amino acid positions are relative to the reference sequence corresponding to residues 12 to 346 of SEQ ID NO: 54, 244, 648, 862, 956, 1088, 1416, 1612, 1840, 1866, 1954, 2062, 2674, 2754, or 2786, or relative to the reference sequence corresponding to SEQ ID NO: 54, 244, 648, 862, 956, 1088, 1416, 1612, 1840, 1866, 1954, 2062, 2674, 2754, or 2786.

[0240] In some embodiments, the amino acid sequence of the engineered RNA ligase comprises at least a substitution or an amino acid residue 11N, 12M/T, 23T, 25A, 29S, 37L, 38A/S, 75D, 86D, 89M, 93K, 101P, 122F, 143S, 157V, 183L, 192D/E, 194V, 198M, 212E, 214L, 226R, 230T/V, 241G, 248F, 249L, 250I, 251E/S, 254K/S, 266L, 268G, 280L, 291Q, 295G/V, 298S/V, 307R, 316L, 318S, 326L, 330A, or 331G, or any combinations thereof, wherein the amino acid positions are relative to the reference sequence corresponding to residues 12 to 346 of SEQ ID NO: 54, 244, 648, 862, 956, 1088, 1416, 1612, 1840, 1866, 1954, 2062, 2674, 2754, or 2786, or relative to the reference sequence corresponding to SEQ ID NO: 54, 244, 648, 862, 956, 1088, 1416, 1612, 1840, 1866, 1954, 2062, 2674, 2754, or 2786.

[0241] In some embodiments, the amino acid sequence of the engineered RNA ligase comprises at least a substitution at amino acid position 11, 12, 23, 25, 29, 37, 38, 75, 93, 101, 122, 143, 157, 192, 194, 198, 241, 248, 249, 250, 251, 254, 268, 295, 298, or 318; a substitution 86D/L, 89C/D/E/L/N/Q/R/S/T/V/Y, 183L, 212E/G/K/L, 214A/C/H/K/L/Q/Y, 226R, 230T/V, 266C/I, 280L/W, 291H/L/Q/R/S/T/W, 307K/R, 326C/L, 330A/D/E/G/K, or 331D/G/S; or any combinations thereof, wherein the amino acid positions are relative to the reference sequence corresponding to residues 12 to 346 of SEQ ID NO: 54, 244, 648, 862, 956, 1088, 1416, 1612, 1840, 1866, 1954, 2062, 2674, 2754, or 2786, or relative to the reference sequence corresponding to SEQ ID NO: 54, 244, 648, 862, 956, 1088, 1416, 1612, 1840, 1866, 1954, 2062, 2674, 2754, or 2786.

[0242] In some embodiments, the amino acid sequence of the engineered RNA ligase comprises at least a substitution or amino acid residue 11G/N, 12A/F/L/M/P/R/T/V, 23K/T, 25A/D/F/G/L/M/S/T, 29D/S, 37A/F/K/L/M/R, 38A/E/L/R/S/T/V, 75A/D, 86D/L, 89C/D/E/L/N/Q/R/S/T/V/Y, 93K/V, 101P/V/W, 122C/F/G/L/Q/T/W, 143A/C/E/F/H/M/S/T/V, 157F/L/Q/V, 183L, 192D/E/F/L/N, 194A/G/V, 198M, 212E/G/K/L, 241E/G/Q/R, 214A/C/H/K/L/Q/Y, 226R, 230T/V, 248F/G/I/K/T, 249K/L/R/S, 250E/I/S, 251C/E/F/G/L/R/S/T/Y, 254E/L/N/Q/S/V, 266C/I, 268F/G/M, 280L/W, 291H/L/Q/R/S/T/W, 295C/F/K/L/M/P/Q/R/S/T/V/Y, 298C/I/K/R/S/V, 299E/I/K/Q/R/T/V, 307K/R, 318A/E/G/S, 326C/L, 330A/D/E/G/K, or 331D/G/S, or any combinations thereof, wherein the amino acid positions are relative to the reference sequence corresponding to residues 12 to 346 of SEQ ID NO: 54, 244, 648, 862, 956, 1088, 1416, 1612, 1840, 1866, 1954, 2062, 2674, 2754, or 2786, or relative to the reference sequence corresponding to SEQ ID NO: 54, 244, 648, 862, 956, 1088, 1416, 1612, 1840, 1866, 1954, 2062, 2674, 2754, or 2786.

[0243] In some embodiments, the amino acid sequence of the engineered RNA ligase comprises at least a substitution or amino acid residue 11N, 12T, 23T, 25A, 29S, 37L, 38A/S, 75D, 86D, 93K, 101P, 122F, 157V, 183L, 192E, 194V, 198M, 212E, 214L, 226R, 230T/V, 241G, 249L, 250I, 251E/S, 254S, 266L, 268G, 280L, 291Q, 295V, 298S/V, 307R, 318S, 326L, 330A, or 331G, or any combinations thereof, wherein the amino acid positions are relative to the reference sequence corresponding to residues 12 to 346 of SEQ ID NO: 54, 244, 648, 862, 956, 1088, 1416, 1612, 1840, 1866, 1954, 2062, 2674, 2754, or 2786, or relative to the reference sequence corresponding to SEQ ID NO: 54, 244, 648, 862, 956, 1088, 1416, 1612, 1840, 1866, 1954, 2062, 2674, 2754, or 2786.

[0244] In some embodiments, the amino acid sequence of the engineered RNA ligase further comprises at least a substitution at amino acid position 2, 14, 15, 63, 69, 81, 85, 95, 138, 142, 149, 159, 171, 186, 195, 202, 266, 275, 283, 285, 303, 314, 333, or 339; a substitution 18I, 33L, 39Q/S, 86G, 89G/H/I/M/W, 116N, 117D, 119T, 144W, 154C, 156A/L/N/Q/T, 175K, 177P, 181D, 183V, 185G/K, 2121, 2141, 224Y, 2261, 230D, 247K, 256A, 257L, 260S, 280G/N, 288E, 291P, 296K, 306L, 307E/Q, 310K, 315S/T, 316L, 317A, 326R, 330M/R, 331L/R/W, 334R, 335D/H, 337L, 342I, or 345V; or any combinations thereof, wherein the amino acid positions are relative to the reference sequence corresponding to residues 12 to 346 of SEQ ID NO: 54, 244, 648, 862, 956, 1088, 1416, 1612, 1840, 1866, 1954, 2062, 2674, 2754, or 2786, or relative to the reference sequence corresponding to SEQ ID NO: 54, 244, 648, 862, 956, 1088, 1416, 1612, 1840, 1866, 1954, 2062, 2674, 2754, or 2786.

[0245] In some embodiments, the amino acid sequence of the engineered RNA ligase further comprises at least a substitution or amino acid residue 2E/G/V, 14K, 15E/L/M/P/Y, 18I, 33L, 39Q/S, 63V, 69D, 81Y, 85L, 86G, 89G/H/I/M/W, 95V, 116N, 117D, 119T, 138R, 142R, 144W, 149R/T, 154C, 156A/L/N/Q/T, 159F, 171E, 175K, 177P, 181D, 183V, 185G/K, 186D/R, 195G, 202Y, 2121, 214I, 224Y, 226I, 230D, 247K, 256A, 257L, 260S, 266L, 275N, 280G/N, 2831, 285K, 288E, 291P, 296K, 303Q, 306L, 307E/Q, 310K, 314W, 315S/T, 316L, 317A, 326R, 330M/R, 331L/R/W, 333V, 334R, 335D/H, 337L, 339P, 342I, or 345V, or any combinations thereof, wherein the amino acid positions are relative to the reference sequence corresponding to residues 12 to 346 of SEQ ID NO: 54, 244, 648, 862, 956, 1088, 1416, 1612, 1840, 1866, 1954, 2062, 2674, 2754, or 2786, or relative to the reference sequence corresponding to SEQ ID NO: 54, 244, 648, 862, 956, 1088, 1416, 1612, 1840, 1866, 1954, 2062, 2674, 2754, or 2786.

[0246] In some embodiments, the engineered RNA ligase comprises an amino acid sequence having at least 70%, 75%, 80%, 81%, 82%, 83%, 84%, 85%, 86%, 87%, 88%, 89%, 90%, 91%, 92%, 93%, 94%, 95%, 96%, 97%, 98%, 99%, or more sequence identity to the reference sequence corresponding to residues 12 to 346 of SEQ ID NO: 54, or to the reference sequence corresponding to SEQ ID NO: 54, wherein the amino acid sequence comprises one or more substitutions relative to the reference sequence corresponding to residues 12 to 346 of SEQ ID NO: 54, or relative to the reference sequence corresponding to SEQ ID NO: 54.

[0247] In some embodiments, the engineered RNA ligase comprises an amino acid sequence having at least 70%, 75%, 80%, 81%, 82%, 83%, 84%, 85%, 86%, 87%, 88%, 89%, 90%, 91%, 92%, 93%, 94%, 95%, 96%, 97%, 98%, 99%, or more sequence identity to the reference sequence corresponding to residues 12 to 346 of an even-numbered SEQ ID NO. of SEQ ID NOs: 220-630, or to the reference sequence corresponding to an even-numbered SEQ ID NO. of SEQ ID NOs: 220-630, wherein the amino acid sequence comprises one or more substitutions relative to the reference sequence corresponding to residues 12 to 346 of SEQ ID NO: 54, or relative to the reference sequence corresponding to SEQ ID NO: 54.

[0248] In some embodiments, the amino acid sequence of the engineered RNA ligases comprises a substitution or substitution set at amino acid positions(s) 156/232/334/335, 12/254/256, 12/230, 12/230/251, 12/230/251/254/256, 12/38/230, 230/251, 12/38/254, 230/256, 254, 230, 12/230/254, 12/38/230/251/256, 12/251, 12/251/254/256, 38, 12/230/256, 12, 12/25/38/230/251, 12/38/102/230/251/256, 12/256, 38/230/256, 256, 12/230/251/256, 230/251/254, 230/254, 251/254, 12/25/230, 38/230, 38/251, 12/38/230/256, 102, 251, 12/25/251/256, 12/102/256, 12/38/230/251/254/256, 12/251/256, 102/230/251/254/256, 12/38/251, 12/230/251/254, 156/248/334/335, 12/25/38, 12/102/230/251/254, 12/38/251/254, 12/251/254, 12/102, 38/230/251/254/256, 12/25/230/251/256, 12/230/311, 12/254, 38/230/251/254, 12/38/251/256, 156/334/335, 257/258/334, 12/25/38/251/256, 334, 12/25/230/254/256, 38/251/256, 12/38/230/251/254, 12/38, 257/258/334/335, 12/38/254/256, 232/248/257/258/334/335, 156/258/334/335, 156/249/334/335, 12/102/230/254, 25, 156/257/258/334/335, 12/102/230, 156/248/257/258/334, 248/249/334/335, 232/257/258/334/335, 334/335, 156/334, 12/38/102/256, 156/257/334/335, 12/140/251/254, 251/254/256, 248/334/335, 156/258/334, 156/248/330/335, 12/38/256, 232/334/335, 156/249/334, 330/334/335, 156/248/334, 156/335, 257/334, 248/334, 232/248/334/335, 12/25/38/230/251/256, 156/248/249/334/335, 330/335, 248/257/334/335, 232/248/334, 156/232/248/334/335, 232/257/330/334, 156/248/291/334/335, 156/232/248/257/258/334, 156/232/249/334/335, 12/25, 156/248/330/334/335, 156/248/249/334, 232/248/330/335, 156/232/330/334/335, 197, 338, 327, 192, 331, 326, 345, 101, 100, 141, 198, 64, 306, 317, 265, 296, 194, 62, 90, 307, 103, 210, 105, or 61, wherein the amino acid positions are relative to the reference sequence corresponding to residues 12 to 346 of SEQ ID NO: 54, or relative to the reference sequence corresponding to SEQ ID NO: 54.

[0249] In some embodiments, the amino acid sequence of the engineered RNA ligases comprises a substitution or substitution set, or amino acid residue(s) 156Q/232G/334R/335H, 12V/254V/256A, 12V/230T, 12L/230T/251T, 12L/230T/251S/254V/256A, 12A/38R/230T, 230T/251S, 12P/38R/254V, 12V/230T/251T, 230T/256A, 254V, 230T, 12T/230T/251S, 12T/230T/254V, 12V/38R/230T/251T/256A, 12L/251S, 12T/251T/254V/256A, 12V/230T/251S, 38R, 12T/230T/256A, 12L, 12V, 12L/25M/38R/230T/251T, 12L/38R/102T/230T/251T/256A, 12L/230T, 12V/256A, 38R/230T/256A, 12V/230T/251S/254V/256A, 256A, 12T/230T/251S/256A, 12T/251T, 230T/251S/254L, 230T/254V, 251S/254L, 12T/25L/230T, 12V/230T/251S/254L/256A, 38R/230T, 12T/251S, 38R/251T, 12V/230T/251S/256A, 12L/230T/251T/254V/256A, 12T/38R/230T/256A, 12L/230T/256A, 102T, 251T, 12V/25M/251T/256A, 12T/102T/256A, 230T/251T, 12T/230T/251S/254L/256A, 12V/38R/230T/251T/254V/256A, 12T/38R/230T, 12L/38R/254V, 12L/251T/256A, 12T/230T, 102T/230T/251S/254V/256A, 230T/251S/254V, 12T/230T/251S/254V/256A, 12T/38R/251S, 12T/230T/251S/254V, 12T/230T/251T, 156Q/248T/334R/335H, 12V/38R/230T, 12T/25M/38R, 12V/102T/230T/251T/254V, 12L/256A, 12T, 230T/251T/254L, 12V/25L/38R, 12T/38R/251S/254V, 12V/251S/254L/256A, 12T/251T/254V, 12T/102T, 12V/38R/251S, 12V/230T/251S/254L, 12T/251T/256A, 38R/230T/251S/254V/256A, 12V/230T/251T/256A, 12L/25M/230T/251S/256A, 12T/230T/311C, 12L/38R/230T/251S/254V/256A, 12L/230T/251T/254L, 12L/254V, 38R/230T/251S/254V, 12L/38R/251S/256A, 12L/38R/251S, 156Q/334R/335H, 12A/230T, 12P/230T, 12T/38R/251T, 257G/258P/334R, 12L/25L/38R/251T/256A, 334R, 12T/25L/230T/254V/256A, 12T/251S/256A, 38R/251T/256A, 12V/251S, 12V/251T/254L, 12V/38R/230T/251T/254V, 12L/38R, 12L/251S/254L/256A, 257G/258P/334R/335H, 12L/38R/254L/256A, 12V/254L, 12T/254L, 12T/38R, 232G/248T/257G/258P/334R/335H, 12L/102T, 156Q/258P/334R/335H, 156Q/249R/334R/335H, 12T/102T/230T/254L, 25M, 12V/254L/256A, 156H/334R/335H, 156Q/257G/258P/334R/335H, 12T/102T/230T, 156Q/248T/257G/258P/334R, 12T/256A, 248T/249R/334R/335H, 232G/257G/258P/334R/335H, 12T/38R/251T/254V, 334R/335H, 156Q/334R, 12V/38R/254V, 251T/254V, 12T/38R/102T/256A, 156Q/257G/334R/335H, 38R/251S/256A, 12T/140I/251S/254L, 251S/254V/256A, 12V/251T, 248T/334R/335H, 12T/254V, 12V/38R, 12V/251T/256A, 156Q/258P/334R, 156Q/248T/330R/335H, 12T/38R/256A, 232G/334R/335H, 156Q/249R/334R, 330R/334R/335H, 156Q/248T/334R, 156Q/335H, 257G/334R, 156H/248T/334R/335H, 248T/334R, 232G/248T/334R/335H, 156H/248T/334R, 156H/334R, 12T/25M/38R/230T/251S/256A, 12V/251S/254V/256A, 156Q/248T/249R/334R/335H, 330R/335H, 248T/257G/334R/335H, 232G/248T/334R, 156Q/232G/248T/334R/335H, 232G/257G/330R/334R, 156Q/248T/291T/334R/335H, 156Q/232G/248T/257G/258P/334R, 12V/38R/251T/254L, 12T/25L/38R, 156Q/232G/249R/334R/335H, 12T/25M, 156Q/248T/330R/334R/335H, 156Q/248T/249R/334R, 156H/232G/248T/334R/335H, 232G/248T/330R/335H, 156Q/232G/330R/334R/335H, 197W, 338L, 327S, 192F, 331S, 326C, 338G, 345S, 327G, 101V, 100V, 331G, 141G, 198M, 326L, 64W, 306G, 345Q, 101W, 100R, 331W, 317F, 338M, 265F, 296W, 194V, 62V, 317W, 90F, 307R, 317G, 100T, 100L, 194G, 103G, 62A, 210G, 105R, or 61A, wherein the amino acid positions are relative to the reference sequence corresponding to residues 12 to 346 of SEQ ID NO: 54, or relative to the reference sequence corresponding to SEQ ID NO: 54.

[0250] In some embodiments, the amino acid sequence of the engineered RNA ligase comprises at least a substitution or substitution set, or amino acid residue(s) T156Q/T232G/Q334R/N335H, M12V/K254V/K256A, M12V/N230T, M12L/N230T/K251T, M12L/N230T/K251S/K254V/K256A, M12A/M38R/N230T, N230T/K251S, M12P/M38R/K254V, M12V/N230T/K251T, N230T/K256A, K254V, N230T, M12T/N230T/K251S, M12T/N230T/K254V, M12V/M38R/N230T/K251T/K256A, M12L/K251S, M12T/K251T/K254V/K256A, M12V/N230T/K251S, M38R, M12T/N230T/K256A, M12L, M12V, M12L/N25M/M38R/N230T/K251T, M12L/M38R/M102T/N230T/K251T/K256A, M12L/N230T, M12V/K256A, M38R/N230T/K256A, M12V/N230T/K251S/K254V/K256A, K256A, M12T/N230T/K251S/K256A, M12T/K251T, N230T/K251S/K254L, N230T/K254V, K251S/K254L, M12T/N25L/N230T, M12V/N230T/K251S/K254L/K256A, M38R/N230T, M12T/K251S, M38R/K251T, M12V/N230T/K251S/K256A, M12L/N230T/K251T/K254V/K256A, M12T/M38R/N230T/K256A, M12L/N230T/K256A, M102T, K251T, M12V/N25M/K251T/K256A, M12T/M102T/K256A, N230T/K251T, M12T/N230T/K251S/K254L/K256A, M12V/M38R/N230T/K251T/K254V/K256A, M12T/M38R/N230T, M12L/M38R/K254V, M12L/K251T/K256A, M12T/N230T, M102T/N230T/K251S/K254V/K256A, N230T/K251S/K254V, M12T/N230T/K251S/K254V/K256A, M12T/M38R/K251S, M12T/N230T/K251S/K254V, M12T/N230T/K251T, T156Q/K248T/Q334R/N335H, M12V/M38R/N230T, M12T/N25M/M38R, M12V/M102T/N230T/K251T/K254V, M12L/K256A, M12T, N230T/K251T/K254L, M12V/N25L/M38R, M12T/M38R/K251S/K254V, M12V/K251S/K254L/K256A, M12T/K251T/K254V, M12T/M102T, M12V/M38R/K251S, M12V/N230T/K251S/K254L, M12T/K251T/K256A, M38R/N230T/K251S/K254V/K256A, M12V/N230T/K251T/K256A, M12L/N25M/N230T/K251S/K256A, M12T/N230T/R311C, M12L/M38R/N230T/K251S/K254V/K256A, M12L/N230T/K251T/K254L, M12L/K254V, M38R/N230T/K251S/K254V, M12L/M38R/K251S/K256A, M12L/M38R/K251S, T156Q/Q334R/N335H, M12A/N230T, M12P/N230T, M12T/M38R/K251T, V257G/E258P/Q334R, M12L/N25L/M38R/K251T/K256A, Q334R, M12T/N25L/N230T/K254V/K256A, M12T/K251S/K256A, M38R/K251T/K256A, M12V/K251S, M12V/K251T/K254L, M12V/M38R/N230T/K251T/K254V, M12L/M38R, M12L/K251S/K254L/K256A, V257G/E258P/Q334R/N335H, M12L/M38R/K254L/K256A, M12V/K254L, M12T/K254L, M12T/M38R, T232G/K248T/V257G/E258P/Q334R/N335H, M12L/M102T, T156Q/E258P/Q334R/N335H, T156Q/L249R/Q334R/N335H, M12T/M102T/N230T/K254L, N25M, M12V/K254L/K256A, T156H/Q334R/N335H, T156Q/V257G/E258P/Q334R/N335H, M12T/M102T/N230T, T156Q/K248T/V257G/E258P/Q334R, M12T/K256A, K248T/L249R/Q334R/N335H, T232G/V257G/E258P/Q334R/N335H, M12T/M38R/K251T/K254V, Q334R/N335H, T156Q/Q334R, M12V/M38R/K254V, K251T/K254V, M12T/M38R/M102T/K256A, T156Q/V257G/Q334R/N335H, M38R/K251S/K256A, M12T/N140I/K251S/K254L, K251S/K254V/K256A, M12V/K251T, K248T/Q334R/N335H, M12T/K254V, M12V/M38R, M12V/K251T/K256A, T156Q/E258P/Q334R, T156Q/K248T/T330R/N335H, M12T/M38R/K256A, T232G/Q334R/N335H, T156Q/L249R/Q334R, T330R/Q334R/N335H, T156Q/K248T/Q334R, T156Q/N335H, V257G/Q334R, T156H/K248T/Q334R/N335H, K248T/Q334R, T232G/K248T/Q334R/N335H, T156H/K248T/Q334R, T156H/Q334R, M12T/N25M/M38R/N230T/K251S/K256A, M12V/K251S/K254V/K256A, T156Q/K248T/L249R/Q334R/N335H, T330R/N335H, K248T/V257G/Q334R/N335H, T232G/K248T/Q334R, T156Q/T232G/K248T/Q334R/N335H, T232G/V257G/T330R/Q334R, T156Q/K248T/A291T/Q334R/N335H, T156Q/T232G/K248T/V257G/E258P/Q334R, M12V/M38R/K251T/K254L, M12T/N25L/M38R, T156Q/T232G/L249R/Q334R/N335H, M12T/N25M, T156Q/K248T/T330R/Q334R/N335H, T156Q/K248T/L249R/Q334R, T156H/T232G/K248T/Q334R/N335H, T232G/K248T/T330R/N335H, T156Q/T232G/T330R/Q334R/N335H, E197W, R338L, K327S, D192F, I331S, K326C, R338G, L345S, K327G, A101V, N100V, 1331G, E141G, H198M, K326L, V64W, I306G, L345Q, A101W, N100R, 1331W, L317F, R338M, R265F, R296W, T194V, E62V, L317W, D90F, N307R, L317G, N100T, N100L, T194G, D103G, E62A, S210G, V105R, or T61A, wherein the amino acid positions are relative to the reference sequence corresponding to residues 12 to 346 of SEQ ID NO: 54, or relative to the reference sequence corresponding to SEQ ID NO: 54.

[0251] In some embodiments, the engineered RNA ligase comprises an amino acid sequence having at least 70%, 75%, 80%, 81%, 82%, 83%, 84%, 85%, 86%, 87%, 88%, 89%, 90%, 91%, 92%, 93%, 94%, 95%, 96%, 97%, 98%, 99%, or more sequence identity to the reference sequence corresponding to residues 12 to 346 of SEQ ID NO: 244, or to the reference sequence corresponding to SEQ ID NO: 244, wherein the amino acid sequence comprises one or more substitutions relative to the reference sequence corresponding to residues 12 to 346 of SEQ ID NO: 244, or relative to the reference sequence corresponding to SEQ ID NO: 244.

[0252] In some embodiments, the engineered RNA ligase comprises an amino acid sequence having at least 70%, 75%, 80%, 81%, 82%, 83%, 84%, 85%, 86%, 87%, 88%, 89%, 90%, 91%, 92%, 93%, 94%, 95%, 96%, 97%, 98%, 99%, or more sequence identity to the reference sequence corresponding to residues 12 to 346 of an even-numbered SEQ ID NO. of SEQ ID NOs: 632-820, or to the reference sequence corresponding to an even-numbered SEQ ID NO. of SEQ ID NOs: 632-820, wherein the amino acid sequence comprises one or more substitutions relative to the reference sequence corresponding to residues 12 to 346 of SEQ ID NO: 244, or relative to the reference sequence corresponding to SEQ ID NO: 244.

[0253] In some embodiments, the amino acid sequence of the engineered RNA ligase comprises at least a substitution or substitution set at amino acid position(s) 141/197/326/327, 100/101/338, 141/198/326, 64/100/101, 100/338, 101/141/198/326, 101/198/326/327, 198/326, 64/100/101/338/345, 197/326, 198/327, 141/198/327, 198/326/327, 197/326/327, 64/100/338, 64/100/101/156/197/338, 64/100/101/338, 100/197/338, 197/338, 101/197/326, 64/100/197/338, 101/198, 141/197/327, 64/100/101/197/338, 101/326, 101/197/326/327, 197/327, 197, 141/197, 101, 101/198/326, 64/197/198/338, 141, 101/141, 100/101/197/338, 141/326, 338, 326, 197/198/338, 64/101/338, 64/197/198, 101/197, 100/101, 100/109/197/338, 101/197/338, 197/198, 141/326/327, 100/197, 64/100, 64/197/338, 100/197/198, 101/338, 141/327, 101/306, 64/100/101/197, 101/326/327, 100, 327, 326/345, 64/100/101/197/198, 326/327, 64/101,100/101/197, 101/327, 64/100/197/198/338, 306, 64/338,101/141/326/327, 64/101/197/338, or 101/198/306/327, wherein the amino acid positions are relative to the reference sequence corresponding to residues 12 to 346 of SEQ ID NO: 244, or relative to the reference sequence corresponding to SEQ ID NO: 244.

[0254] In some embodiments, the amino acid sequence of the engineered RNA ligase comprises at least a substitution or substitution set, or amino acid residue(s) 141G/197W/326L/327S, 100V/101V/338L, 141G/198M/326L, 64W/100V/101V, 100V/338L, 101V/141G/198M/326L, 101V/198M/326L/327G, 100V/101V/338G, 198M/326L, 64W/100V/101V/338G/345Q, 64W/100V/101V/338L/345Q, 197W/326L, 198M/327S, 141G/198M/327S, 100V/338G, 198M/326L/327G, 197W/326L/327G, 64W/100V/338G, 64W/100V/101V/156S/197W/338L, 64W/100V/101V/338G, 100V/197W/338L, 198M/326L/327S, 197W/338L, 101V/197W/326L, 64W/100V/197W/338L, 101V/198M, 141G/197W/327S, 198M/327G, 198M/326C/327S, 64W/100V/101V/197W/338G, 101V/326L, 101V/197W/326L/327G, 141G/197W/326L/327G, 100V/101W/338G, 197W/327S, 197W, 141G/197W, 101V, 101V/198M/326C, 64W/197W/198M/338G, 141G, 64W/100V/101W/338G, 101V/141G, 100V/101V/197W/338L, 141G/326C, 338L, 197W/338G, 326L, 197W/198M/338G, 197W/198M/338L, 64W/101W/338L, 64W/197W/198M, 101V/197W, 100V/101V, 141G/326L, 100V/109F/197W/338L, 101W/197W/338L, 64W/100V/101W, 197W/198M, 100V/101W/338L, 141G/326C/327S, 100V/197W, 197W/326C/327G, 64W/100V, 101V/326C, 100V/101W, 64W/197W/338L, 100V/197W/198M, 101W, 101W/338L, 141G/327S, 101V/306G, 64W/100V/101W/197W, 101V/326L/327G, 100V, 327G, 326C/345S, 64W/100V/101V/197W/198M, 326C/327S, 64W/101W, 100V/101V/197W, 101V/327S, 338G, 100V/101V/197W/338G, 100V/101W/197W/338G, 64W/100V/197W/198M/338G, 306G, 64W/338G, 64W/100V/101V/197W, 64W/197W/198M/338L, 101V/327G, 101V/141G/326C/327S, 64W/101W/197W/338L, 101W/338G, or 101V/198M/306G/327S, wherein the amino acid positions are relative to the reference sequence corresponding to residues 12 to 346 of SEQ ID NO: 244, or relative to the reference sequence corresponding to SEQ ID NO: 244.

[0255] In some embodiments, the amino acid sequence of the engineered RNA ligase comprises at least a substitution or substitution set, or amino acid residue(s) E141G/E197W/K326L/K327S, N100V/A101V/R338L, E141G/H198M/K326L, V64W/N100V/A101V, N100V/R338L, A101V/E141G/H198M/K326L, A101V/H198M/K326L/K327G, N100V/A101V/R338G, H198M/K326L, V64W/N100V/A101V/R338G/L345Q, V64W/N100V/A101V/R338L/L345Q, E197W/K326L, H198M/K327S, E141G/H198M/K327S, N100V/R338G, H198M/K326L/K327G, E197W/K326L/K327G, V64W/N100V/R338G, V64W/N100V/A101V/T156S/E197W/R338L, V64W/N100V/A101V/R338G, N100V/E197W/R338L, H198M/K326L/K327S, E197W/R338L, A101V/E197W/K326L, V64W/N100V/E197W/R338L, A101V/H198M, E141G/E197W/K327S, H198M/K327G, H198M/K326C/K327S, V64W/N100V/A101V/E197W/R338G, A101V/K326L, A101V/E197W/K326L/K327G, E141G/E197W/K326L/K327G, N100V/A101W/R338G, E197W/K327S, E197W, E141G/E197W, A101V, A101V/H198M/K326C, V64W/E197W/H198M/R338G, E141G, V64W/N100V/A101W/R338G, A101V/E141G, N100V/A101V/E197W/R338L, E141G/K326C, R338L, E197W/R338G, K326L, E197W/H198M/R338G, E197W/H198M/R338L, V64W/A101W/R338L, V64W/E197W/H198M, A101V/E197W, N100V/A101V, E141G/K326L, N100V/I109F/E197W/R338L, A101W/E197W/R338L, V64W/N100V/A101W, E197W/H198M, N100V/A101W/R338L, E141G/K326C/K327S, N100V/E197W, E197W/K326C/K327G, V64W/N100V, A101V/K326C, N100V/A101W, V64W/E197W/R338L, N100V/E197W/H198M, A101W, A101W/R338L, E141G/K327S, A101V/I306G, V64W/N100V/A101W/E197W, A101V/K326L/K327G, N100V, K327G, K326C/L345S, V64W/N100V/A101V/E197W/H198M, K326C/K327S, V64W/A101W, N100V/A101V/E197W, A101V/K327S, R338G, N100V/A101V/E197W/R338G, N100V/A101W/E197W/R338G, V64W/N100V/E197W/H198M/R338G, I306G, V64W/R338G, V64W/N100V/A101V/E197W, V64W/E197W/H198M/R338L, A101V/K327G, A101V/E141G/K326C/K327S, V64W/A101W/E197W/R338L, A101W/R338G, or A101V/H198M/1306G/K327S, wherein the amino acid positions are relative to the reference sequence corresponding to residues 12 to 346 of SEQ ID NO: 244, or relative to the reference sequence corresponding to SEQ ID NO: 244.

[0256] In some embodiments, the engineered RNA ligase comprises an amino acid sequence having at least 70%, 75%, 80%, 81%, 82%, 83%, 84%, 85%, 86%, 87%, 88%, 89%, 90%, 91%, 92%, 93%, 94%, 95%, 96%, 97%, 98%, 99%, or more sequence identity to the reference sequence corresponding to residues 12 to 346 of SEQ ID NO: 648, or to the reference sequence corresponding to SEQ ID NO: 648, wherein the amino acid sequence comprises one or more substitutions relative to the reference sequence corresponding to residues 12 to 346 of SEQ ID NO: 648, or relative to the reference sequence corresponding to SEQ ID NO: 648.

[0257] In some embodiments, the engineered RNA ligase comprises an amino acid sequence having at least 70%, 75%, 80%, 81%, 82%, 83%, 84%, 85%, 86%, 87%, 88%, 89%, 90%, 91%, 92%, 93%, 94%, 95%, 96%, 97%, 98%, 99%, or more sequence identity to the reference sequence corresponding to residues 12 to 346 of an even-numbered SEQ ID NO. of SEQ ID NOs: 822-954, or to the reference sequence corresponding to an even-numbered SEQ ID NO. of SEQ ID NOs: 822-954, wherein the amino acid sequence comprises one or more substitutions relative to the reference sequence corresponding to residues 12 to 346 of SEQ ID NO: 648, or relative to the reference sequence corresponding to SEQ ID NO: 648.

[0258] In some embodiments, the amino acid sequence of the engineered RNA ligase comprises at least a substitution or substitution set at amino acid position(s) 194/330/331, 298, 331, 192/193/194/298, 330, 192/330/331, 192/193/194/331, 298/330/331, 194/298/330/331, 192/193/330/331, 192/298/331, 192/193, 194/330, 60/100/156, 193/296/331, 298/331, 193/194/330/331, 194, 194/298/331, 193/298, 193/330, 192, 192/193/194/298/331, 192/193/194/298/330, 192/193/298/331, 100/156, 62/100,298/330, 60/100, 192/193/298/330/331, 100, 193/194/298, 338, 62, 247, 18, 37, 254, 33, 261, 251, 260, 12, 117, 256, 255, 38, 29, 25, or 252, wherein the amino acid positions are relative to the reference sequence corresponding to residues 12 to 346 of SEQ ID NO: 648, or relative to the reference sequence corresponding to SEQ ID NO: 648.

[0259] In some embodiments, the amino acid sequence of the engineered RNA ligase comprises at least a substitution or substitution set, or amino acid residue(s) 194V/330D/331W, 298S, 331W, 192L/193K/194V/298S, 330D, 192L/330D/331G, 192L/193K/194V/331S, 2981/330D/331S, 194V/298S/330D/331G, 192L/193K/330D/331S, 192L/298S/331S, 192L/193K, 194V/330D, 331G, 192L/298S/331W, 60D/100R/156G, 193K/296G/331W, 298S/331G, 193K/194V/330D/331W, 194V, 194V/298S/331G, 193K/298S, 193K/330D, 192L, 192L/193K/194V/298S/331S, 192L/193K/194V/298S/330D, 192L/193K/298S/331S, 100R/156G, 298S/331S, 2981/331G, 62V/100V, 298S/330D, 193K/2981, 331S, 60D/100R, 192L/193K/298S/330D/331S, 192L/193K/194V/298S/331W, 192L/330D/331S, 100R, 193K/194V/298S, 194V/298S/331S, 338L, 62V, 247S, 18H, 37A, 254S, 33L, 261T, 251Y, 260G, 251C, 12R, 117A, 256S, 255Y, 255S, 38E, 12M, 251T, 255V, 29D, 247R, 25A, 256E, 252A, or 261D, wherein the amino acid positions are relative to the reference sequence corresponding to residues 12 to 346 of SEQ ID NO: 648, or relative to the reference sequence corresponding to SEQ ID NO: 648.

[0260] In some embodiments, the amino acid sequence of the engineered RNA ligase comprises at least a substitution or substitution set, or amino acid residue(s) T194V/T330D/1331W, M298S, 1331W, D192L/T193K/T194V/M298S, T330D, D192L/T330D/1331G, D192L/T193K/T194V/1331S, M298I/T330D/1331S, T194V/M298S/T330D/1331G, D192L/T193K/T330D/1331S, D192L/M298S/1331S, D192L/T193K, T194V/T330D, I331G, D192L/M298S/1331W, P60D/N100R/T156G, T193K/R296G/1331W, M298S/1331G, T193K/T194V/T330D/1331W, T194V, T194V/M298S/1331G, T193K/M298S, T193K/T330D, D192L, D192L/T193K/T194V/M298S/1331S, D192L/T193K/T194V/M298S/T330D, D192L/T193K/M298S/1331S, N100R/T156G, M298S/1331S, M298I/1331G, E62V/N100V, M298S/T330D, T193K/M298I, I331S, P60D/N100R, D192L/T193K/M298S/T330D/1331S, D192L/T193K/T194V/M298S/1331W, D192L/T330D/1331S, N100R, T193K/T194V/M298S, T194V/M298S/1331S, R338L, E62V, A247S, S18H, L37A, K254S, G33L, E261T, S251Y, T260G, S251C, T12R, G117A, K256S, A255Y, A255S, M38E, T12M, S251T, A255V, E29D, A247R, N25A, K256E, P252A, or E261D, wherein the amino acid positions are relative to the reference sequence corresponding to residues 12 to 346 of SEQ ID NO: 648, or relative to the reference sequence corresponding to SEQ ID NO: 648.

[0261] In some embodiments, the engineered RNA ligase comprises an amino acid sequence having at least 70%, 75%, 80%, 81%, 82%, 83%, 84%, 85%, 86%, 87%, 88%, 89%, 90%, 91%, 92%, 93%, 94%, 95%, 96%, 97%, 98%, 99%, or more sequence identity to the reference sequence corresponding to residues 12 to 346 of SEQ ID NO: 862, or to the reference sequence corresponding to SEQ ID NO: 862, wherein the amino acid sequence comprises one or more substitutions relative to the reference sequence corresponding to residues 12 to 346 of SEQ ID NO: 862, or relative to the reference sequence corresponding to SEQ ID NO: 862.

[0262] In some embodiments, the engineered RNA ligase comprises an amino acid sequence having at least 70%, 75%, 80%, 81%, 82%, 83%, 84%, 85%, 86%, 87%, 88%, 89%, 90%, 91%, 92%, 93%, 94%, 95%, 96%, 97%, 98%, 99%, or more sequence identity to the reference sequence corresponding to residues 12 to 346 of an even-numbered SEQ ID NO. of SEQ ID NOs: 956-1078, or to the reference sequence corresponding to an even-numbered SEQ ID NO. of SEQ ID NOs: 956-1078, wherein the amino acid sequence comprises one or more substitutions relative to the reference sequence corresponding to residues 12 to 346 of SEQ ID NO: 862, or relative to the reference sequence corresponding to SEQ ID NO: 862.

[0263] In some embodiments, the amino acid sequence of the engineered RNA ligase comprises at least a substitution or substitution set at amino acid positions(s) 254, 18/254,247/317, 37/317/342, 33, 18/156/254, 18, 156, 254/338, 254/307, 33/37/317, 37, 37/156/317, 156/265/317, 265/317, 156/254, 33/156/317, 317, 156/317, 37/317, 18/338,338, 156/247/317, 33/317, 37/247/265/317, 33/37/156/317, 156/247/296/317, 18/307,156/296/317, 156/247, 37/247/317, 18/254/307, 307, 265, 33/37, 18/156, 33/156/296/317, 18/156/254/338, 37/265/317, 33/37/156/247/317, 296, 33/296/317, 156/296, 247/296/317, 37/296/317, 247/296, 33/37/156, 296/317, 156/254/307, 18/156/307, or 33/37/265, wherein the amino acid positions are relative to the reference sequence corresponding to residues 12 to 346 of SEQ ID NO: 862, or relative to the reference sequence corresponding to SEQ ID NO: 862.

[0264] In some embodiments, the amino acid sequence of the engineered RNA ligase comprises at least a substitution or substitution set, or amino acid residue(s) 254S, 18H/254S, 247S/317W, 37A/317W/342R, 33L, 247S/317F, 18H/156G/254S, 18H, 156G, 254S/338L, 254S/307R, 33L/37A/317W, 37A, 37A/156G/317W, 156G/265F/317W, 265F/317W, 156G/254S, 33L/156G/317W, 317F, 156G/317F, 317W, 156G/317W, 37A/317W, 18H/338M, 338M, 156G/247S/317W, 18H/338L, 33L/317W, 37A/247S/265F/317F, 37A/317F, 33L/37A/156G/317W, 156G/247S/296W/317W, 18H/307R, 156G/296W/317W, 156G/247S, 37A/247S/317F, 156G/265F/317F, 18H/254S/307R, 307R, 265F, 265F/317F, 33L/37A, 18H/156G, 33L/156G/296W/317W, 18H/156G/254S/338L, 37A/265F/317F, 33L/37A/156G/247S/317W, 296W, 33L/296W/317W, 156G/247S/317F, 156G/296W, 338L, 37A/265F/317W, 247S/296W/317F, 33L/156G/317F, 37A/296W/317F, 247S/296W, 33L/37A/156G, 296W/317W, 156G/254S/307R, 18H/156G/307R, or 33L/37A/265F, wherein the amino acid positions are relative to the reference sequence corresponding to residues 12 to 346 of SEQ ID NO: 862, or relative to the reference sequence corresponding to SEQ ID NO: 862.

[0265] In some embodiments, the amino acid sequence of the engineered RNA ligase comprises at least a substitution or substitution set, or amino acid residue(s) K254S, S18H/K254S, A247S/L317W, L37A/L317W/H342R, G33L, A247S/L317F, S18H/T156G/K254S, S18H, T156G, K254S/R338L, K254S/N307R, G33L/L37A/L317W, L37A, L37A/T156G/L317W, T156G/R265F/L317W, R265F/L317W, T156G/K254S, G33L/T156G/L317W, L317F, T156G/L317F, L317W, T156G/L317W, L37A/L317W, S18H/R338M, R338M, T156G/A247S/L317W, S18H/R338L, G33L/L317W, L37A/A247S/R265F/L317F, L37A/L317F, G33L/L37A/T156G/L317W, T156G/A247S/R296W/L317W, S18H/N307R, T156G/R296W/L317W, T156G/A247S, L37A/A247S/L317F, T156G/R265F/L317F, S18H/K254S/N307R, N307R, R265F, R265F/L317F, G33L/L37A, S18H/T156G, G33L/T156G/R296W/L317W, S18H/T156G/K254S/R338L, L37A/R265F/L317F, G33L/L37A/T156G/A247S/L317W, R296W, G33L/R296W/L317W, T156G/A247S/L317F, T156G/R296W, R338L, L37A/R265F/L317W, A247S/R296W/L317F, G33L/T156G/L317F, L37A/R296W/L317F, A247S/R296W, G33L/L37A/T156G, R296W/L317W, T156G/K254S/N307R, S18H/T156G/N307R, or G33L/L37A/R265F, wherein the amino acid positions are relative to the reference sequence corresponding to residues 12 to 346 of SEQ ID NO: 862, or relative to the reference sequence corresponding to SEQ ID NO: 862.

[0266] In some embodiments, the engineered RNA ligase comprises an amino acid sequence having at least 70%, 75%, 80%, 81%, 82%, 83%, 84%, 85%, 86%, 87%, 88%, 89%, 90%, 91%, 92%, 93%, 94%, 95%, 96%, 97%, 98%, 99%, or more sequence identity to the reference sequence corresponding to residues 12 to 346 of SEQ ID NO: 956, or to the reference sequence corresponding to SEQ ID NO: 956, wherein the amino acid sequence comprises one or more substitutions relative to the reference sequence corresponding to residues 12 to 346 of SEQ ID NO: 956, or relative to the reference sequence corresponding to SEQ ID NO: 956.

[0267] In some embodiments, the engineered RNA ligase comprises an amino acid sequence having at least 70%, 75%, 80%, 81%, 82%, 83%, 84%, 85%, 86%, 87%, 88%, 89%, 90%, 91%, 92%, 93%, 94%, 95%, 96%, 97%, 98%, 99%, or more sequence identity to the reference sequence corresponding to residues 12 to 346 of an even-numbered SEQ ID NO. of SEQ ID NOs: 1080-1374, or to the reference sequence corresponding to an even-numbered SEQ ID NO. of SEQ ID NOs: 1080-1374, wherein the amino acid sequence comprises one or more substitutions relative to the reference sequence corresponding to residues 12 to 346 of SEQ ID NO: 956, or relative to the reference sequence corresponding to SEQ ID NO: 956.

[0268] In some embodiments, the amino acid sequence of the engineered RNA ligase comprises at least a substitution or substitution set at amino acid position(s) 12/25/29/156, 12/255/256/257, 12/156/255, 247/252, 12/25, 12, 12/25/29/156/255, 256, 12/156, 12/25/156/255/256/257/261, 18/247/251, 25/255/256/257, 12/25/257, 255/257, 12/25/29/255/257, 256/257, 12/255/257, 12/156/255/256/257, 25, 18/38/251/252, 12/256/257/261, 12/29, 12/25/255/256/257/261, 38, 12/25/29/256/257, 29/257, 12/261,251, 249/251, 12/255, 12/29/156/256/257, 252, 255/257/261, 18, 29/255/257, 255/256/257, 12/25/29/156/256/257, 25/255/256/257/261, 29/255/256/257/261, 25/256, 18/38/247/252/327, 18/247, 25/29, 12/25/156/255/257, 18/156/251/252, 12/255/261, 25/255, 12/255/256/261, 156/255/257, 156/257, 12/156/256/257, 25/156/256/257, 12/25/29/156/257/261, 25/261, 12/156/255/256/261, 12/25/29/255/256/257, 38/252,255, 249/252, 12/156/255/256, 12/25/29/261, 257, 12/255/256, 12/29/255, 12/255/257/261, 12/156/257, 192/249/251/252, 12/25/29/255/261, 12/156/255/257, 12/29/255/257, 12/29/256/257, 18/252,249, 156/250, 38/251/252, 156/255/256/257, 25/257, 12/255/256/257/261, 25/156/261, 156/252, 12/25/255/256/257, 12/25/29/156/255/257, 29/156,251/252, 256/257/261, 25/156/255/256/257, 156/249/251/252, 25/29/255, 12/29/156, 255/256, 38/250/252, 247/249/252, 12/256/257, 60, 12/256, 12/156/256, 25/255/257/261, 12/25/29/255/256/261, 12/29/156/255/256, 12/25/156/255/256, 247/251/252, 256/261, 38/251, 12/25/29/156/261, 12/257,156/255/256/261, 12/25/156/255, 12/25/29/156/255/257/261, 12/29/256/261, 29/156/261, 25/29/156/257/261, 12/25/255/256/261, or 12/156/255/261, wherein the amino acid positions are relative to the reference sequence corresponding to residues 12 to 346 of SEQ ID NO: 956, or relative to the reference sequence corresponding to SEQ ID NO: 956.

[0269] In some embodiments, the amino acid sequence of the engineered RNA ligase comprises at least a substitution or substitution set, or amino acid residue(s) 12M/25A/29D/156G, 12M/255Y/256S/257D, 12M/156G/255V, 247R/252A, 12M/25A, 12M, 12M/25A/29D/156G/255S, 256S, 12M/156G, 12M/25A/156G/255V/256S/257D/261D, 18H/247R/251T, 25A/255V/256S/257D, 12M/25A/257D, 255S/257D, 12M/25A/29D/255Y/257D, 256S/257D, 12M/255S/257D, 12M/156G/255N/256S/257D, 25A, 18H/38E/251T/252A, 12M/256S/257D/261D, 12M/29D, 12M/25A/255V/256S/257D/261D, 38E, 12M/25A/29D/256S/257D, 29D/257D, 12M/261D, 251T, 12M/156G/255N, 249R/251T, 12M/255V, 12M/29D/156G/256S/257D, 252A, 255V/257D/261D, 18A, 29D/255N/257D, 255Y/256S/257D, 12M/25A/29D/156G/256S/257D, 25A/255V/256S/257D/261D, 29D/255Y/256S/257D/261D, 25A/256S, 18H/38E/247R/252A/327M, 18H/247R, 25A/29D, 12M/25A/156G/255V/257D, 255V/257D, 12M/255N, 18H/156G/251T/252A, 12M/255V/261D, 25A/255V, 12M/255V/256S/261D, 156G/255S/257D, 156G/257D, 12M/156G/256S/257D, 12M/156G/255Y, 25A/156G/256S/257D, 12M/25A/29D/156G/257D/261D, 25A/261D, 12M/156G/255Y/256S/261D, 12M/25A/29D/255Y/256S/257D, 38E/252A, 12M/156G/255V/256S/257D, 255S, 249R/252A, 12M/156G/255Y/256S, 12M/25A/29D/261D, 257D, 12M/255N/256S, 12M/29D/255N, 12M/255V/257D/261D, 12M/255Y/257D, 12M/156G/257D, 192N/249R/251T/252A, 12M/25A/29D/255N/256S/257D, 12M/25A/29D/255V/261D, 12M/156G/255Y/257D, 12M/29D/255V/257D, 12M/29D/256S/257D, 18A/252A, 249R, 156G/250I, 38E/251T/252A, 156G/255Y/256S/257D, 25A/257D, 12M/255V/256S/257D/261D, 25A/156G/261D, 156G/252A, 12M/25A/255V/256S/257D, 12M/25A/29D/156G/255S/257D, 29D/156G, 251T/252A, 256S/257D/261D, 25A/156G/255Y/256S/257D, 12M/156G/255Y/256S/257D, 156G/249R/251T/252A, 25A/29D/255V, 12M/29D/156G, 255V/256S, 12M/255Y/256S, 38E/250I/252A, 247R/249R/252A, 12M/256S/257D, 12M/156G/255S/257D, 12M/156G/255V/257D, 60S, 12M/255Y/256S/261D, 12M/256S, 12M/255S, 255S/257D/261D, 12M/156G/256S, 12M/255Y/257D/261D, 25A/255V/257D/261D, 12M/25A/29D/255N/256S/261D, 12M/255V/257D, 12M/29D/156G/255V/256S, 255S/256S, 12M/25A/156G/255V/256S, 247R/251T/252A, 256S/261D, 38E/251T, 12M/25A/29D/156G/261D, 12M/257D, 156G/255N/256S/261D, 12M/25A/156G/255S, 25A/255S, 12M/25A/29D/156G/255V/257D/261D, 12M/29D/256S/261D, 156G/255V/257D, 29D/156G/261D, 12M/255S/257D/261D, 25A/29D/156G/257D/261D, 12M/25A/255V/256S/261D, or 12M/156G/255V/261D, wherein the amino acid positions are relative to the reference sequence corresponding to residues 12 to 346 of SEQ ID NO: 956, or relative to the reference sequence corresponding to SEQ ID NO: 956.

[0270] In some embodiments, the amino acid sequence of the engineered RNA ligase comprises at least a substitution or substitution set, or amino acid residue(s) T12M/N25A/E29D/T156G, T12M/A255Y/K256S/V257D, T12M/T156G/A255V, A247R/P252A, T12M/N25A, T12M, T12M/N25A/E29D/T156G/A255S, K256S, T12M/T156G, T12M/N25A/T156G/A255V/K256S/V257D/E261D, S18H/A247R/S251T, N25A/A255V/K256S/V257D, T12M/N25A/V257D, A255S/V257D, T12M/N25A/E29D/A255Y/V257D, K256S/V257D, T12M/A255S/V257D, T12M/T156G/A255N/K256S/V257D, N25A, S18H/M38E/S251T/P252A, T12M/K256S/V257D/E261D, T12M/E29D, T12M/N25A/A255V/K256S/V257D/E261D, M38E, T12M/N25A/E29D/K256S/V257D, E29D/V257D, T12M/E261D, S251T, T12M/T156G/A255N, L249R/S251T, T12M/A255V, T12M/E29D/T156G/K256S/V257D, P252A, A255V/V257D/E261D, S18A, E29D/A255N/V257D, A255Y/K256S/V257D, T12M/N25A/E29D/T156G/K256S/V257D, N25A/A255V/K256S/V257D/E261D, E29D/A255Y/K256S/V257D/E261D, N25A/K256S, S18H/M38E/A247R/P252A/K327M, S18H/A247R, N25A/E29D, T12M/N25A/T156G/A255V/V257D, A255V/V257D, T12M/A255N, S18H/T156G/S251T/P252A, T12M/A255V/E261D, N25A/A255V, T12M/A255V/K256S/E261D, T156G/A255S/V257D, T156G/V257D, T12M/T156G/K256S/V257D, T12M/T156G/A255Y, N25A/T156G/K256S/V257D, T12M/N25A/E29D/T156G/V257D/E261D, N25A/E261D, T12M/T156G/A255Y/K256S/E261D, T12M/N25A/E29D/A255Y/K256S/V257D, M38E/P252A, T12M/T156G/A255V/K256S/V257D, A255S, L249R/P252A, T12M/T156G/A255Y/K256S, T12M/N25A/E29D/E261D, V257D, T12M/A255N/K256S, T12M/E29D/A255N, T12M/A255V/V257D/E261D, T12M/A255Y/V257D, T12M/T156G/V257D, D192N/L249R/S251T/P252A, T12M/N25A/E29D/A255N/K256S/V257D, T12M/N25A/E29D/A255V/E261D, T12M/T156G/A255Y/V257D, T12M/E29D/A255V/V257D, T12M/E29D/K256S/V257D, S18A/P252A, L249R, T156G/D250I, M38E/S251T/P252A, T156G/A255Y/K256S/V257D, N25A/V257D, T12M/A255V/K256S/V257D/E261D, N25A/T156G/E261D, T156G/P252A, T12M/N25A/A255V/K256S/V257D, T12M/N25A/E29D/T156G/A255S/V257D, E29D/T156G, S251T/P252A, K256S/V257D/E261D, N25A/T156G/A255Y/K256S/V257D, T12M/T156G/A255Y/K256S/V257D, T156G/L249R/S251T/P252A, N25A/E29D/A255V, T12M/E29D/T156G, A255V/K256S, T12M/A255Y/K256S, M38E/D250I/P252A, A247R/L249R/P252A, T12M/K256S/V257D, T12M/T156G/A255S/V257D, T12M/T156G/A255V/V257D, P60S, T12M/A255Y/K256S/E261D, T12M/K256S, T12M/A255S, A255S/V257D/E261D, T12M/T156G/K256S, T12M/A255Y/V257D/E261D, N25A/A255V/V257D/E261D, T12M/N25A/E29D/A255N/K256S/E261D, T12M/A255V/V257D, T12M/E29D/T156G/A255V/K256S, A255S/K256S, T12M/N25A/T156G/A255V/K256S, A247R/S251T/P252A, K256S/E261D, M38E/S251T, T12M/N25A/E29D/T156G/E261D, T12M/V257D, T156G/A255N/K256S/E261D, T12M/N25A/T156G/A255S, N25A/A255S, T12M/N25A/E29D/T156G/A255V/V257D/E261D, T12M/E29D/K256S/E261D, T156G/A255V/V257D, E29D/T156G/E261D, T12M/A255S/V257D/E261D, N25A/E29D/T156G/V257D/E261D, T12M/N25A/A255V/K256S/E261D, or T12M/T156G/A255V/E261D, wherein the amino acid positions are relative to the reference sequence corresponding to residues 12 to 346 of SEQ ID NO: 956, or relative to the reference sequence corresponding to SEQ ID NO: 956.

[0271] In some embodiments, the amino acid sequence of the engineered RNA ligase comprises at least a substitution at amino acid position 157, 183, 95, 185, 181, 213, 89, 28, 190, 214, or 143, or any combinations thereof, wherein the amino acid positions are relative to the reference sequence corresponding to residues 12 to 346 of SEQ ID NO: 956, or relative to the reference sequence corresponding to SEQ ID NO: 956.

[0272] In some embodiments, the amino acid sequence of the engineered RNA ligase comprises at least a substitution, or amino acid residue 157V, 183L, 95A, 183V, 185P, 181E, 213D, 89M, 89G, 28M, 190M, 214L, 143A, 89Q, or 95G, or any combinations thereof, wherein the amino acid positions are relative to the reference sequence corresponding to residues 12 to 346 of SEQ ID NO: 956, or relative to the reference sequence corresponding to SEQ ID NO: 956.

[0273] In some embodiments, the amino acid sequence of the engineered RNA ligase comprises at least a substitution, or amino acid residue L157V, I183L, V95A, I183V, N185P, K181E, G213D, K89M, K89G, I28M, L190M, V214L, V143A, K89Q, or V95G, wherein the amino acid positions are relative to the reference sequence corresponding to residues 12 to 346 of SEQ ID NO: 956, or relative to the reference sequence corresponding to SEQ ID NO: 956.

[0274] In some embodiments, the engineered RNA ligase comprises an amino acid sequence having at least 70%, 75%, 80%, 81%, 82%, 83%, 84%, 85%, 86%, 87%, 88%, 89%, 90%, 91%, 92%, 93%, 94%, 95%, 96%, 97%, 98%, 99%, or more sequence identity to the reference sequence corresponding to residues 12 to 346 of SEQ ID NO: 1088, or to the reference sequence corresponding to SEQ ID NO: 1088, wherein the amino acid sequence comprises one or more substitutions relative to the reference sequence corresponding to residues 12 to 346 of SEQ ID NO: 1088, or relative to the reference sequence corresponding to SEQ ID NO: 1088.

[0275] In some embodiments, the engineered RNA ligase comprises an amino acid sequence having at least 70%, 75%, 80%, 81%, 82%, 83%, 84%, 85%, 86%, 87%, 88%, 89%, 90%, 91%, 92%, 93%, 94%, 95%, 96%, 97%, 98%, 99%, or more sequence identity to the reference sequence corresponding to residues 12 to 346 of an even-numbered SEQ ID NO. of SEQ ID NOs: 1376-1434, or to the reference sequence corresponding to an even-numbered SEQ ID NO. of SEQ ID NOs: 1376-1434, wherein the amino acid sequence comprises one or more substitutions relative to the reference sequence corresponding to residues 12 to 346 of SEQ ID NO: 1088, or relative to the reference sequence corresponding to SEQ ID NO: 1088.

[0276] In some embodiments, the amino acid sequence of the engineered RNA ligase comprises at least a substitution or substitution set at amino acid position(s) 95/157, 95/183/185/214, 89/183, 28/89/143/183, 28/143/157, 181/183, 143/181/183/214, 143/181/183, 89/143/183, 28/143/181/183, 143/157, 95/181/183, 157, 143/183, 89/143/157/183, 89/95/157, 89/157, 89/95/143/181, 95/143, 89/157/183/214, 143/214, 143/181/183/185, 28/95/143, 143/183/214, 28/95/183/214, 89/143/157, 28/95, 95/143/183/185, or 95/143/157/183, wherein the amino acid positions are relative to the reference sequence corresponding to residues 12 to 346 of SEQ ID NO: 1088, or relative to the reference sequence corresponding to SEQ ID NO: 1088.

[0277] In some embodiments, the amino acid sequence of the engineered RNA ligase comprises at least a substitution or substitution set, or amino acid residue(s) 95A/157V, 95G/183V/185P/214L, 89M/183V, 28M/89G/143M/183L, 28M/143M/157V, 181E/183V, 143A/181E/183V/214L, 143A/181E/183V, 89G/143M/183L, 28M/143M/181E/183L, 143M/157V, 95A/181E/183L, 157V, 143A/183L, 143A/157V, 89G/143A/157V/183L, 89M/95A/157V, 89M/157V, 89G/95A/143A/181E, 95A/143A, 89M/157V/183L/214L, 143M/214L, 143M/181E/183V/185P, 28M/95A/143A, 143M/183L/214L, 28M/95A/183V/214L, 89M/143A/157V, 28M/95A, 95A/143M/183V/185P, or 95A/143A/157V/183L, wherein the amino acid positions are relative to the reference sequence corresponding to residues 12 to 346 of SEQ ID NO: 1088, or relative to the reference sequence corresponding to SEQ ID NO: 1088.

[0278] In some embodiments, the amino acid sequence of the engineered RNA ligase comprises at least a substitution or substitution set, or amino acid residue(s) V95A/L157V, V95G/1183V/N185P/V214L, K89M/I183V, I28M/K89G/V143M/I183L, I28M/V143M/L157V, K181E/I183V, V143A/K181E/I183V/V214L, V143A/K181E/I183V, K89G/V143M/1183L, I28M/V143M/K181E/I183L, V143M/L157V, V95A/K181E/I183L, L157V, V143A/I183L, V143A/L157V, K89G/V143A/L157V/1183L, K89M/V95A/L157V, K89M/L157V, K89G/V95A/V143A/K181E, V95A/V143A, K89M/L157V/I183L/V214L, V143M/V214L, V143M/K181E/I183V/N185P, I28M/V95A/V143A, V143M/I183L/V214L, I28M/V95A/I183V/V214L, K89M/V143A/L157V, I28M/V95A, V95A/V143M/I183V/N185P, or V95A/V143A/L157V/1183L, wherein the amino acid positions are relative to the reference sequence corresponding to residues 12 to 346 of SEQ ID NO: 1088, or relative to the reference sequence corresponding to SEQ ID NO: 1088.

[0279] In some embodiments, the engineered RNA ligase comprises an amino acid sequence having at least 70%, 75%, 80%, 81%, 82%, 83%, 84%, 85%, 86%, 87%, 88%, 89%, 90%, 91%, 92%, 93%, 94%, 95%, 96%, 97%, 98%, 99%, or more sequence identity to the reference sequence corresponding to residues 12 to 346 of SEQ ID NO: 1416, or to the reference sequence corresponding to SEQ ID NO: 1416, wherein the amino acid sequence comprises one or more substitutions relative to the reference sequence corresponding to residues 12 to 346 of SEQ ID NO: 1416, or relative to the reference sequence corresponding to SEQ ID NO: 1416.

[0280] In some embodiments, the engineered RNA ligase comprises an amino acid sequence having at least 70%, 75%, 80%, 81%, 82%, 83%, 84%, 85%, 86%, 87%, 88%, 89%, 90%, 91%, 92%, 93%, 94%, 95%, 96%, 97%, 98%, 99%, or more sequence identity to the reference sequence corresponding to residues 12 to 346 of an even-numbered SEQ ID NO. of SEQ ID NOs: 1436-1470, or to the reference sequence corresponding to an even-numbered SEQ ID NO. of SEQ ID NOs: 1436-1470, wherein the amino acid sequence comprises one or more substitutions relative to the reference sequence corresponding to residues 12 to 346 of SEQ ID NO: 1416, or relative to the reference sequence corresponding to SEQ ID NO: 1416.

[0281] In some embodiments, the amino acid sequence of the engineered RNA ligase comprises at least a substitution or substitution set at amino acid position(s) 83/137/150, 137/213, 137, 150/190, 143/150, 104/150, 60/143/150/190, 60/150/190/213, 104/137/154, 123/137, 137/150/154/190, 123/143/150, 60/104/143/150/213, 60/95/143/190, 123/137/190, 60/123,104/123, to 60/123/143, wherein the amino acid positions are relative to the reference sequence corresponding to residues 12 to 346 of SEQ ID NO: 1416, or relative to the reference sequence corresponding to SEQ ID NO: 1416.

[0282] In some embodiments, the amino acid sequence of the engineered RNA ligase comprises at least a substitution or substitution set, or amino acid residue(s) 83L/137R/150D, 137R/213R, 137R, 150D/190M, 143A/150D, 104T/150D, 60A/143A/150D/190M, 60A/150D/190M/213R, 104T/137R/154V, 123K/137R, 137R/150D/154V/190M, 123K/143T/150D, 60A/104T/143A/150D/213R, 60A/95G/143T/190M, 123R/137R/190M, 60A/123R, 104T/123R, or 60A/123R/143A, wherein the amino acid positions are relative to the reference sequence corresponding to residues 12 to 346 of SEQ ID NO: 1416, or relative to the reference sequence corresponding to SEQ ID NO: 1416.

[0283] In some embodiments, the amino acid sequence of the engineered RNA ligase comprises at least a substitution or substitution set, or amino acid residue(s) I83L/D137R/V150D, D137R/G213R, D137R, V150D/L190M, V143A/V150D, L104T/V150D, P60A/V143A/V150D/L190M, P60A/V150D/L190M/G213R, L104T/D137R/C154V, D123K/D137R, D137R/V150D/C154V/L190M, D123K/V143T/V150D, P60A/L104T/V143A/V150D/G213R, P60A/V95G/V143T/L190M, D123R/D137R/L190M, P60A/D123R, L104T/D123R, or P60A/D123R/V143A, wherein the amino acid positions are relative to the reference sequence corresponding to residues 12 to 346 of SEQ ID NO: 1416, or relative to the reference sequence corresponding to SEQ ID NO: 1416.

[0284] In some embodiments, the amino acid sequence of the engineered RNA ligase comprises at least a substitution or substitution set at amino acid position(s) 38, 249, 255, 23, 33, 25, 226, 29, 37, 10, 250, 75, 230, 77, 251, 228, 81, 224, 64, 254, 268, 65, 232, 332, 331, 330, 101, 307, 137, 223, 280, 289, 288, 342, 93, 296, 86, 241, 126, 277, 87, 247, 243, 84, 83, 192, 105, 25/29, 25/29/250, 25/29/75/77/250/255, 25/75/230, 25/77/226/255, 25/230,250/255, 29/75/226/230/255, 29/75/77, 29/75/77/226, 29/75/77/230/255, 29/226, 29/226/230, 29/230/255, 33/228, 33/249, 33/37/228, 33/37/38/228, 33/37/38/228/249, 33/38, 75/250/255, 75/226, 75/226/250/255, 75/226/230/250/255, 75/77, 75/77/255, 75/77/250/255, 75/77/226/255, 75/77/226/250/255, 75/77/230, 75/77/230/250, 75/230, 75/230/255, 75/230/250, 226/255, 226/250, 226/230, 226/230/255, 37/228, 37/228/249, 37/38, 37/38/228, 37/38/228/249, 37/38/249, 38/249/291, 10/228, 10/228/249, 10/33/249, 10/33/37, 10/33/37/38/249, 10/33/38/249, 10/33/38, 10/33/249/251, 10/33/37/228, 10/33/37/249, 10/33/37/38/228/249, 10/33/37/38, 10/249, 10/37, 10/37/228, 10/37/228/249, 10/37/249, 10/37/38/228, 10/37/38/228/249, 10/37/38, 10/38/249, 10/38, 10/38/228, 77/255, 77/250, 77/250/255, 77/226, 77/226/255, 77/230, 77/230/255, 230/255, 230/250, 230/250/255, 23/25/226/255, 23/25/226/230, or 23/25/230, wherein the amino acid positions are relative to the reference sequence corresponding to residues 12 to 346 of SEQ ID NO: 1416, or relative to the reference sequence corresponding to SEQ ID NO: 1416.

[0285] In some embodiments, the amino acid sequence of the engineered RNA ligase comprises at least a substitution or substitution set, or amino acid residue(s) 38V, 249K, 255S, 23K, 33L, 25G, 226R, 249S, 29S, 37M, 38A, 10F, 250S, 75D, 230V, 77M, 251E, 23T, 33V, 228L, 81Y, 224A, 64Q, 254K, 268F, 65C, 232N, 332E, 37K, 331R, 330K, 101P, 268G, 307R, 224Q, 137N, 223C, 280N, 2891, 288E, 342T, 93K, 268M, 296Q, 86G, 241Q, 126M, 277A, 87E, 2471, 243H, 84V, 83A, 192E, 105K, 25G/29S, 25G/29S/250S, 25G/29S/75D/77M/250S/255S, 25G/75D/230V, 25G/77M/226R/255S, 25G/230V, 250S/255S, 29S/75D/226R/230V/255S, 29S/75D/77M, 29S/75D/77M/226R, 29S/75D/77M/230V/255S, 29S/226R, 29S/226R/230V, 29S/230V/255S, 33V/228L, 33V/249K, 33V/249S, 33V/37M/228L, 33V/37M/38A/228L, 33V/37M/38A/228L/249K, 33V/38V, 75D/250S/255S, 75D/226R, 75D/226R/250S/255S, 75D/226R/230V/250S/255S, 75D/77M, 75D/77M/255S, 75D/77M/250S/255S, 75D/77M/226R/255S, 75D/77M/226R/250S/255S, 75D/77M/230V, 75D/77M/230V/250S, 75D/230V, 75D/230V/255S, 75D/230V/250S, 226R/255S, 226R/250S, 226R/230V, 226R/230V/255S, 37M/228L, 37M/228L/249S, 37M/38A, 37M/38A/228L, 37M/38V/228L/249K, 37M/38V/249K, 38A/249S/291T, 10F/228L, 10F/228L/249K, 10F/33L/249K, 10F/33L/37M, 10F/33L/37M/38A/249K, 10F/33L/38A/249S, 10F/33L/38V, 10F/33V/249K/251E, 10F/33V/37M, 10F/33V/37M/228L, 10F/33V/37M/249K, 10F/33V/37M/249S, 10F/33V/37M/38A/228L/249K, 10F/33V/37M/38V, 10F/33V/37M/38V/228L/249K, 10F/33V/37M/38V/249K, 10F/249K, 10F/249S, 10F/37M, 10F/37M/228L, 10F/37M/228L/249K, 10F/37M/249K, 10F/37M/38A/228L, 10F/37M/38A/228L/249K, 10F/37M/38V, 10F/37M/38V/228L, 10F/37M/38V/228L/249S, 10F/38A/249K, 10F/38V, 10F/38V/228L, 10F/38V/249S, 77M/255S, 77M/250S, 77M/250S/255S, 77M/226R, 77M/226R/255S, 77M/230V, 77M/230V/255S, 230V/255S, 230V/250S, 230V/250S/255S, 23T/25G/226R/255S, 23T/25G/226R/230V, or 23T/25G/230V, wherein the amino acid positions are relative to the reference sequence corresponding to residues 12 to 346 of SEQ ID NO: 1416, or relative to the reference sequence corresponding to SEQ ID NO: 1416.

[0286] In some embodiments, the amino acid sequence of the engineered RNA ligase comprises at least a substitution or substitution set, or amino acid residue(s) M38V, L249K, A255S, Y23K, G33L, A25G, I226R, L249S, E29S, L37M, M38A, S10F, D250S, G75D, T230V, S77M, S251E, Y23T, G33V, F228L, H81Y, Y224A, V64Q, S254K, E268F, P65C, T232N, L332E, L37K, G331R, T330K, A101P, E268G, N307R, Y224Q, D137N, V223C, S280N, V2891, S288E, H342T, V93K, E268M, R296Q, K86G, S241Q, D126M, N277A, K87E, A247I, F243H, I84V, I83A, D192E, V105K, A25G/E29S, A25G/E29S/D250S, A25G/E29S/G75D/S77M/D250S/A255S, A25G/G75D/T230V, A25G/S77M/1226R/A255S, A25G/T230V, D250S/A255S, E29S/G75D/I226R/T230V/A255S, E29S/G75D/S77M, E29S/G75D/S77M/1226R, E29S/G75D/S77M/T230V/A255S, E29S/1226R, E29S/I226R/T230V, E29S/T230V/A255S, G33V/F228L, G33V/L249K, G33V/L249S, G33V/L37M/F228L, G33V/L37M/M38A/F228L, G33V/L37M/M38A/F228L/L249K, G33V/M38V, G75D/D250S/A255S, G75D/1226R, G75D/I226R/D250S/A255S, G75D/I226R/T230V/D250S/A255S, G75D/S77M, G75D/S77M/A255S, G75D/S77M/D250S/A255S, G75D/S77M/I226R/A255S, G75D/S77M/I226R/D250S/A255S, G75D/S77M/T230V, G75D/S77M/T230V/D250S, G75D/T230V, G75D/T230V/A255S, G75D/T230V/D250S, I226R/A255S, I226R/D250S, I226R/T230V, I226R/T230V/A255S, L37M/F228L, L37M/F228L/L249S, L37M/M38A, L37M/M38A/F228L, L37M/M38V/F228L/L249K, L37M/M38V/L249K, M38A/L249S/A291T, S10F/F228L, S10F/F228L/L249K, S10F/G33L/L249K, S10F/G33L/L37M, S10F/G33L/L37M/M38A/L249K, S10F/G33L/M38A/L249S, S10F/G33L/M38V, S10F/G33V/L249K/S251E, S10F/G33V/L37M, S10F/G33V/L37M/F228L, S10F/G33V/L37M/L249K, S10F/G33V/L37M/L249S, S10F/G33V/L37M/M38A/F228L/L249K, S10F/G33V/L37M/M38V, S10F/G33V/L37M/M38V/F228L/L249K, S10F/G33V/L37M/M38V/L249K, S10F/L249K, S10F/L249S, S10F/L37M, S10F/L37M/F228L, S10F/L37M/F228L/L249K, S10F/L37M/L249K, S10F/L37M/M38A/F228L, S10F/L37M/M38A/F228L/L249K, S10F/L37M/M38V, S10F/L37M/M38V/F228L, S10F/L37M/M38V/F228L/L249S, S10F/M38A/L249K, S10F/M38V, S10F/M38V/F228L, S10F/M38V/L249S, S77M/A255S, S77M/D250S, S77M/D250S/A255S, S77M/1226R, S77M/I226R/A255S, S77M/T230V, S77M/T230V/A255S, T230V/A255S, T230V/D250S, T230V/D250S/A255S, Y23T/A25G/1226R/A255S, Y23T/A25G/1226R/T230V, or Y23T/A25G/T230V, wherein the amino acid positions are relative to the reference sequence corresponding to residues 12 to 346 of SEQ ID NO: 1416, or relative to the reference sequence corresponding to SEQ ID NO: 1416.

[0287] In some embodiments, the amino acid sequence of the engineered RNA ligase comprises at least a substitution or substitution set at amino acid position(s) 86, 255, 306, 250, 75, 318, 335, 241, 248, 344, 38, 272, 83, 257, 258, or 323, wherein the amino acid positions are relative to the reference sequence corresponding to residues 12 to 346 of SEQ ID NO: 1416, or relative to the reference sequence corresponding to SEQ ID NO: 1416.

[0288] In some embodiments, the amino acid sequence of the engineered RNA ligase comprises at least a substitution or substitution set, or amino acid residue(s) 86D, 255V, 306T, 250I, 75A, 318S, 335Q, 241G, 250E, 248F, 344K, 38S, 272S, 83G, 306L, 272M, 248G, 257E, 258M, or 323G, wherein the amino acid positions are relative to the reference sequence corresponding to residues 12 to 346 of SEQ ID NO: 1416, or relative to the reference sequence corresponding to SEQ ID NO: 1416.

[0289] In some embodiments, the amino acid sequence of the engineered RNA ligase comprises at least a substitution or substitution set, or amino acid residue(s) K86D, A255V, 1306T, D250I, G75A, F318S, N335Q, S241G, D250E, K248F, V344K, M38S, E272S, I83G, I306L, E272M, K248G, V257E, E258M, or S323G, wherein the amino acid positions are relative to the reference sequence corresponding to residues 12 to 346 of SEQ ID NO: 1416, or relative to the reference sequence corresponding to SEQ ID NO: 1416.

[0290] In some embodiments, the engineered RNA ligase comprises an amino acid sequence having at least 70%, 75%, 80%, 81%, 82%, 83%, 84%, 85%, 86%, 87%, 88%, 89%, 90%, 91%, 92%, 93%, 94%, 95%, 96%, 97%, 98%, 99%, or more sequence identity to the reference sequence corresponding to residues 12 to 346 of SEQ ID NO: 1612, or to the reference sequence corresponding to SEQ ID NO: 1612, wherein the amino acid sequence comprises one or more substitutions relative to the reference sequence corresponding to residues 12 to 346 of SEQ ID NO: 1612, or relative to the reference sequence corresponding to SEQ ID NO: 1612.

[0291] In some embodiments, the engineered RNA ligase comprises an amino acid sequence having at least 70%, 75%, 80%, 81%, 82%, 83%, 84%, 85%, 86%, 87%, 88%, 89%, 90%, 91%, 92%, 93%, 94%, 95%, 96%, 97%, 98%, 99%, or more sequence identity to the reference sequence corresponding to residues 12 to 346 of an even-numbered SEQ ID NO. of SEQ ID NOs: 1768-1840, or to the reference sequence corresponding to an even-numbered SEQ ID NO. of SEQ ID NOs: 768-1840, wherein the amino acid sequence comprises one or more substitutions relative to the reference sequence corresponding to residues 12 to 346 of SEQ ID NO: 1612, or relative to the reference sequence corresponding to SEQ ID NO: 1612.

[0292] In some embodiments, the amino acid sequence of the engineered RNA ligase comprises at least a substitution or substitution set at amino acid position(s) 101, 291, 291/307, 331, 33/75, 33/75/249/291/331, 33/38, 33/93/249, 38/75/291/307, 38/75/249/250, 38/75/93/271, 38/93, 10/75, 10/38/75, 10/38/75/291, 10/38/75/249, 10/38/75/93, 64/224,224, 23/101/307, 23/268, 23/37/64/224/254, 23/64/81, 23/224/268, 23/224/254, 23, 23/64/224, 64, 75/249/307, 93, 33/38/75/249, 75/249, 25/38/75/93/291, 33/38/75, 75, or 23/254, wherein the amino acid positions are relative to the reference sequence corresponding to residues 12 to 346 of SEQ ID NO: 1612, or relative to the reference sequence corresponding to SEQ ID NO: 1612.

[0293] In some embodiments, the amino acid sequence of the engineered RNA ligase comprises at least a substitution or substitution set, or amino acid residue(s) 101P, 291T, 291T/307R, 331R, 33V/75D, 33V/75D/249K/291T/331R, 33V/38A, 33V/93K/249K, 38A/75D/291T/307R, 38V/75D/249K/250S, 38V/75D/93K/271G, 38V/93K, 10F/75D, 10F/38A/75D, 10F/38V/75D/291T, 10F/38V/75D/249K, 10F/38V/75D/93K, 64Q/224A, 224A, 224Q, 23T/101P/307K, 23T/268F, 23T/37K/64Q/224A/254K, 23T/64Q/81Y, 23T/224A/268F, 23T/224A/254K, 23T, 23T/64Q/224A, 64Q, 75D/249K/307R, 93K, 33V/38A/75D/249K, 75D/249K, 25S/38V/75D/93K/291T, 33V/38A/75D, 75D, or 23T/254K, wherein the amino acid positions are relative to the reference sequence corresponding to residues 12 to 346 of SEQ ID NO: 1612, or relative to the reference sequence corresponding to SEQ ID NO: 1612.

[0294] In some embodiments, the amino acid sequence of the engineered RNA ligase comprises at least a substitution or substitution set, or amino acid residue(s) A101P, A291T, A291T/N307R, G331R, G33V/G75D, G33V/G75D/L249K/A291T/G331R, G33V/M38A, G33V/V93K/L249K, M38A/G75D/A291T/N307R, M38V/G75D/L249K/D250S, M38V/G75D/V93K/S271G, M38V/V93K, S10F/G75D, S10F/M38A/G75D, S10F/M38V/G75D/A291T, S10F/M38V/G75D/L249K, S10F/M38V/G75D/V93K, V64Q/Y224A, Y224A, Y224Q, Y23T/A101P/N307K, Y23T/E268F, Y23T/L37K/V64Q/Y224A/S254K, Y23T/V64Q/H81Y, Y23T/Y224A/E268F, Y23T/Y224A/S254K, Y23T, Y23T/V64Q/Y224A, V64Q, G75D/L249K/N307R, V93K, G33V/M38A/G75D/L249K, G75D/L249K, A25S/M38V/G75D/V93K/A291T, G33V/M38A/G75D, G75D, or Y23T/S254K, wherein the amino acid positions are relative to the reference sequence corresponding to residues 12 to 346 of SEQ ID NO: 1612, or relative to the reference sequence corresponding to SEQ ID NO: 1612.

[0295] In some embodiments, the engineered RNA ligase comprises an amino acid sequence having at least 70%, 75%, 80%, 81%, 82%, 83%, 84%, 85%, 86%, 87%, 88%, 89%, 90%, 91%, 92%, 93%, 94%, 95%, 96%, 97%, 98%, 99%, or more sequence identity to the reference sequence corresponding to residues 12 to 346 of SEQ ID NO: 1840, or to the reference sequence corresponding to SEQ ID NO: 1840, wherein the amino acid sequence comprises one or more substitutions relative to the reference sequence corresponding to residues 12 to 346 of SEQ ID NO: 1840, or relative to the reference sequence corresponding to SEQ ID NO: 1840.

[0296] In some embodiments, the engineered RNA ligase comprises an amino acid sequence having at least 70%, 75%, 80%, 81%, 82%, 83%, 84%, 85%, 86%, 87%, 88%, 89%, 90%, 91%, 92%, 93%, 94%, 95%, 96%, 97%, 98%, 99%, or more sequence identity to the reference sequence corresponding to residues 12 to 346 of an even-numbered SEQ ID NO. of SEQ ID NOs: 1842-1906, or to the reference sequence corresponding to an even-numbered SEQ ID NO. of SEQ ID NOs: 1842-1906, wherein the amino acid sequence comprises one or more substitutions relative to the reference sequence corresponding to residues 12 to 346 of SEQ ID NO: 1840, or relative to the reference sequence corresponding to SEQ ID NO: 1840.

[0297] In some embodiments, the amino acid sequence of the engineered RNA ligase comprises at least a substitution or substitution set at amino acid position(s) 38/65/192, 38/65, 38/65/224, 38/64, 93/307, 38, 38/224, 38/192/224, 65, 192/224, 75/307, 75/250/268/307, 250/268/307/342, 224, 65/192,268, 64/192, 250/268/291/342, 75/93/249/307/342, 250/291, 38/64/192, 38/64/224, 93/249/307, 38/64/86/192/241, 38/342, 248/250/307, 75/77/250/268/307/342, 93/268,192, 38/192, or 64, wherein the amino acid positions are relative to the reference sequence corresponding to residues 12 to 346 of SEQ ID NO: 1840, or relative to the reference sequence corresponding to SEQ ID NO: 1840.

[0298] In some embodiments, the amino acid sequence of the engineered RNA ligase comprises at least a substitution or substitution set, or amino acid residue(s) 38A/65C/192E, 38T/65C, 38A/65C/224R, 38A/64Q, 93K/307R, 38A, 38A/224A, 38A/192E/224R, 65C, 38A/192E/224A, 192E/224A, 75D/307R, 75D/250I/268G/307R, 250I/268G/307R/342T, 224R, 65C/192E, 268G, 64Q/192E, 2501/268G/291T/342T, 75D/93K/249K/307R/342T, 250I/291T, 38A/64Q/192E, 38A/64Q/224R, 93K/249K/307R, 38A/64Q/86G/192E/241R, 38A/342T, 192E/224R, 248G/250I/307R, 75D/77M/250I/268G/307R/342T, 93K/268G, 192E, 38A/192E, or 64Q, wherein the amino acid positions are relative to the reference sequence corresponding to residues 12 to 346 of SEQ ID NO: 1840, or relative to the reference sequence corresponding to SEQ ID NO: 1840.

[0299] In some embodiments, the amino acid sequence of the engineered RNA ligase comprises at least a substitution or substitution set, or amino acid residue(s) M38A/P65C/D192E, M38T/P65C, M38A/P65C/Y224R, M38A/V64Q, V93K/N307R, M38A, M38A/Y224A, M38A/D192E/Y224R, P65C, M38A/D192E/Y224A, D192E/Y224A, G75D/N307R, G75D/D250I/E268G/N307R, D250I/E268G/N307R/H342T, Y224R, P65C/D192E, E268G, V64Q/D192E, D250I/E268G/A291T/H342T, G75D/V93K/L249K/N307R/H342T, D250I/A291T, M38A/V64Q/D192E, M38A/V64Q/Y224R, V93K/L249K/N307R, M38A/V64Q/K86G/D192E/S241R, M38A/H342T, D192E/Y224R, K248G/D250I/N307R, G75D/S77M/D250I/E268G/N307R/H342T, V93K/E268G, D192E, M38A/D192E, or V64Q, wherein the amino acid positions are relative to the reference sequence corresponding to residues 12 to 346 of SEQ ID NO: 1840, or relative to the reference sequence corresponding to SEQ ID NO: 1840.

[0300] In some embodiments, the engineered RNA ligase comprises an amino acid sequence having at least 70%, 75%, 80%, 81%, 82%, 83%, 84%, 85%, 86%, 87%, 88%, 89%, 90%, 91%, 92%, 93%, 94%, 95%, 96%, 97%, 98%, 99%, or more sequence identity to the reference sequence corresponding to residues 12 to 346 of SEQ ID NO: 1866, or to the reference sequence corresponding to SEQ ID NO: 1866, wherein the amino acid sequence comprises one or more substitutions relative to the reference sequence corresponding to residues 12 to 346 of SEQ ID NO: 1866, or relative to the reference sequence corresponding to SEQ ID NO: 1866.

[0301] In some embodiments, the engineered RNA ligase comprises an amino acid sequence having at least 70%, 75%, 80%, 81%, 82%, 83%, 84%, 85%, 86%, 87%, 88%, 89%, 90%, 91%, 92%, 93%, 94%, 95%, 96%, 97%, 98%, 99%, or more sequence identity to the reference sequence corresponding to residues 12 to 346 of an even-numbered SEQ ID NO. of SEQ ID NOs: 1948-2038 and 2130-2620, or to the reference sequence corresponding to an even-numbered SEQ ID NO. of SEQ ID NOs: 1948-2038 and 2130-2620, wherein the amino acid sequence comprises one or more substitutions relative to the reference sequence corresponding to residues 12 to 346 of SEQ ID NO: 1866, or relative to the reference sequence corresponding to SEQ ID NO: 1866.

[0302] In some embodiments, the amino acid sequence of the engineered RNA ligase comprises at least a substitution or substitution set at amino acid position(s) 38/248/251, 38/248/250/251/277, 248/250/251, 38/93/192/248/251, 38/192/248/251, 250/251, 38/248/250/251, 248/251/344, 192/248/250/251, 38/248/250, 38/93/250/251/277, 38/255/280/318, 248, 38/86/241/255/280/318/335, 38/255, 38, 318, 38/101/255/280, 38/318/335, 38/255/318, 192/250/251/344, 38/335,318/335, 38/277, 38/93/251, 192/251, 255, 38/64/318, 38/64/241/255/318, 251, 64/101/255/280/318, 38/101/255/280/318/335, 38/255/280, 38/251/277, 64/318, 38/64/255/318, 241/255/280/318, 38/86/101/241/318, 38/241, 38/255/318/335, 38/64/101/318, 38/64/255/280/318, 241/255/318, or 38/241/335, wherein the amino acid positions are relative to the reference sequence corresponding to residues 12 to 346 of SEQ ID NO: 1866, or relative to the reference sequence corresponding to SEQ ID NO: 1866.

[0303] In some embodiments, the amino acid sequence of the engineered RNA ligase comprises at least a substitution or substitution set, or amino acid residue(s) 38S/248F/251E, 38S/248F/250E/251E/277A, 248F/250E/251E, 38S/93K/192E/248F/251E, 38S/192E/248F/251E, 250E/251E, 38S/248F/250E/251E, 248F/251E/344K, 192E/248F/250E/251R, 38S/248F/250E, 38S/93K/250E/251E/277A, 38A/255V/280N/318S, 248F, 38A/86D/241G/255V/280N/318S/335Q, 38A/255S, 38A, 318S, 38A/101P/255S/280N, 38A/318S/335Q, 38A/255V/318S, 192E/250E/251E/344K, 38A/335Q, 318S/335Q, 38S/277A, 38S/93K/251E, 192E/251E, 255S, 38A/64Q/318S, 2481, 38A/64Q/241G/255V/318S, 251E, 64Q/101P/255V/280N/318S, 38A/101P/255V/280N/318S/335Q, 38A/255V/280N, 38S/251R/277A, 64Q/318S, 38A/64Q/255V/318S, 241G/255S/280N/318S, 255V, 38A/86D/101P/241G/318S, 38A/241G, 38A/255S/318S/335Q, 38A/64Q/101P/318S, 38A/64Q/255V/280N/318S, 241G/255S/318S, or 38A/241G/335Q, wherein the amino acid positions are relative to the reference sequence corresponding to residues 12 to 346 of SEQ ID NO: 1866, or relative to the reference sequence corresponding to SEQ ID NO: 1866.

[0304] In some embodiments, the amino acid sequence of the engineered RNA ligase comprises at least a substitution or substitution set, or amino acid residue(s) M38S/K248F/S251E, M38S/K248F/I250E/S251E/N277A, K248F/I250E/S251E, M38S/V93K/D192E/K248F/S251E, M38S/D192E/K248F/S251E, I250E/S251E, M38S/K248F/I250E/S251E, K248F/S251E/V344K, D192E/K248F/I250E/S251R, M38S/K248F/I250E, M38S/V93K/I250E/S251E/N277A, M38A/A255V/S280N/F318S, K248F, M38A/K86D/S241G/A255V/S280N/F318S/N335Q, M38A/A255S, M38A, F318S, M38A/A101P/A255S/S280N, M38A/F318S/N335Q, M38A/A255V/F318S, D192E/I250E/S251E/V344K, M38A/N335Q, F318S/N335Q, M38S/N277A, M38S/V93K/S251E, D192E/S251E, A255S, M38A/V64Q/F318S, K248I, M38A/V64Q/S241G/A255V/F318S, S251E, V64Q/A101P/A255V/S280N/F318S, M38A/A101P/A255V/S280N/F318S/N335Q, M38A/A255V/S280N, M38S/S251R/N277A, V64Q/F318S, M38A/V64Q/A255V/F318S, S241G/A255S/S280N/F318S, A255V, M38A/K86D/A101P/S241G/F318S, M38A/S241G, M38A/A255S/F318S/N335Q, M38A/V64Q/A101P/F318S, M38A/V64Q/A255V/S280N/F318S, S241G/A255S/F318S, or M38A/S241G/N335Q, wherein the amino acid positions are relative to the reference sequence corresponding to residues 12 to 346 of SEQ ID NO: 1866, or relative to the reference sequence corresponding to SEQ ID NO: 1866.

[0305] In some embodiments, the amino acid sequence of the engineered RNA ligase comprises at least a substitution or substitution set at amino acid position(s) 89, 122, 181, 28, 125, 157, 238, 330, 212, 143, 208, 290, 161, 214, 84, 270, 91, 295, 316, 286, 301, 170, 264, 289, 190, 183, 128, 60, 310, 131, 302, 267, 288, 185, 291, 129, 280, 298, 158/215, 28/122,276, 274, 271, 215, 294, 106, 58, 135, 45, 299, 315, 204, 332, 169, 305, 154, 158, 297, 95, 337, 324, 150, 179, 283, 206, 236, 266, 213, 336, 178, 99, 184, 282, 57, 177, 109, 191, 107, 160, 144, 56, 159, 341, 325, or 91, wherein the amino acid positions are relative to the reference sequence corresponding to residues 12 to 346 of SEQ ID NO: 1866, or relative to the reference sequence corresponding to SEQ ID NO: 1866.

[0306] In some embodiments, the amino acid sequence of the engineered RNA ligase comprises at least a substitution or substitution set or amino acid residue 89D, 89E, 122F, 181P, 28V, 125K, 181R, 157F, 238K, 89Q, 89S, 330E, 122C, 89Y, 89C, 212E, 89W, 143S, 89V, 208P, 290D, 161V, 161M, 214C, 181N, 84V, 270L, 91A, 295V, 122W, 316Y, 286E, 301M, 170Y, 264A, 289D, 289T, 290P, 1901, 316I, 183V, 128E, 289E, 91E, 60V, 310M, 131T, 143F, 301V, 208H, 302S, 60R, 143E, 122Q, 267M, 157L, 288W, 185K, 291Q, 264E, 129W, 280L, 298R, 295K, 122T, 267I, 89G, 286V, 185F, 158R/215G, 295T, 28A/122G, 276M, 274A, 185M, 271T, 215T, 295P, 294V, 270M, 264S, 106L, 301F, 295L, 122L, 106R, 280N, 276G, 310H, 208K, 106Q, 58M, 295Y, 291W, 208T, 135V, 45S, 28L, 299V, 214Y, 295Q, 290N, 302L, 315S, 143C, 89R, 204W, 332W, 169G, 305V, 89L, 154S, 295R, 158R, 135A, 238V, 290H, 294A, 2991, 89N, 288L, 295F, 2971, 125T, 315E, 95C, 337V, 264G, 295S, 289P, 2121, 276A, 60C, 214A, 324D, 185C, 302C, 324M, 301L, 310N, 298C, 295M, 299T, 150L, 238S, 291T, 135M, 179E, 283C, 310S, 206L, 310Q, 106V, 181S, 298K, 299Q, 295C, 143M, 60S, 214H, 212L, 236V, 266C, 289A, 330A, 213N, 302A, 294S, 336I, 178V, 324G, 297L, 991, 184L, 169N, 212G, 282A, 271G, 106M, 271A, 60D, 89T, 3021, 270V, 57V, 143H, 177K, 291L, 214Q, 3011, 271E, 109L, 191C, 213T, 107S, 106W, 185G, 310R, 2891, 282M, 336L, 332H, 291H, 298V, 135H, 280W, 310L, 2661, 135Q, 158S, 288R, 160R, 310T, 286F, 276V, 291R, 330G, 129L, 143T, 212K, 2081, 297A, 286D, 157Q, 301A, 144L, 106G, 283V, 56L, 291S, 264V, 215G, 170H, 294Y, 159F, 286M, 951, 341A, 325L, 214K, 336M, 91V, 337A, 185T, 185S, or 185V, wherein the amino acid positions are relative to the reference sequence corresponding to residues 12 to 346 of SEQ ID NO: 1866, or relative to the reference sequence corresponding to SEQ ID NO: 1866.

[0307] In some embodiments, the amino acid sequence of the engineered RNA ligase comprises at least a substitution or substitution set or amino acid residue M89D, M89E, V122F, K181P, I28V, G125K, K181R, V157F, C238K, M89Q, M89S, T330E, V122C, M89Y, M89C, T212E, M89W, V143S, M89V, A208P, T290D, L161V, L161M, L214C, K181N, 184V, F270L, S91A, G295V, V122W, L316Y, I286E, T301M, F170Y, K264A, V289D, V289T, T290P, L190I, L316I, L183V, D128E, V289E, S91E, P60V, A310M, V131T, V143F, T301V, A208H, M302S, P60R, V143E, V122Q, L267M, V157L, S288W, N185K, A291Q, K264E, F129W, S280L, S298R, G295K, V122T, L267I, M89G, I286V, N185F, G158R/A215G, G295T, I28A/V122G, W276M, V274A, N185M, S271T, A215T, G295P, F294V, F270M, K264S, S106L, T301F, G295L, V122L, S106R, S280N, W276G, A310H, A208K, S106Q, 158M, G295Y, A291W, A208T, L135V, A45S, I28L, G299V, L214Y, G295Q, T290N, M302L, D315S, V143C, M89R, F204W, L332W, S169G, I305V, M89L, C154S, G295R, G158R, L135A, C238V, T290H, F294A, G299I, M89N, S288L, G295F, V297I, G125T, D315E, V95C, 1337V, K264G, G295S, V289P, T212I, W276A, P60C, L214A, A324D, N185C, M302C, A324M, T301L, A310N, S298C, G295M, G299T, V150L, C238S, A291T, L135M, D179E, L283C, A310S, P206L, A310Q, S106V, K181S, S298K, G299Q, G295C, V143M, P60S, L214H, T212L, I236V, L266C, V289A, T330A, G213N, M302A, F294S, T336I, N178V, A324G, V297L, L99I, V184L, S169N, T212G, V282A, S271G, S106M, S271A, P60D, M89T, M302I, F270V, 157V, V143H, P177K, A291L, L214Q, T3011, S271E, I109L, V191C, G213T, V107S, S106W, N185G, A310R, V289I, V282M, T336L, L332H, A291H, S298V, L135H, S280W, A310L, L266I, L135Q, G158S, S288R, K160R, A310T, I286F, W276V, A291R, T330G, F129L, V143T, T212K, A208I, V297A, I286D, V157Q, T301A, Y144L, S106G, L283V, V56L, A291S, K264V, A215G, F170H, F294Y, L159F, I286M, V95I, W341A, V325L, L214K, T336M, S91V, 1337A, N185T, N185S, or N185V, wherein the amino acid positions are relative to the reference sequence corresponding to residues 12 to 346 of SEQ ID NO: 1866, or relative to the reference sequence corresponding to SEQ ID NO: 1866.

[0308] In some embodiments, the engineered RNA ligase comprises an amino acid sequence having at least 70%, 75%, 80%, 81%, 82%, 83%, 84%, 85%, 86%, 87%, 88%, 89%, 90%, 91%, 92%, 93%, 94%, 95%, 96%, 97%, 98%, 99%, or more sequence identity to the reference sequence corresponding to residues 12 to 346 of SEQ ID NO: 1954, or to the reference sequence corresponding to SEQ ID NO: 1954, wherein the amino acid sequence comprises one or more substitutions relative to the reference sequence corresponding to residues 12 to 346 of SEQ ID NO: 1954, or relative to the reference sequence corresponding to SEQ ID NO: 1954.

[0309] In some embodiments, the engineered RNA ligase comprises an amino acid sequence having at least 70%, 75%, 80%, 81%, 82%, 83%, 84%, 85%, 86%, 87%, 88%, 89%, 90%, 91%, 92%, 93%, 94%, 95%, 96%, 97%, 98%, 99%, or more sequence identity to the reference sequence corresponding to residues 12 to 346 of an even-numbered SEQ ID NO. of SEQ ID NOs: 2040-2128, or to the reference sequence corresponding to an even-numbered SEQ ID NO. of SEQ ID NOs: 2040-2128, wherein the amino acid sequence comprises one or more substitutions relative to the reference sequence corresponding to residues 12 to 346 of SEQ ID NO: 1954, or relative to the reference sequence corresponding to SEQ ID NO: 1954.

[0310] In some embodiments, the amino acid sequence of the engineered RNA ligase comprises at least a substitution or substitution set at amino acid position(s) 93/232/291/306, 93/232/280/306, 93/241/257/306/335, 232/280, 93/291/306, 93/257, 93/306, 93/280,192/318, 93/280/291, 93/241/291/306, 192, 257/291, 241/257/306, 280/335, 93/291/306/335, 93/335, 93/232/335, 64/318, 93/241, 93/232/241/280, 64/192/318/323, 232/280/306, 93/232,291/335, 257/258, 93/232/241/257/258/280/335, 318/323, 93/241/291/335, 83/86/323, 257/258/291, 101/224/318, 83/192/255/296, 171/232/257/258/280, 83/224/255/318, 64/192/250/318, 101/296, 232/241/280, 64/255/318, 86/250/255, 83/86/101, 83/86, 93/241/258/335, 250/296/323, or 257/258/280, wherein the amino acid positions are relative to the reference sequence corresponding to residues 12 to 346 of SEQ ID NO: 1954, or relative to the reference sequence corresponding to SEQ ID NO: 1954.

[0311] In some embodiments, the amino acid sequence of the engineered RNA ligase comprises at least a substitution or substitution set or amino acid residue(s) 93V/232N/291T/306L, 93V/232N/280N/306L, 93V/241G/257E/306L/335Q, 232N/280N, 93V/291T/306L, 93V/257E, 93V/306L, 93V/280N, 192D/318S, 93V/280N/291T, 93V/241G/291T/306L, 192D, 257E/291T, 241G/257E/306L, 280N/335Q, 93V/291T/306L/335Q, 93V/335Q, 93V/232N/335Q, 64Q/318S, 93V/241G, 93V/232N/241G/280N, 64Q/192D/318S/323G, 232N/280N/306L, 93V/232N, 291T/335Q, 257E/258M, 93V/232N/241G/257E/258M/280N/335Q, 318S/323G, 93V/241G/291T/335Q, 83A/86D/323G, 257E/258M/291T, 101P/224A/318S, 83A/192D/255V/296Q, 171S/232N/257E/258M/280N, 83A/224A/255V/318S, 64Q/192D/250E/318S, 101P/296Q, 232N/241G/280N, 64Q/255V/318S, 86D/250E/255V, 83A/86D/101P, 83A/86D, 93V/241G/258M/335Q, 250E/296Q/323G, or 257E/258M/280N, wherein the amino acid positions are relative to the reference sequence corresponding to residues 12 to 346 of SEQ ID NO: 1954, or relative to the reference sequence corresponding to SEQ ID NO: 1954.

[0312] In some embodiments, the amino acid sequence of the engineered RNA ligase comprises at least a substitution or substitution set or amino acid residue(s) K93V/T232N/A291T/1306L, K93V/T232N/S280N/1306L, K93V/S241G/V257E/1306L/N335Q, T232N/S280N, K93V/A291T/1306L, K93V/V257E, K93V/I306L, K93V/S280N, E192D/F318S, K93V/S280N/A291T, K93V/S241G/A291T/1306L, E192D, V257E/A291T, S241G/V257E/1306L, S280N/N335Q, K93V/A291T/1306L/N335Q, K93V/N335Q, K93V/T232N/N335Q, V64Q/F318S, K93V/S241G, K93V/T232N/S241G/S280N, V64Q/E192D/F318S/S323G, T232N/S280N/I306L, K93V/T232N, A291T/N335Q, V257E/E258M, K93V/T232N/S241G/V257E/E258M/S280N/N335Q, F318S/S323G, K93V/S241G/A291T/N335Q, I83A/K86D/S323G, V257E/E258M/A291T, A101P/Y224A/F318S, I83A/E192D/A255V/R296Q, A171S/T232N/V257E/E258M/S280N, 183A/Y224A/A255V/F318S, V64Q/E192D/I250E/F318S, A101P/R296Q, T232N/S241G/S280N, V64Q/A255V/F318S, K86D/I250E/A255V, I83A/K86D/A101P, I83A/K86D, K93V/S241G/E258M/N335Q, I250E/R296Q/S323G, or V257E/E258M/S280N, wherein the amino acid positions are relative to the reference sequence corresponding to residues 12 to 346 of SEQ ID NO: 1954, or relative to the reference sequence corresponding to SEQ ID NO: 1954.

[0313] In some embodiments, the engineered RNA ligase comprises an amino acid sequence having at least 70%, 75%, 80%, 81%, 82%, 83%, 84%, 85%, 86%, 87%, 88%, 89%, 90%, 91%, 92%, 93%, 94%, 95%, 96%, 97%, 98%, 99%, or more sequence identity to the reference sequence corresponding to residues 12 to 346 of SEQ ID NO: 2062, or to the reference sequence corresponding to SEQ ID NO: 2062, wherein the amino acid sequence comprises one or more substitutions relative to the reference sequence corresponding to residues 12 to 346 of SEQ ID NO: 2062, or relative to the reference sequence corresponding to SEQ ID NO: 2062.

[0314] In some embodiments, the engineered RNA ligase comprises an amino acid sequence having at least 70%, 75%, 80%, 81%, 82%, 83%, 84%, 85%, 86%, 87%, 88%, 89%, 90%, 91%, 92%, 93%, 94%, 95%, 96%, 97%, 98%, 99%, or more sequence identity to the reference sequence corresponding to residues 12 to 346 of an even-numbered SEQ ID NO. of SEQ ID NOs: 2622-2746, or to the reference sequence corresponding to an even-numbered SEQ ID NO. of SEQ ID NOs: 2622-2746, wherein the amino acid sequence comprises one or more substitutions relative to the reference sequence corresponding to residues 12 to 346 of SEQ ID NO: 2062, or relative to the reference sequence corresponding to SEQ ID NO: 2062.

[0315] In some embodiments, the amino acid sequence of the engineered RNA ligase comprises at least a substitution or substitution set at amino acid position(s) 83/84/330, 91/270/290, 83/181,161/290/330, 181/330, 161/270/330, 270/290, 83/84/270/318/330, 64/83/84/161/192/290/318, 91/161/290/318/330, 161/330, 161/214/270/290/330, 192/270/318, 91/161/192/330, 161/270, 181/270/330, 91/181/192/290, 161/290, 83/161/270, 83/192/318, 214/330, 83/161/290/330, 64/83/161/290/330, 83/161/192/214/318, 122/143/212/295, 161/192/270/290, 181/290, 91/161/214/270/290/318, 91/192/214/270, 214/290, 64/83/161/270/318/330, 91/161/181/330, 161/318/330, 91/270/290/330, 64/181/290/318, 181/270/290/318, 64/83/161/192/270/290/318/330, 64/83/161/214/290/318, 122/192/212, 64/83/91/192/214/330, 83/91/161/181/290/318, 91/161/192/214/270/290, 91/161/181/290/330, 83/91/125/161/270, 28/212,122/212, 28/64/83/122/143/192/212/295/318, 122/295, 91/161/192/318, 28/122/143/212, 64/161/290, 64/122/208/318, 64/83/192/290/318, 64/83/161/290, 181/192/318, 83/161/192/318, 214/270, 83/122, or 192/212, 28/122, wherein the amino acid positions are relative to the reference sequence corresponding to residues 12 to 346 of SEQ ID NO: 2062, or relative to the reference sequence corresponding to SEQ ID NO: 2062.

[0316] In some embodiments, the amino acid sequence of the engineered RNA ligase comprises at least a substitution or substitution set or amino acid residue(s) 83A/84V/330E, 91A/270L/290D, 83A/181P, 161V/290D/330E, 181R/330E, 161V/270L/330E, 161M/270L/330E, 270L/290D, 83A/84V/270L/318S/330E, 64Q/83A/84V/161M/192E/290D/318S, 91A/161V/290D/318S/330E, 161V/330E, 161V/214C/270L/290D/330E, 192E/270L/318S, 91A/161M/192E/330E, 161V/270L, 181P/330E, 181P/270L/330E, 91A/181R/192E/290D, 161M/290D, 83A/161M/270L, 83A/192E/318S, 214C/330E, 83A/161M/290D/330E, 64Q/83A/161M/290D/330E, 83A/161M/192E/214C/318S, 122F/143S/212E/295V, 161V/192E/270L/290D, 181P/290D, 91A/161V/214C/270L/290D/318S, 91A/192E/214C/270L, 214C/290D, 64Q/83A/161M/270L/318S/330E, 91A/161M/181P/330E, 161M/318S/330E, 91A/270L/290D/330E, 64Q/181P/290D/318S, 181R/270L/290D/318S, 64Q/83A/161V/192E/270L/290D/318S/330E, 64Q/83A/161M/214C/290D/318S, 122F/192E/212E, 64Q/83A/91A/192E/214C/330E, 83A/91A/161M/181R/290D/318S, 91A/161V/192E/214C/270L/290D, 91A/161V/181P/290D/330E, 83A/91A/125K/161M/270L, 161M/290D/330E, 28V/212E, 122F/212E, 28V/64Q/83A/122F/143S/192E/212E/295V/318S, 122F/295V, 91A/161V/192E/318S, 28V/122F/143S/212E, 64Q/161V/290D, 64Q/122F/208P/318S, 64Q/83A/192E/290D/318S, 64Q/83A/161V/290D, 181R/192E/318S, 83A/161V/192E/318S, 214C/270L, 83A/122F, 192E/212E, or 28V/122F, wherein the amino acid positions are relative to the reference sequence corresponding to residues 12 to 346 of SEQ ID NO: 2062, or relative to the reference sequence corresponding to SEQ ID NO: 2062.

[0317] In some embodiments, the amino acid sequence of the engineered RNA ligase comprises at least a substitution or substitution set or amino acid residue(s) 183A/184V/T330E, S91A/F270L/T290D, 183A/K181P, L161V/T290D/T330E, K181R/T330E, L161V/F270L/T330E, L161M/F270L/T330E, F270L/T290D, I83A/I84V/F270L/F318S/T330E, V64Q/183A/I84V/L161M/D192E/T290D/F318S, S91A/L161V/T290D/F318S/T330E, L161V/T330E, L161V/L214C/F270L/T290D/T330E, D192E/F270L/F318S, S91A/L161M/D192E/T330E, L161V/F270L, K181P/T330E, K181P/F270L/T330E, S91A/K181R/D192E/T290D, L161M/T290D, I83A/L161M/F270L, I83A/D192E/F318S, L214C/T330E, I83A/L161M/T290D/T330E, V64Q/I83A/L161M/T290D/T330E, I83A/L161M/D192E/L214C/F318S, V122F/V143S/T212E/G295V, L161V/D192E/F270L/T290D, K181P/T290D, S91A/L161V/L214C/F270L/T290D/F318S, S91A/D192E/L214C/F270L, L214C/T290D, V64Q/183A/L161M/F270L/F318S/T330E, S91A/L161M/K181P/T330E, L161M/F318S/T330E, S91A/F270L/T290D/T330E, V64Q/K181P/T290D/F318S, K181R/F270L/T290D/F318S, V64Q/183A/L161V/D192E/F270L/T290D/F318S/T330E, V64Q/183A/L161M/L214C/T290D/F318S, V122F/D192E/T212E, V64Q/183A/S91A/D192E/L214C/T330E, I83A/S91A/L161M/K181R/T290D/F318S, S91A/L161V/D192E/L214C/F270L/T290D, S91A/L161V/K181P/T290D/T330E, I83A/S91A/G125K/L161M/F270L, L161M/T290D/T330E, I28V/T212E, V122F/T212E, I28V/V64Q/183A/V122F/V143S/D192E/T212E/G295V/F318S, V122F/G295V, S91A/L161V/D192E/F318S, I28V/V122F/V143S/T212E, V64Q/L161V/T290D, V64Q/V122F/A208P/F318S, V64Q/I83A/D192E/T290D/F318S, V64Q/183A/L161V/T290D, K181R/D192E/F318S, I83A/L161V/D192E/F318S, L214C/F270L, 183A/V122F, D192E/T212E, or I28V/V122F, wherein the amino acid positions are relative to the reference sequence corresponding to residues 12 to 346 of SEQ ID NO: 2062, or relative to the reference sequence corresponding to SEQ ID NO: 2062.

[0318] In some embodiments, the engineered RNA ligase comprises an amino acid sequence having at least 70%, 75%, 80%, 81%, 82%, 83%, 84%, 85%, 86%, 87%, 88%, 89%, 90%, 91%, 92%, 93%, 94%, 95%, 96%, 97%, 98%, 99%, or more sequence identity to the reference sequence corresponding to residues 12 to 346 of SEQ ID NO: 2674, or to the reference sequence corresponding to SEQ ID NO: 2674, wherein the amino acid sequence comprises one or more substitutions relative to the reference sequence corresponding to residues 12 to 346 of SEQ ID NO: 2674, or relative to the reference sequence corresponding to SEQ ID NO: 2674.

[0319] In some embodiments, the engineered RNA ligase comprises an amino acid sequence having at least 70%, 75%, 80%, 81%, 82%, 83%, 84%, 85%, 86%, 87%, 88%, 89%, 90%, 91%, 92%, 93%, 94%, 95%, 96%, 97%, 98%, 99%, or more sequence identity to the reference sequence corresponding to residues 12 to 346 of an even-numbered SEQ ID NO. of SEQ ID NOs: 2748-2782, 2822-2914, and 2916-3012, or to the reference sequence corresponding to an even-numbered SEQ ID NO. of SEQ ID NOs: 2748-2782, 2822-2914, and 2916-3012, wherein the amino acid sequence comprises one or more substitutions relative to the reference sequence corresponding to residues 12 to 346 of SEQ ID NO: 2674, or relative to the reference sequence corresponding to SEQ ID NO: 2674.

[0320] In some embodiments, the amino acid sequence of the engineered RNA ligase comprises at least a substitution or substitution set at amino acid position(s) 28/291/295/298/315, 28/95/291/295/298/315, 143/295/298/315, 291/295/298, 28/143/295/298, 28/291/295/298, 143/185/291/295/298, 28/143/185/291/298/336, 28/298,280/295, 143/298/336, 143/291/295/298, 291/295/298/315/336, 143/295/298, 28/143/295/298/336, 95/143/295/298, 143/280/290, or 143/291/298, wherein the amino acid positions are relative to the reference sequence corresponding to residues 12 to 346 of SEQ ID NO: 2674, or relative to the reference sequence corresponding to SEQ ID NO: 2674.

[0321] In some embodiments, the amino acid sequence of the engineered RNA ligase comprises at least a substitution or substitution set or amino acid residue(s) 28L/291Q/295G/298V/315E, 28L/951/291S/295G/298V/315E, 143T/295G/298V/315E, 291Q/295G/298V, 28L/143V/295G/298V, 28L/291S/295G/298V, 143V/185V/291Q/295G/298V, 28L/143V/185V/291Q/298V/336I, 28L/298V, 280N/295G, 143V/298V/336I, 143V/291S/295G/298V, 291Q/295G/298V/315E/336I, 143V/295G/298V, 28L/143T/295G/298V/336I, 951/143T/295G/298V, 143V/280N/290N, or 143T/291S/298V, wherein the amino acid positions are relative to the reference sequence corresponding to residues 12 to 346 of SEQ ID NO: 2674, or relative to the reference sequence corresponding to SEQ ID NO: 2674.

[0322] In some embodiments, the amino acid sequence of the engineered RNA ligase comprises at least a substitution or substitution set or amino acid residue(s) I28L/A291Q/V295G/S298V/D315E, I28L/V951/A291S/V295G/S298V/D315E, S143T/V295G/S298V/D315E, A291Q/V295G/S298V, I28L/S143V/V295G/S298V, I28L/A291S/V295G/S298V, S143V/N185V/A291Q/V295G/S298V, I28L/S143V/N185V/A291Q/S298V/T336I, I28L/S298V, S280N/V295G, S143V/S298V/T336I, S143V/A291S/V295G/S298V, A291Q/V295G/S298V/D315E/T336I, S143V/V295G/S298V, I28L/S143T/V295G/S298V/T336I, V95I/S143T/V295G/S298V, S143V/S280N/T290N, or S143T/A291S/S298V, wherein the amino acid positions are relative to the reference sequence corresponding to residues 12 to 346 of SEQ ID NO: 2674, or relative to the reference sequence corresponding to SEQ ID NO: 2674.

[0323] In some embodiments, the amino acid sequence of the engineered RNA ligase comprises at least a substitution or substitution set at amino acid position(s) 208, 25, 90, 141, 258, 248, 318, 117, 299, 33, 80, 253, 83, 254, 256, 30, 327, 73, 100, 97, 119, 265, 296, 32, 156, 40, 105, 107, 41/114, 41, or 64, wherein the amino acid positions are relative to the reference sequence corresponding to residues 12 to 346 of SEQ ID NO: 2674, or relative to the reference sequence corresponding to SEQ ID NO: 2674.

[0324] In some embodiments, the amino acid sequence of the engineered RNA ligase comprises at least a substitution or substitution set or amino acid residue 208T, 25G, 90E, 141D, 258D, 248G, 248K, 318E, 318S, 117Q, 299K, 33I, 33T, 80E, 253W, 83E, 83T, 254Q, 254V, 256A, 256G, 256M, 256W, 30L, 30V, 30W, 327E, 73Q, 73W, 100A, 100G, 100H, 100S, 97A, 119L, 265A, 296E, 296L, 296Q, 32E, 156Q, 40I, 105L, 107M, 41E/A114E, 41I, or 64A, wherein the amino acid positions are relative to the reference sequence corresponding to residues 12 to 346 of SEQ ID NO: 2674, or relative to the reference sequence corresponding to SEQ ID NO: 2674.

[0325] In some embodiments, the amino acid sequence of the engineered RNA ligase comprises at least a substitution or substitution set or amino acid residue A208T, A25G, D90E, E141D, E258D, F248G, F248K, F318E, F318S, G117Q, G299K, G33I, G33T, G80E, I253W, I83E, 183T, K254Q, K254V, K256A, K256G, K256M, K256W, K30L, K30V, K30W, K327E, L73Q, L73W, N100A, N100G, N100H, N100S, N97A, Q119L, R265A, R296E, R296L, R296Q, R32E, T156Q, T40I, V105L, V107M, V41E/A114E, V41I, or V64A, wherein the amino acid positions are relative to the reference sequence corresponding to residues 12 to 346 of SEQ ID NO: 2674, or relative to the reference sequence corresponding to SEQ ID NO: 2674.

[0326] In some embodiments, the amino acid sequence of the engineered RNA ligase comprises at least a substitution or substitution set at amino acid position(s) 162, 208, 25, 103, 346, 42, 74, 113, 13, 228, 318, 121, 299, 33, 342, 253, 127, 254, 292, 30, 67, 86, 165, 173, 300, 317, 326, 11, 229, 97, 71, 17, 210, 241, 271, 40, 56, or 95, wherein the amino acid positions are relative to the reference sequence corresponding to residues 12 to 346 of SEQ ID NO: 2674, or relative to the reference sequence corresponding to SEQ ID NO: 2674.

[0327] In some embodiments, the amino acid sequence of the engineered RNA ligase comprises at least a substitution or substitution set or amino acid residue 162C, 208L, 25D, 25F, 25T, 103V, 346S, 42T, 74D, 113M, 13W, 228D, 228L, 318A, 318G, 121N, 299E, 299R, 33L, 342S, 253L, 127P, 254E, 254N, 292N, 292S, 30A, 30T, 67R, 86L, 165M, 173M, 300A, 317E, 317Q, 317V, 326C, 11G, 229W, 97E, 71T, 17P, 210V, 241E, 271G, 40P, 40S, 56I, or 95A, wherein the amino acid positions are relative to the reference sequence corresponding to residues 12 to 346 of SEQ ID NO: 2674, or relative to the reference sequence corresponding to SEQ ID NO: 2674.

[0328] In some embodiments, the amino acid sequence of the engineered RNA ligase comprises at least a substitution or substitution set or amino acid residue A162C, A208L, A25D, A25F, A25T, D103V, E346S, E42T, E74D, F113M, F13W, F228D, F228L, F318A, F318G, G121N, G299E, G299R, G33L, H342S, I253L, K127P, K254E, K254N, K292N, K292S, K30A, K30T, K67R, K86L, L165M, L173M, L300A, L317E, L317Q, L317V, L326C, N11G, N229W, N97E, P71T, S17P, S210V, S241E, S271G, T40P, T40S, V56I, or V95A, wherein the amino acid positions are relative to the reference sequence corresponding to residues 12 to 346 of SEQ ID NO: 2674, or relative to the reference sequence corresponding to SEQ ID NO: 2674.

[0329] In some embodiments, the engineered RNA ligase comprises an amino acid sequence having at least 70%, 75%, 80%, 81%, 82%, 83%, 84%, 85%, 86%, 87%, 88%, 89%, 90%, 91%, 92%, 93%, 94%, 95%, 96%, 97%, 98%, 99%, or more sequence identity to the reference sequence corresponding to residues 12 to 346 of SEQ ID NO: 2754, or to the reference sequence corresponding to SEQ ID NO: 2754, wherein the amino acid sequence comprises one or more substitutions relative to the reference sequence corresponding to residues 12 to 346 of SEQ ID NO: 2754, or relative to the reference sequence corresponding to SEQ ID NO: 2754.

[0330] In some embodiments, the engineered RNA ligase comprises an amino acid sequence having at least 70%, 75%, 80%, 81%, 82%, 83%, 84%, 85%, 86%, 87%, 88%, 89%, 90%, 91%, 92%, 93%, 94%, 95%, 96%, 97%, 98%, 99%, or more sequence identity to the reference sequence corresponding to residues 12 to 346 of an even-numbered SEQ ID NO. of SEQ ID NOs: 2784-2820, or to the reference sequence corresponding to an even-numbered SEQ ID NO. of SEQ ID NOs: 2784-2820, wherein the amino acid sequence comprises one or more substitutions relative to the reference sequence corresponding to residues 12 to 346 of SEQ ID NO: 2754, or relative to the reference sequence corresponding to SEQ ID NO: 2754.

[0331] In some embodiments, the amino acid sequence of the engineered RNA ligase comprises at least a substitution or substitution set at amino acid position(s) 106/264/280, 280/330, 28/106/264/291, 28/264/280/330, 57/60/135/264/291, 28/135/264/280, 106/264/280/291, 28/106/264/280, 280/299, 28/57/89/106/264/280/291, 264, 185/291, 28/106/299, 28/214/264/299, 264/330, 28/89/214/291, 28/185/271/310, 122/271, or 89/106/135/264/280/330, wherein the amino acid positions are relative to the reference sequence corresponding to residues 12 to 346 of SEQ ID NO: 2754, or relative to the reference sequence corresponding to SEQ ID NO: 2754.

[0332] In some embodiments, the amino acid sequence of the engineered RNA ligase comprises at least a substitution or substitution set or amino acid residue(s) 106R/264E/280L, 280L/330A, 28L/106M/264S/291S, 28L/264E/280L/330A, 57V/60R/135V/264S/291S, 28L/135V/264S/280L, 106L/264E/280L/291S, 28L/106L/264S/280L, 280L/2991, 28L/57V/89G/106L/264S/280L/291S, 264S, 185S/291S, 28L/106M/299V, 28L/214Y/264S/299V, 264E/330A, 28V/89N/214Q/291S, 28V/185K/271G/310H, 122T/271G, or 89N/106M/135V/264E/280L/330A, wherein the amino acid positions are relative to the reference sequence corresponding to residues 12 to 346 of SEQ ID NO: 2754, or relative to the reference sequence corresponding to SEQ ID NO: 2754.

[0333] In some embodiments, the amino acid sequence of the engineered RNA ligase comprises at least a substitution or substitution set or amino acid residue(s) S106R/K264E/S280L, S280L/T330A, I28L/S106M/K264S/Q291S, I28L/K264E/S280L/T330A, I57V/P60R/L135V/K264S/Q291S, I28L/L135V/K264S/S280L, S106L/K264E/S280L/Q291S, I28L/S106L/K264S/S280L, S280L/G299I, I28L/I57V/M89G/S106L/K264S/S280L/Q291S, K264S, N185S/Q291S, I28L/S106M/G299V, I28L/L214Y/K264S/G299V, K264E/T330A, I28V/M89N/L214Q/Q291S, I28V/N185K/S271G/A310H, F122T/S271G, M89N/S106M/L135V/K264E/S280L/T330A, wherein the amino acid positions are relative to the reference sequence corresponding to residues 12 to 346 of SEQ ID NO: 2754, or relative to the reference sequence corresponding to SEQ ID NO: 2754.

[0334] In some embodiments, the engineered RNA ligase comprises an amino acid sequence having at least 70%, 75%, 80%, 81%, 82%, 83%, 84%, 85%, 86%, 87%, 88%, 89%, 90%, 91%, 92%, 93%, 94%, 95%, 96%, 97%, 98%, 99%, or more sequence identity to the reference sequence corresponding to residues 12 to 346 of SEQ ID NO: 2786, or to the reference sequence corresponding to SEQ ID NO: 2786, wherein the amino acid sequence comprises one or more substitutions relative to the reference sequence corresponding to residues 12 to 346 of SEQ ID NO: 2786, or relative to the reference sequence corresponding to SEQ ID NO: 2786.

[0335] In some embodiments, the engineered RNA ligase comprises an amino acid sequence having at least 70%, 75%, 80%, 81%, 82%, 83%, 84%, 85%, 86%, 87%, 88%, 89%, 90%, 91%, 92%, 93%, 94%, 95%, 96%, 97%, 98%, 99%, or more sequence identity to the reference sequence corresponding to residues 12 to 346 of an even-numbered SEQ ID NO. of SEQ ID NOs: 3014-3058, or to the reference sequence corresponding to an even-numbered SEQ ID NO. of SEQ ID NOs: 3014-3058, wherein the amino acid sequence comprises one or more substitutions relative to the reference sequence corresponding to residues 12 to 346 of SEQ ID NO: 2786, or relative to the reference sequence corresponding to SEQ ID NO: 2786.

[0336] In some embodiments, the amino acid sequence of the engineered RNA ligase comprises at least a substitution or substitution set at amino acid position(s) 25/228/248/264, 32/113/228/248, 25/32/113/241/248/264/299, 25/113/248/264/318, 25/127/228/264/299/318, 25/113/228/248/327, 228/241/264, 264/299/318/327, 25/113/241/248/264/318, 25/127/248/299/318, 113/127/228/264/299, 25/127, 25/228/248/264/327, 25/113/264/299, 32/113/264/318, 25/32/241/264/327, 113/264/327, 25/127/228/248/318, 327, 32/113/254/264, 25/228/241/264, 25/113/228/241/318, or 113/327, wherein the amino acid positions are relative to the reference sequence corresponding to residues 12 to 346 of SEQ ID NO: 2786, or relative to the reference sequence corresponding to SEQ ID NO: 2786.

[0337] In some embodiments, the amino acid sequence of the engineered RNA ligase comprises at least a substitution or substitution set or amino acid residue(s) 25D/228L/248G/264S, 32E/113M/228L/248G, 25D/32E/113L/241E/248G/264S/299E, 25D/113M/248G/264E/318E, 25D/127P/228L/264S/299E/318E, 25D/113M/228L/248G/327E, 228L/241E/264E, 264S/299E/318E/327E, 25D/113M/241E/248G/264S/318E, 25D/127P/248G/299E/318E, 113M/127P/228L/264E/299E, 25D/127P, 25D/228D/248G/264E/327E, 25D/113M/264E/299E, 32E/113M/264S/318E, 25D/32E/241E/264S/327E, 113M/264E/327E, 25D/127P/228D/248G/318E, 327E, 32E/113M/254E/264E, 25D/228L/241E/264E, 25D/113M/228L/241E/318E, of 113M/327E, wherein the amino acid positions are relative to the reference sequence corresponding to residues 12 to 346 of SEQ ID NO: 2786, or relative to the reference sequence corresponding to SEQ ID NO: 2786.

[0338] In some embodiments, the amino acid sequence of the engineered RNA ligase comprises at least a substitution or substitution set or amino acid residue(s) A25D/F228L/F248G/K264S, R32E/F113M/F228L/F248G, A25D/R32E/F113L/S241E/F248G/K264S/G299E, A25D/F113M/F248G/K264E/F318E, A25D/K127P/F228L/K264S/G299E/F318E, A25D/F113M/F228L/F248G/K327E, F228L/S241E/K264E, K264S/G299E/F318E/K327E, A25D/F113M/S241E/F248G/K264S/F318E, A25D/K127P/F248G/G299E/F318E, F113M/K127P/F228L/K264E/G299E, A25D/K127P, A25D/F228D/F248G/K264E/K327E, A25D/F113M/K264E/G299E, R32E/F113M/K264S/F318E, A25D/R32E/S241E/K264S/K327E, F113M/K264E/K327E, A25D/K127P/F228D/F248G/F318E, K327E, R32E/F113M/K254E/K264E, A25D/F228L/S241E/K264E, A25D/F113M/F228L/S241E/F318E, or F113M/K327E, wherein the amino acid positions are relative to the reference sequence corresponding to residues 12 to 346 of SEQ ID NO: 2786, or relative to the reference sequence corresponding to SEQ ID NO: 2786.

[0339] In some embodiments, the amino acid sequence of the engineered RNA ligase comprises at least a substitution at an amino acid position provided in Tables 6.1, 6.2, 7.1, 8.1, 8.2, 9.1, 10.1, 11.1, 12.1, 13.1, 14.1, 15.1, 16.1, 17.1, 18.1, 19.1, 20.1, 21.1, 22.1, 23.1, 24.1, 25.1, and 26.1, wherein the amino acid positions are relative to the reference sequence corresponding to residues 12 to 346 of SEQ ID NO: 54, 244, 648, 862, 956, 1088, 1416, 1612, 1840, 1866, 1954, 2062, 2674, 2754, or 2786, or relative to the reference sequence corresponding to SEQ ID NO: 54, 244, 648, 862, 956, 1088, 1416, 1612, 1840, 1866, 1954, 2062, 2674, 2754, or 2786.

[0340] In some embodiments, the amino acid sequence of the engineered RNA ligase comprises at least one substitution provided in Tables 6.1, 6.2, 7.1, 8.1, 8.2, 9.1, 10.1, 11.1, 12.1, 13.1, 14.1, 15.1, 16.1, 17.1, 18.1, 19.1, 20.1, 21.1, 22.1, 23.1, 24.1, 25.1, and 26.1, wherein the amino acid positions are relative to the reference sequence corresponding to residues 12 to 346 of SEQ ID NO: 54, 244, 648, 862, 956, 1088, 1416, 1612, 1840, 1866, 1954, 2062, 2674, 2754, or 2786, or relative to the reference sequence corresponding to SEQ ID NO: 54, 244, 648, 862, 956, 1088, 1416, 1612, 1840, 1866, 1954, 2062, 2674, 2754, or 2786.

[0341] In some embodiments, the amino acid sequence of the engineered RNA ligase comprises at least a substitution or substitution set at the amino acid position(s) provided in Tables 6.1, 6.2, 7.1, 8.1, 8.2, 9.1, 10.1, 11.1, 12.1, 13.1, 14.1, 15.1, 16.1, 17.1, 18.1, 19.1, 20.1, 21.1, 22.1, 23.1, 24.1, 25.1, and 26.1, wherein the amino acid positions are relative to the reference sequence corresponding to residues 12 to 346 of SEQ ID NO: 54, 244, 648, 862, 956, 1088, 1416, 1612, 1840, 1866, 1954, 2062, 2674, 2754, or 2786, or relative to the reference sequence corresponding to SEQ ID NO: 54, 244, 648, 862, 956, 1088, 1416, 1612, 1840, 1866, 1954, 2062, 2674, 2754, or 2786.

[0342] In some embodiments, the amino acid sequence of the engineered RNA ligase comprises at least a substitution or substitution set of an RNA ligase variant provided in Tables 6.1, 6.2, 7.1, 8.1, 8.2, 9.1, 10.1, 11.1, 12.1, 13.1, 14.1, 15.1, 16.1, 17.1, 18.1, 19.1, 20.1, 21.1, 22.1, 23.1, 24.1, 25.1, and 26.1, wherein the amino acid positions are relative to the reference sequence corresponding to residues 12 to 346 of SEQ ID NO: 54, 244, 648, 862, 956, 1088, 1416, 1612, 1840, 1866, 1954, 2062, 2674, 2754, or 2786, or relative to the reference sequence corresponding to SEQ ID NO: 54, 244, 648, 862, 956, 1088, 1416, 1612, 1840, 1866, 1954, 2062, 2674, 2754, or 2786.

[0343] In some embodiments, the engineered RNA ligase comprises an amino acid sequence having least 70%, 75%, 80%, 81%, 82%, 83%, 84%, 85%, 86%, 87%, 88%, 89%, 90%, 91%, 92%, 93%, 94%, 95%, 96%, 97%, 98%, 99% or more sequence identity to a reference sequence comprising a substitution or substitution set provided in Tables 6.1, 6.2, 7.1, 8.1, 8.2, 9.1, 10.1, 11.1, 12.1, 13.1, 14.1, 15.1, 16.1, 17.1, 18.1, 19.1, 20.1, 21.1, 22.1, 23.1, 24.1, 25.1, and 26.1, wherein the amino acid positions are relative to the reference sequence corresponding to residues 12 to 346 of SEQ ID NO: 54, 244, 648, 862, 956, 1088, 1416, 1612, 1840, 1866, 1954, 2062, 2674, 2754, or 2786, or relative to the reference sequence corresponding to SEQ ID NO: 54, 244, 648, 862, 956, 1088, 1416, 1612, 1840, 1866, 1954, 2062, 2674, 2754, or 2786.

[0344] In some embodiments, the engineered RNA ligase comprises an amino acid sequence having least 70%, 75%, 80%, 81%, 82%, 83%, 84%, 85%, 86%, 87%, 88%, 89%, 90%, 91%, 92%, 93%, 94%, 95%, 96%, 97%, 98%, 99% or more sequence identity to the sequence comprising residues 12 to 346 of an engineered RNA ligase set forth in Tables 6.1, 6.2, 7.1, 8.1, 8.2, 9.1, 10.1, 11.1, 12.1, 13.1, 14.1, 15.1, 16.1, 17.1, 18.1, 19.1, 20.1, 21.1, 22.1, 23.1, 24.1, 25.1, and 26.1, or to the sequence of an engineered RNA ligase set forth in Tables 6.1, 6.2, 7.1, 8.1, 8.2, 9.1, 10.1, 11.1, 12.1, 13.1, 14.1, 15.1, 16.1, 17.1, 18.1, 19.1, 20.1, 21.1, 22.1, 23.1, 24.1, 25.1, and 26.1.

[0345] In some embodiments, the engineered RNA ligase comprises an amino acid sequence having at least 70%, 75%, 80%, 81%, 82%, 83%, 84%, 85%, 86%, 87%, 88%, 89%, 90%, 91%, 92%, 93%, 94%, 95%, 96%, 97%, 98%, 99% or more sequence identity to the sequence corresponding to residues 12 to 346 of SEQ ID NO: 4, 6, 8, 10, 12, 14, 16, 18, 20, 22, 24, 26, 28, 30, 32, 34, 36, 38, 40, 42, 44, 46, 48, 50, 52, 54, 56, 58, 60, 62, 64, 66, 68, 70, 72, 74, 76, 78, 80, 82, 84, 86, 88, 90, 92, 94, 96, 98, 100, 102, 104, 106, 108, 110, 112, 114, 116, 118, 120, 122, 124, 126, 128, 130, 132, 134, 136, 138, 140, 142, 144, 146, 148, 150, 152, 154, 156, 158, 160, 162, 164, 166, 168, 170, 172, 174, 176, 178, 180, 182, 184, 186, 188, 190, 192, 194, 196, 198, 200, 202, 204, 206, 208, 210, 212, 214, 216, 218, 220, 222, 224, 226, 228, 230, 232, 234, 236, 238, 240, 242, 244, 246, 248, 250, 252, 254, 256, 258, 260, 262, 264, 266, 268, 270, 272, 274, 276, 278, 280, 282, 284, 286, 288, 290, 292, 294, 296, 298, 300, 302, 304, 306, 308, 310, 312, 314, 316, 318, 320, 322, 324, 326, 328, 330, 332, 334, 336, 338, 340, 342, 344, 346, 348, 350, 352, 354, 356, 358, 360, 362, 364, 366, 368, 370, 372, 374, 376, 378, 380, 382, 384, 386, 388, 390, 392, 394, 396, 398, 400, 402, 404, 406, 408, 410, 412, 414, 416, 418, 420, 422, 424, 426, 428, 430, 432, 434, 436, 438, 440, 442, 444, 446, 448, 450, 452, 454, 456, 458, 460, 462, 464, 466, 468, 470, 472, 474, 476, 478, 480, 482, 484, 486, 488, 490, 492, 494, 496, 498, 500, 502, 504, 506, 508, 510, 512, 514, 516, 518, 520, 522, 524, 526, 528, 530, 532, 534, 536, 538, 540, 542, 544, 546, 548, 550, 552, 554, 556, 558, 560, 562, 564, 566, 568, 570, 572, 574, 576, 578, 580, 582, 584, 586, 588, 590, 592, 594, 596, 598, 600, 602, 604, 606, 608, 610, 612, 614, 616, 618, 620, 622, 624, 626, 628, 630, 632, 634, 636, 638, 640, 642, 644, 646, 648, 650, 652, 654, 656, 658, 660, 662, 664, 666, 668, 670, 672, 674, 676, 678, 680, 682, 684, 686, 688, 690, 692, 694, 696, 698, 700, 702, 704, 706, 708, 710, 712, 714, 716, 718, 720, 722, 724, 726, 728, 730, 732, 734, 736, 738, 740, 742, 744, 746, 748, 750, 752, 754, 756, 758, 760, 762, 764, 766, 768, 770, 772, 774, 776, 778, 780, 782, 784, 786, 788, 790, 792, 794, 796, 798, 800, 802, 804, 806, 808, 810, 812, 814, 816, 818, 820, 822, 824, 826, 828, 830, 832, 834, 836, 838, 840, 842, 844, 846, 848, 850, 852, 854, 856, 858, 860, 862, 864, 866, 868, 870, 872, 874, 876, 878, 880, 882, 884, 886, 888, 890, 892, 894, 896, 898, 900, 902, 904, 906, 908, 910, 912, 914, 916, 918, 920, 922, 924, 926, 928, 930, 932, 934, 936, 938, 940, 942, 944, 946, 948, 950, 952, 954, 956, 958, 960, 962, 964, 966, 968, 970, 972, 974, 976, 978, 980, 982, 984, 986, 988, 990, 992, 994, 996, 998, 1000, 1002, 1004, 1006, 1008, 1010, 1012, 1014, 1016, 1018, 1020, 1022, 1024, 1026, 1028, 1030, 1032, 1034, 1036, 1038, 1040, 1042, 1044, 1046, 1048, 1050, 1052, 1054, 1056, 1058, 1060, 1062, 1064, 1066, 1068, 1070, 1072, 1074, 1076, 1078, 1080, 1082, 1084, 1086, 1088, 1090, 1092, 1094, 1096, 1098, 1100, 1102, 1104, 1106, 1108, 1110, 1112, 1114, 1116, 1118, 1120, 1122, 1124, 1126, 1128, 1130, 1132, 1134, 1136, 1138, 1140, 1142, 1144, 1146, 1148, 1150, 1152, 1154, 1156, 1158, 1160, 1162, 1164, 1166, 1168, 1170, 1172, 1174, 1176, 1178, 1180, 1182, 1184, 1186, 1188, 1190, 1192, 1194, 1196, 1198, 1200, 1202, 1204, 1206, 1208, 1210, 1212, 1214, 1216, 1218, 1220, 1222, 1224, 1226, 1228, 1230, 1232, 1234, 1236, 1238, 1240, 1242, 1244, 1246, 1248, 1250, 1252, 1254, 1256, 1258, 1260, 1262, 1264, 1266, 1268, 1270, 1272, 1274, 1276, 1278, 1280, 1282, 1284, 1286, 1288, 1290, 1292, 1294, 1296, 1298, 1300, 1302, 1304, 1306, 1308, 1310, 1312, 1314, 1316, 1318, 1320, 1322, 1324, 1326, 1328, 1330, 1332, 1334, 1336, 1338, 1340, 1342, 1344, 1346, 1348, 1350, 1352, 1354, 1356, 1358, 1360, 1362, 1364, 1366, 1368, 1370, 1372, 1374, 1376, 1378, 1380, 1382, 1384, 1386, 1388, 1390, 1392, 1394, 1396, 1398, 1400, 1402, 1404, 1406, 1408, 1410, 1412, 1414, 1416, 1418, 1420, 1422, 1424, 1426, 1428, 1430, 1432, 1434, 1436, 1438, 1440, 1442, 1444, 1446, 1448, 1450, 1452, 1454, 1456, 1458, 1460, 1462, 1464, 1466, 1468, 1470, 1478, 1480, 1482, 1484, 1486, 1488, 1490, 1492, 1494, 1496, 1498, 1500, 1502, 1504, 1506, 1508, 1510, 1512, 1514, 1516, 1518, 1520, 1522, 1524, 1526, 1528, 1530, 1532, 1534, 1536, 1538, 1540, 1542, 1544, 1546, 1548, 1550, 1552, 1554, 1556, 1558, 1560, 1562, 1564, 1566, 1568, 1570, 1572, 1574, 1576, 1578, 1580, 1582, 1584, 1586, 1588, 1590, 1592, 1594, 1596, 1598, 1600, 1602, 1604, 1606, 1608, 1610, 1612, 1614, 1616, 1618, 1620, 1622, 1624, 1626, 1628, 1630, 1632, 1634, 1636, 1638, 1640, 1642, 1644, 1646, 1648, 1650, 1652, 1654, 1656, 1658, 1660, 1662, 1664, 1666, 1668, 1670, 1672, 1674, 1676, 1678, 1680, 1682, 1684, 1686, 1688, 1690, 1692, 1694, 1696, 1698, 1700, 1702, 1704, 1706, 1708, 1710, 1712, 1714, 1716, 1718, 1720, 1722, 1724, 1726, 1728, 1730, 1732, 1734, 1736, 1738, 1740, 1742, 1744, 1746, 1748, 1750, 1752, 1754, 1756, 1758, 1760, 1762, 1764, 1766, 1768, 1770, 1772, 1774, 1776, 1778, 1780, 1782, 1784, 1786, 1788, 1790, 1792, 1794, 1796, 1798, 1800, 1802, 1804, 1806, 1808, 1810, 1812, 1814, 1816, 1818, 1820, 1822, 1824, 1826, 1828, 1830, 1832, 1834, 1836, 1838, 1840, 1842, 1844, 1846, 1848, 1850, 1852, 1854, 1856, 1858, 1860, 1862, 1864, 1866, 1868, 1870, 1872, 1874, 1876, 1878, 1880, 1882, 1884, 1886, 1888, 1890, 1892, 1894, 1896, 1898, 1900, 1902, 1904, 1906, 1908, 1910, 1912, 1914, 1916, 1918, 1920, 1922, 1924, 1926, 1928, 1930, 1932, 1934, 1936, 1938, 1940, 1942, 1944, 1946, 1948, 1950, 1952, 1954, 1956, 1958, 1960, 1962, 1964, 1966, 1968, 1970, 1972, 1974, 1976, 1978, 1980, 1982, 1984, 1986, 1988, 1990, 1992, 1994, 1996, 1998, 2000, 2002. 2004, 2006, 2008, 2010, 2012, 2014, 2016, 2018, 2020, 2022, 2024, 2026, 2028, 2030, 2032, 2034, 2036, 2038, 2040, 2042, 2044, 2046, 2048, 2050, 2052, 2054, 2056, 2058, 2060, 2062, 2064, 2066, 2068, 2070, 2072, 2074, 2076, 2078, 2080, 2082, 2084, 2086, 2088, 2090, 2092, 2094, 2096, 2098, 2100, 2102, 2104, 2106, 2108, 2110, 2112, 2114, 2116, 2118, 2120, 2122, 2124, 2126, 2128, 2130, 2132, 2134, 2136, 2138, 2140, 2142, 2144, 2146, 2148, 2150, 2152, 2154, 2156, 2158, 2160, 2162, 2164, 2166, 2168, 2170, 2172, 2174, 2176, 2178, 2180, 2182, 2184, 2186, 2188, 2190, 2192, 2194, 2196, 2198, 2200, 2202, 2204, 2206, 2208, 2210, 2212, 2214, 2216, 2218, 2220, 2222, 2224, 2226, 2228, 2230, 2232, 2234, 2236, 2238, 2240, 2242, 2244, 2246, 2248, 2250, 2252, 2254, 2256, 2258, 2260, 2262, 2264, 2266, 2268, 2270, 2272, 2274, 2276, 2278, 2280, 2282, 2284, 2286, 2288, 2290, 2292, 2294, 2296, 2298, 2300, 2302, 2304, 2306, 2308, 2310, 2312, 2314, 2316, 2318, 2320, 2322, 2324, 2326, 2328, 2330, 2332, 2334, 2336, 2338, 2340, 2342, 2344, 2346, 2348, 2350, 2352, 2354, 2356, 2358, 2360, 2362, 2364, 2366, 2368, 2370, 2372, 2374, 2376, 2378, 2380, 2382, 2384, 2386, 2388, 2390, 2392, 2394, 2396, 2398, 2400, 2402, 2404, 2406, 2408, 2410, 2412, 2414, 2416, 2418, 2420, 2422, 2424, 2426, 2428, 2430, 2432, 2434, 2436, 2438, 2440, 2442, 2444, 2446, 2448, 2450, 2452, 2454, 2456, 2458, 2460, 2462, 2464, 2466, 2468, 2470, 2472, 2474, 2476, 2478, 2480, 2482, 2484, 2486, 2488, 2490, 2492, 2494, 2496, 2498, 2500, 2502, 2504, 2506, 2508, 2510, 2512, 2514, 2516, 2518, 2520, 2522, 2524, 2526, 2528, 2530, 2532, 2534, 2536, 2538, 2540, 2542, 2544, 2546, 2548, 2550, 2552, 2554, 2556, 2558, 2560, 2562, 2564, 2566, 2568, 2570, 2572, 2574, 2576, 2578, 2580, 2582, 2584, 2586, 2588, 2590, 2592, 2594, 2596, 2598, 2600, 2602, 2604, 2606, 2608, 2610, 2612, 2614, 2616, 2618, 2620, 2622, 2624, 2626, 2628, 2630, 2632, 2634, 2636, 2638, 2640, 2642, 2644, 2646, 2648, 2650, 2652, 2654, 2656, 2658, 2660, 2662, 2664, 2666, 2668, 2670, 2672, 2674, 2676, 2678, 2680, 2682, 2684, 2686, 2688, 2690, 2692, 2694, 2696, 2698, 2700, 2702, 2704, 2706, 2708, 2710, 2712, 2714, 2716, 2718, 2720, 2722, 2724, 2726, 2728, 2730, 2732, 2734, 2736, 2738, 2740, 2742, 2744, 2746, 2748, 2750, 2752, 2754, 2756, 2758, 2760, 2762, 2764, 2766, 2768, 2770, 2772, 2774, 2776, 2778, 2780, 2782, 2784, 2786, 2788, 2790, 2792, 2794, 2796, 2798, 2800, 2802, 2804, 2806, 28208, 2810, 2812, 2814, 2816, 2818, 2820, 2822, 2824, 2826, 2828, 2830, 2832, 2834, 2836, 2838, 2840, 2842, 2844, 2846, 2848, 2850, 2852, 2854, 2856, 2858, 2860, 2862, 2864, 2866, 2868, 2870, 2872, 2874, 2876, 2878, 2880, 2882, 2884, 2886, 2888, 2890, 2892, 2894, 2896, 2898, 2900, 2902, 2904, 2906, 2908, 2910, 2912, 2914, 2916, 2918, 2920, 2922, 2924, 2926, 2928, 2930, 2932, 2934, 2936, 2938, 2940, 2942, 2944, 2946, 2948, 2950, 2952, 2954, 2956, 2958, 2960, 2962, 2964, 2966, 2968, 2970, 2972, 2974, 2976, 2978, 2980, 2982, 2984, 2986, 2988, 2990, 2992, 2994, 2996, 2998, 3000, 3002, 3004, 3006, 3008, 3010, 3012, 3014, 3016, 3018, 3020, 3022, 3024, 3026, 3028, 3030, 3032, 3034, 3036, 3038, 3040, 3042, 3044, 3046, 3048, 3050, 3052, 3054, 3056, or 3058.

[0346] In some embodiments, the engineered RNA ligase comprises an amino acid sequence having at least 70%, 75%, 80%, 85%, 86%, 87%, 88%, 89%, 90%, 91%, 92%, 93%, 94%, 95%, 96%, 97%, 98%, 99% or more sequence identity to the sequence corresponding to SEQ ID NO: 4, 6, 8, 10, 12, 14, 16, 18, 20, 22, 24, 26, 28, 30, 32, 34, 336, 38, 40, 42, 44, 46, 48, 50, 52, 54, 56, 58, 60, 62, 64, 66, 68, 70, 72, 74, 76, 78, 80, 82, 84, 86, 88, 90, 92, 94, 96, 98, 100, 102, 104, 106, 108, 110, 112, 114, 116, 118, 120, 122, 124, 126, 128, 130, 132, 134, 136, 138, 140, 142, 144, 146, 148, 150, 152, 154, 156, 158, 160, 162, 164, 166, 168, 170, 172, 174, 176, 178, 180, 182, 184, 186, 188, 190, 192, 194, 196, 198, 200, 202, 204, 206, 208, 210, 212, 214, 216, 218, 220, 222, 224, 226, 228, 230, 232, 234, 236, 238, 240, 242, 244, 246, 248, 250, 252, 254, 256, 258, 260, 262, 264, 266, 268, 270, 272, 274, 276, 278, 280, 282, 284, 286, 288, 290, 292, 294, 296, 298, 300, 302, 304, 306, 308, 310, 312, 314, 316, 318, 320, 322, 324, 326, 328, 330, 332, 334, 336, 338, 340, 342, 344, 346, 348, 350, 352, 354, 356, 358, 360, 362, 364, 366, 368, 370, 372, 374, 376, 378, 380, 382, 384, 386, 388, 390, 392, 394, 396, 398, 400, 402, 404, 406, 408, 410, 412, 414, 416, 418, 420, 422, 424, 426, 428, 430, 432, 434, 436, 438, 440, 442, 444, 446, 448, 450, 452, 454, 456, 458, 460, 462, 464, 466, 468, 470, 472, 474, 476, 478, 480, 482, 484, 486, 488, 490, 492, 494, 496, 498, 500, 502, 504, 506, 508, 510, 512, 514, 516, 518, 520, 522, 524, 526, 528, 530, 532, 534, 536, 538, 540, 542, 544, 546, 548, 550, 552, 554, 556, 558, 560, 562, 564, 566, 568, 570, 572, 574, 576, 578, 580, 582, 584, 586, 588, 590, 592, 594, 596, 598, 600, 602, 604, 606, 608, 610, 612, 614, 616, 618, 620, 622, 624, 626, 628, 630, 632, 634, 636, 638, 640, 642, 644, 646, 648, 650, 652, 654, 656, 658, 660, 662, 664, 666, 668, 670, 672, 674, 676, 678, 680, 682, 684, 686, 688, 690, 692, 694, 696, 698, 700, 702, 704, 706, 708, 710, 712, 714, 716, 718, 720, 722, 724, 726, 728, 730, 732, 734, 736, 738, 740, 742, 744, 746, 748, 750, 752, 754, 756, 758, 760, 762, 764, 766, 768, 770, 772, 774, 776, 778, 780, 782, 784, 786, 788, 790, 792, 794, 796, 798, 800, 802, 804, 806, 808, 810, 812, 814, 816, 818, 820, 822, 824, 826, 828, 830, 832, 834, 836, 838, 840, 842, 844, 846, 848, 850, 852, 854, 856, 858, 860, 862, 864, 866, 868, 870, 872, 874, 876, 878, 880, 882, 884, 886, 888, 890, 892, 894, 896, 898, 900, 902, 904, 906, 908, 910, 912, 914, 916, 918, 920, 922, 924, 926, 928, 930, 932, 934, 936, 938, 940, 942, 944, 946, 948, 950, 952, 954, 956, 958, 960, 962, 964, 966, 968, 970, 972, 974, 976, 978, 980, 982, 984, 986, 988, 990, 992, 994, 996, 998, 1000, 1002, 1004, 1006, 1008, 1010, 1012, 1014, 1016, 1018, 1020, 1022, 1024, 1026, 1028, 1030, 1032, 1034, 1036, 1038, 1040, 1042, 1044, 1046, 1048, 1050, 1052, 1054, 1056, 1058, 1060, 1062, 1064, 1066, 1068, 1070, 1072, 1074, 1076, 1078, 1080, 1082, 1084, 1086, 1088, 1090, 1092, 1094, 1096, 1098, 1100, 1102, 1104, 1106, 1108, 1110, 1112, 1114, 1116, 1118, 1120, 1122, 1124, 1126, 1128, 1130, 1132, 1134, 1136, 1138, 1140, 1142, 1144, 1146, 1148, 1150, 1152, 1154, 1156, 1158, 1160, 1162, 1164, 1166, 1168, 1170, 1172, 1174, 1176, 1178, 1180, 1182, 1184, 1186, 1188, 1190, 1192, 1194, 1196, 1198, 1200, 1202, 1204, 1206, 1208, 1210, 1212, 1214, 1216, 1218, 1220, 1222, 1224, 1226, 1228, 1230, 1232, 1234, 1236, 1238, 1240, 1242, 1244, 1246, 1248, 1250, 1252, 1254, 1256, 1258, 1260, 1262, 1264, 1266, 1268, 1270, 1272, 1274, 1276, 1278, 1280, 1282, 1284, 1286, 1288, 1290, 1292, 1294, 1296, 1298, 1300, 1302, 1304, 1306, 1308, 1310, 1312, 1314, 1316, 1318, 1320, 1322, 1324, 1326, 1328, 1330, 1332, 1334, 1336, 1338, 1340, 1342, 1344, 1346, 1348, 1350, 1352, 1354, 1356, 1358, 1360, 1362, 1364, 1366, 1368, 1370, 1372, 1374, 1376, 1378, 1380, 1382, 1384, 1386, 1388, 1390, 1392, 1394, 1396, 1398, 1400, 1402, 1404, 1406, 1408, 1410, 1412, 1414, 1416, 1418, 1420, 1422, 1424, 1426, 1428, 1430, 1432, 1434, 1436, 1438, 1440, 1442, 1444, 1446, 1448, 1450, 1452, 1454, 1456, 1458, 1460, 1462, 1464, 1466, 1468, 1470, 1478, 1480, 1482, 1484, 1486, 1488, 1490, 1492, 1494, 1496, 1498, 1500, 1502, 1504, 1506, 1508, 1510, 1512, 1514, 1516, 1518, 1520, 1522, 1524, 1526, 1528, 1530, 1532, 1534, 1536, 1538, 1540, 1542, 1544, 1546, 1548, 1550, 1552, 1554, 1556, 1558, 1560, 1562, 1564, 1566, 1568, 1570, 1572, 1574, 1576, 1578, 1580, 1582, 1584, 1586, 1588, 1590, 1592, 1594, 1596, 1598, 1600, 1602, 1604, 1606, 1608, 1610, 1612, 1614, 1616, 1618, 1620, 1622, 1624, 1626, 1628, 1630, 1632, 1634, 1636, 1638, 1640, 1642, 1644, 1646, 1648, 1650, 1652, 1654, 1656, 1658, 1660, 1662, 1664, 1666, 1668, 1670, 1672, 1674, 1676, 1678, 1680, 1682, 1684, 1686, 1688, 1690, 1692, 1694, 1696, 1698, 1700, 1702, 1704, 1706, 1708, 1710, 1712, 1714, 1716, 1718, 1720, 1722, 1724, 1726, 1728, 1730, 1732, 1734, 1736, 1738, 1740, 1742, 1744, 1746, 1748, 1750, 1752, 1754, 1756, 1758, 1760, 1762, 1764, 1766, 1768, 1770, 1772, 1774, 1776, 1778, 1780, 1782, 1784, 1786, 1788, 1790, 1792, 1794, 1796, 1798, 1800, 1802, 1804, 1806, 1808, 1810, 1812, 1814, 1816, 1818, 1820, 1822, 1824, 1826, 1828, 1830, 1832, 1834, 1836, 1838, 1840, 1842, 1844, 1846, 1848, 1850, 1852, 1854, 1856, 1858, 1860, 1862, 1864, 1866, 1868, 1870, 1872, 1874, 1876, 1878, 1880, 1882, 1884, 1886, 1888, 1890, 1892, 1894, 1896, 1898, 1900, 1902, 1904, 1906, 1908, 1910, 1912, 1914, 1916, 1918, 1920, 1922, 1924, 1926, 1928, 1930, 1932, 1934, 1936, 1938, 1940, 1942, 1944, 1946, 1948, 1950, 1952, 1954, 1956, 1958, 1960, 1962, 1964, 1966, 1968, 1970, 1972, 1974, 1976, 1978, 1980, 1982, 1984, 1986, 1988, 1990, 1992, 1994, 1996, 1998, 2000, 2002. 2004, 2006, 2008, 2010, 2012, 2014, 2016, 2018, 2020, 2022, 2024, 2026, 2028, 2030, 2032, 2034, 2036, 2038, 2040, 2042, 2044, 2046, 2048, 2050, 2052, 2054, 2056, 2058, 2060, 2062, 2064, 2066, 2068, 2070, 2072, 2074, 2076, 2078, 2080, 2082, 2084, 2086, 2088, 2090, 2092, 2094, 2096, 2098, 2100, 2102, 2104, 2106, 2108, 2110, 2112, 2114, 2116, 2118, 2120, 2122, 2124, 2126, 2128, 2130, 2132, 2134, 2136, 2138, 2140, 2142, 2144, 2146, 2148, 2150, 2152, 2154, 2156, 2158, 2160, 2162, 2164, 2166, 2168, 2170, 2172, 2174, 2176, 2178, 2180, 2182, 2184, 2186, 2188, 2190, 2192, 2194, 2196, 2198, 2200, 2202, 2204, 2206, 2208, 2210, 2212, 2214, 2216, 2218, 2220, 2222, 2224, 2226, 2228, 2230, 2232, 2234, 2236, 2238, 2240, 2242, 2244, 2246, 2248, 2250, 2252, 2254, 2256, 2258, 2260, 2262, 2264, 2266, 2268, 2270, 2272, 2274, 2276, 2278, 2280, 2282, 2284, 2286, 2288, 2290, 2292, 2294, 2296, 2298, 2300, 2302, 2304, 2306, 2308, 2310, 2312, 2314, 2316, 2318, 2320, 2322, 2324, 2326, 2328, 2330, 2332, 2334, 2336, 2338, 2340, 2342, 2344, 2346, 2348, 2350, 2352, 2354, 2356, 2358, 2360, 2362, 2364, 2366, 2368, 2370, 2372, 2374, 2376, 2378, 2380, 2382, 2384, 2386, 2388, 2390, 2392, 2394, 2396, 2398, 2400, 2402, 2404, 2406, 2408, 2410, 2412, 2414, 2416, 2418, 2420, 2422, 2424, 2426, 2428, 2430, 2432, 2434, 2436, 2438, 2440, 2442, 2444, 2446, 2448, 2450, 2452, 2454, 2456, 2458, 2460, 2462, 2464, 2466, 2468, 2470, 2472, 2474, 2476, 2478, 2480, 2482, 2484, 2486, 2488, 2490, 2492, 2494, 2496, 2498, 2500, 2502, 2504, 2506, 2508, 2510, 2512, 2514, 2516, 2518, 2520, 2522, 2524, 2526, 2528, 2530, 2532, 2534, 2536, 2538, 2540, 2542, 2544, 2546, 2548, 2550, 2552, 2554, 2556, 2558, 2560, 2562, 2564, 2566, 2568, 2570, 2572, 2574, 2576, 2578, 2580, 2582, 2584, 2586, 2588, 2590, 2592, 2594, 2596, 2598, 2600, 2602, 2604, 2606, 2608, 2610, 2612, 2614, 2616, 2618, 2620, 2622, 2624, 2626, 2628, 2630, 2632, 2634, 2636, 2638, 2640, 2642, 2644, 2646, 2648, 2650, 2652, 2654, 2656, 2658, 2660, 2662, 2664, 2666, 2668, 2670, 2672, 2674, 2676, 2678, 2680, 2682, 2684, 2686, 2688, 2690, 2692, 2694, 2696, 2698, 2700, 2702, 2704, 2706, 2708, 2710, 2712, 2714, 2716, 2718, 2720, 2722, 2724, 2726, 2728, 2730, 2732, 2734, 2736, 2738, 2740, 2742, 2744, 2746, 2748, 2750, 2752, 2754, 2756, 2758, 2760, 2762, 2764, 2766, 2768, 2770, 2772, 2774, 2776, 2778, 2780, 2782, 2784, 2786, 2788, 2790, 2792, 2794, 2796, 2798, 2800, 2802, 2804, 2806, 28208, 2810, 2812, 2814, 2816, 2818, 2820, 2822, 2824, 2826, 2828, 2830, 2832, 2834, 2836, 2838, 2840, 2842, 2844, 2846, 2848, 2850, 2852, 2854, 2856, 2858, 2860, 2862, 2864, 2866, 2868, 2870, 2872, 2874, 2876, 2878, 2880, 2882, 2884, 2886, 2888, 2890, 2892, 2894, 2896, 2898, 2900, 2902, 2904, 2906, 2908, 2910, 2912, 2914, 2916, 2918, 2920, 2922, 2924, 2926, 2928, 2930, 2932, 2934, 2936, 2938, 2940, 2942, 2944, 2946, 2948, 2950, 2952, 2954, 2956, 2958, 2960, 2962, 2964, 2966, 2968, 2970, 2972, 2974, 2976, 2978, 2980, 2982, 2984, 2986, 2988, 2990, 2992, 2994, 2996, 2998, 3000, 3002, 3004, 3006, 3008, 3010, 3012, 3014, 3016, 3018, 3020, 3022, 3024, 3026, 3028, 3030, 3032, 3034, 3036, 3038, 3040, 3042, 3044, 3046, 3048, 3050, 3052, 3054, 3056, or 3058.

[0347] In some embodiments, the engineered RNA ligase comprises an amino acid sequence comprising residues 12 to 346 of an even numbered SEQ ID NO. of SEQ ID NOs: 4-1470 and 1478-3058, or an amino acid sequence comprising an even numbered SEQ ID NO. of SEQ ID NOs: 4-1470 and 1478-3058. In some embodiments, the amino acid sequence of the engineered RNA ligase optionally includes 1, 2, 3, 4, 5, 6, 7, 8, 9, or up to 10 substitutions, insertions, and/or deletions. In some embodiments, the amino acid sequence of the engineered RNA ligase optionally includes 1, 2, 3, 4, 5, 6, 7, 8, 9, or up to 10 substitutions. In some embodiments, the amino acid sequence of the engineered RNA ligase optionally includes 1, 2, 3, 4, or 5 substitutions, insertions, and/or deletions. In some embodiments, the amino acid sequence of the engineered RNA ligase optionally includes 1, 2, 3, 4, or 5 substitutions.

[0348] In some embodiments, the engineered RNA ligase comprises an amino acid sequence comprising residues 12 to 346 of SEQ ID NO: 4, 6, 8, 10, 12, 14, 16, 18, 20, 22, 24, 26, 28, 30, 32, 34, 336, 38, 40, 42, 44, 46, 48, 50, 52, 54, 56, 58, 60, 62, 64, 66, 68, 70, 72, 74, 76, 78, 80, 82, 84, 86, 88, 90, 92, 94, 96, 98, 100, 102, 104, 106, 108, 110, 112, 114, 116, 118, 120, 122, 124, 126, 128, 130, 132, 134, 136, 138, 140, 142, 144, 146, 148, 150, 152, 154, 156, 158, 160, 162, 164, 166, 168, 170, 172, 174, 176, 178, 180, 182, 184, 186, 188, 190, 192, 194, 196, 198, 200, 202, 204, 206, 208, 210, 212, 214, 216, 218, 220, 222, 224, 226, 228, 230, 232, 234, 236, 238, 240, 242, 244, 246, 248, 250, 252, 254, 256, 258, 260, 262, 264, 266, 268, 270, 272, 274, 276, 278, 280, 282, 284, 286, 288, 290, 292, 294, 296, 298, 300, 302, 304, 306, 308, 310, 312, 314, 316, 318, 320, 322, 324, 326, 328, 330, 332, 334, 336, 338, 340, 342, 344, 346, 348, 350, 352, 354, 356, 358, 360, 362, 364, 366, 368, 370, 372, 374, 376, 378, 380, 382, 384, 386, 388, 390, 392, 394, 396, 398, 400, 402, 404, 406, 408, 410, 412, 414, 416, 418, 420, 422, 424, 426, 428, 430, 432, 434, 436, 438, 440, 442, 444, 446, 448, 450, 452, 454, 456, 458, 460, 462, 464, 466, 468, 470, 472, 474, 476, 478, 480, 482, 484, 486, 488, 490, 492, 494, 496, 498, 500, 502, 504, 506, 508, 510, 512, 514, 516, 518, 520, 522, 524, 526, 528, 530, 532, 534, 536, 538, 540, 542, 544, 546, 548, 550, 552, 554, 556, 558, 560, 562, 564, 566, 568, 570, 572, 574, 576, 578, 580, 582, 584, 586, 588, 590, 592, 594, 596, 598, 600, 602, 604, 606, 608, 610, 612, 614, 616, 618, 620, 622, 624, 626, 628, 630, 632, 634, 636, 638, 640, 642, 644, 646, 648, 650, 652, 654, 656, 658, 660, 662, 664, 666, 668, 670, 672, 674, 676, 678, 680, 682, 684, 686, 688, 690, 692, 694, 696, 698, 700, 702, 704, 706, 708, 710, 712, 714, 716, 718, 720, 722, 724, 726, 728, 730, 732, 734, 736, 738, 740, 742, 744, 746, 748, 750, 752, 754, 756, 758, 760, 762, 764, 766, 768, 770, 772, 774, 776, 778, 780, 782, 784, 786, 788, 790, 792, 794, 796, 798, 800, 802, 804, 806, 808, 810, 812, 814, 816, 818, 820, 822, 824, 826, 828, 830, 832, 834, 836, 838, 840, 842, 844, 846, 848, 850, 852, 854, 856, 858, 860, 862, 864, 866, 868, 870, 872, 874, 876, 878, 880, 882, 884, 886, 888, 890, 892, 894, 896, 898, 900, 902, 904, 906, 908, 910, 912, 914, 916, 918, 920, 922, 924, 926, 928, 930, 932, 934, 936, 938, 940, 942, 944, 946, 948, 950, 952, 954, 956, 958, 960, 962, 964, 966, 968, 970, 972, 974, 976, 978, 980, 982, 984, 986, 988, 990, 992, 994, 996, 998, 1000, 1002, 1004, 1006, 1008, 1010, 1012, 1014, 1016, 1018, 1020, 1022, 1024, 1026, 1028, 1030, 1032, 1034, 1036, 1038, 1040, 1042, 1044, 1046, 1048, 1050, 1052, 1054, 1056, 1058, 1060, 1062, 1064, 1066, 1068, 1070, 1072, 1074, 1076, 1078, 1080, 1082, 1084, 1086, 1088, 1090, 1092, 1094, 1096, 1098, 1100, 1102, 1104, 1106, 1108, 1110, 1112, 1114, 1116, 1118, 1120, 1122, 1124, 1126, 1128, 1130, 1132, 1134, 1136, 1138, 1140, 1142, 1144, 1146, 1148, 1150, 1152, 1154, 1156, 1158, 1160, 1162, 1164, 1166, 1168, 1170, 1172, 1174, 1176, 1178, 1180, 1182, 1184, 1186, 1188, 1190, 1192, 1194, 1196, 1198, 1200, 1202, 1204, 1206, 1208, 1210, 1212, 1214, 1216, 1218, 1220, 1222, 1224, 1226, 1228, 1230, 1232, 1234, 1236, 1238, 1240, 1242, 1244, 1246, 1248, 1250, 1252, 1254, 1256, 1258, 1260, 1262, 1264, 1266, 1268, 1270, 1272, 1274, 1276, 1278, 1280, 1282, 1284, 1286, 1288, 1290, 1292, 1294, 1296, 1298, 1300, 1302, 1304, 1306, 1308, 1310, 1312, 1314, 1316, 1318, 1320, 1322, 1324, 1326, 1328, 1330, 1332, 1334, 1336, 1338, 1340, 1342, 1344, 1346, 1348, 1350, 1352, 1354, 1356, 1358, 1360, 1362, 1364, 1366, 1368, 1370, 1372, 1374, 1376, 1378, 1380, 1382, 1384, 1386, 1388, 1390, 1392, 1394, 1396, 1398, 1400, 1402, 1404, 1406, 1408, 1410, 1412, 1414, 1416, 1418, 1420, 1422, 1424, 1426, 1428, 1430, 1432, 1434, 1436, 1438, 1440, 1442, 1444, 1446, 1448, 1450, 1452, 1454, 1456, 1458, 1460, 1462, 1464, 1466, 1468, 1470, 1478, 1480, 1482, 1484, 1486, 1488, 1490, 1492, 1494, 1496, 1498, 1500, 1502, 1504, 1506, 1508, 1510, 1512, 1514, 1516, 1518, 1520, 1522, 1524, 1526, 1528, 1530, 1532, 1534, 1536, 1538, 1540, 1542, 1544, 1546, 1548, 1550, 1552, 1554, 1556, 1558, 1560, 1562, 1564, 1566, 1568, 1570, 1572, 1574, 1576, 1578, 1580, 1582, 1584, 1586, 1588, 1590, 1592, 1594, 1596, 1598, 1600, 1602, 1604, 1606, 1608, 1610, 1612, 1614, 1616, 1618, 1620, 1622, 1624, 1626, 1628, 1630, 1632, 1634, 1636, 1638, 1640, 1642, 1644, 1646, 1648, 1650, 1652, 1654, 1656, 1658, 1660, 1662, 1664, 1666, 1668, 1670, 1672, 1674, 1676, 1678, 1680, 1682, 1684, 1686, 1688, 1690, 1692, 1694, 1696, 1698, 1700, 1702, 1704, 1706, 1708, 1710, 1712, 1714, 1716, 1718, 1720, 1722, 1724, 1726, 1728, 1730, 1732, 1734, 1736, 1738, 1740, 1742, 1744, 1746, 1748, 1750, 1752, 1754, 1756, 1758, 1760, 1762, 1764, 1766, 1768, 1770, 1772, 1774, 1776, 1778, 1780, 1782, 1784, 1786, 1788, 1790, 1792, 1794, 1796, 1798, 1800, 1802, 1804, 1806, 1808, 1810, 1812, 1814, 1816, 1818, 1820, 1822, 1824, 1826, 1828, 1830, 1832, 1834, 1836, 1838, 1840, 1842, 1844, 1846, 1848, 1850, 1852, 1854, 1856, 1858, 1860, 1862, 1864, 1866, 1868, 1870, 1872, 1874, 1876, 1878, 1880, 1882, 1884, 1886, 1888, 1890, 1892, 1894, 1896, 1898, 1900, 1902, 1904, 1906, 1908, 1910, 1912, 1914, 1916, 1918, 1920, 1922, 1924, 1926, 1928, 1930, 1932, 1934, 1936, 1938, 1940, 1942, 1944, 1946, 1948, 1950, 1952, 1954, 1956, 1958, 1960, 1962, 1964, 1966, 1968, 1970, 1972, 1974, 1976, 1978, 1980, 1982, 1984, 1986, 1988, 1990, 1992, 1994, 1996, 1998, 2000, 2002. 2004, 2006, 2008, 2010, 2012, 2014, 2016, 2018, 2020, 2022, 2024, 2026, 2028, 2030, 2032, 2034, 2036, 2038, 2040, 2042, 2044, 2046, 2048, 2050, 2052, 2054, 2056, 2058, 2060, 2062, 2064, 2066, 2068, 2070, 2072, 2074, 2076, 2078, 2080, 2082, 2084, 2086, 2088, 2090, 2092, 2094, 2096, 2098, 2100, 2102, 2104, 2106, 2108, 2110, 2112, 2114, 2116, 2118, 2120, 2122, 2124, 2126, 2128, 2130, 2132, 2134, 2136, 2138, 2140, 2142, 2144, 2146, 2148, 2150, 2152, 2154, 2156, 2158, 2160, 2162, 2164, 2166, 2168, 2170, 2172, 2174, 2176, 2178, 2180, 2182, 2184, 2186, 2188, 2190, 2192, 2194, 2196, 2198, 2200, 2202, 2204, 2206, 2208, 2210, 2212, 2214, 2216, 2218, 2220, 2222, 2224, 2226, 2228, 2230, 2232, 2234, 2236, 2238, 2240, 2242, 2244, 2246, 2248, 2250, 2252, 2254, 2256, 2258, 2260, 2262, 2264, 2266, 2268, 2270, 2272, 2274, 2276, 2278, 2280, 2282, 2284, 2286, 2288, 2290, 2292, 2294, 2296, 2298, 2300, 2302, 2304, 2306, 2308, 2310, 2312, 2314, 2316, 2318, 2320, 2322, 2324, 2326, 2328, 2330, 2332, 2334, 2336, 2338, 2340, 2342, 2344, 2346, 2348, 2350, 2352, 2354, 2356, 2358, 2360, 2362, 2364, 2366, 2368, 2370, 2372, 2374, 2376, 2378, 2380, 2382, 2384, 2386, 2388, 2390, 2392, 2394, 2396, 2398, 2400, 2402, 2404, 2406, 2408, 2410, 2412, 2414, 2416, 2418, 2420, 2422, 2424, 2426, 2428, 2430, 2432, 2434, 2436, 2438, 2440, 2442, 2444, 2446, 2448, 2450, 2452, 2454, 2456, 2458, 2460, 2462, 2464, 2466, 2468, 2470, 2472, 2474, 2476, 2478, 2480, 2482, 2484, 2486, 2488, 2490, 2492, 2494, 2496, 2498, 2500, 2502, 2504, 2506, 2508, 2510, 2512, 2514, 2516, 2518, 2520, 2522, 2524, 2526, 2528, 2530, 2532, 2534, 2536, 2538, 2540, 2542, 2544, 2546, 2548, 2550, 2552, 2554, 2556, 2558, 2560, 2562, 2564, 2566, 2568, 2570, 2572, 2574, 2576, 2578, 2580, 2582, 2584, 2586, 2588, 2590, 2592, 2594, 2596, 2598, 2600, 2602, 2604, 2606, 2608, 2610, 2612, 2614, 2616, 2618, 2620, 2622, 2624, 2626, 2628, 2630, 2632, 2634, 2636, 2638, 2640, 2642, 2644, 2646, 2648, 2650, 2652, 2654, 2656, 2658, 2660, 2662, 2664, 2666, 2668, 2670, 2672, 2674, 2676, 2678, 2680, 2682, 2684, 2686, 2688, 2690, 2692, 2694, 2696, 2698, 2700, 2702, 2704, 2706, 2708, 2710, 2712, 2714, 2716, 2718, 2720, 2722, 2724, 2726, 2728, 2730, 2732, 2734, 2736, 2738, 2740, 2742, 2744, 2746, 2748, 2750, 2752, 2754, 2756, 2758, 2760, 2762, 2764, 2766, 2768, 2770, 2772, 2774, 2776, 2778, 2780, 2782, 2784, 2786, 2788, 2790, 2792, 2794, 2796, 2798, 2800, 2802, 2804, 2806, 28208, 2810, 2812, 2814, 2816, 2818, 2820, 2822, 2824, 2826, 2828, 2830, 2832, 2834, 2836, 2838, 2840, 2842, 2844, 2846, 2848, 2850, 2852, 2854, 2856, 2858, 2860, 2862, 2864, 2866, 2868, 2870, 2872, 2874, 2876, 2878, 2880, 2882, 2884, 2886, 2888, 2890, 2892, 2894, 2896, 2898, 2900, 2902, 2904, 2906, 2908, 2910, 2912, 2914, 2916, 2918, 2920, 2922, 2924, 2926, 2928, 2930, 2932, 2934, 2936, 2938, 2940, 2942, 2944, 2946, 2948, 2950, 2952, 2954, 2956, 2958, 2960, 2962, 2964, 2966, 2968, 2970, 2972, 2974, 2976, 2978, 2980, 2982, 2984, 2986, 2988, 2990, 2992, 2994, 2996, 2998, 3000, 3002, 3004, 3006, 3008, 3010, 3012, 3014, 3016, 3018, 3020, 3022, 3024, 3026, 3028, 3030, 3032, 3034, 3036, 3038, 3040, 3042, 3044, 3046, 3048, 3050, 3052, 3054, 3056, or 3058. In some embodiments, the amino acid sequence of the engineered RNA ligase optionally includes 1, 2, 3, 4, 5, 6, 7, 8, 9, or up to 10 substitutions, insertions, and/or deletions. In some embodiments, the amino acid sequence of the engineered RNA ligase optionally includes 1, 2, 3, 4, 5, 6, 7, 8, 9, or up to 10 substitutions. In some embodiments, the amino acid sequence of the engineered RNA ligase optionally includes 1, 2, 3, 4, or 5 substitutions, insertions, and/or deletions. In some embodiments, the amino acid sequence of the engineered RNA ligase optionally includes 1, 2, 3, 4, or 5 substitutions.

[0349] In some embodiments, the engineered RNA ligase comprises an amino acid sequence comprising SEQ ID NO: 4, 6, 8, 10, 12, 14, 16, 18, 20, 22, 24, 26, 28, 30, 32, 34, 336, 38, 40, 42, 44, 46, 48, 50, 52, 54, 56, 58, 60, 62, 64, 66, 68, 70, 72, 74, 76, 78, 80, 82, 84, 86, 88, 90, 92, 94, 96, 98, 100, 102, 104, 106, 108, 110, 112, 114, 116, 118, 120, 122, 124, 126, 128, 130, 132, 134, 136, 138, 140, 142, 144, 146, 148, 150, 152, 154, 156, 158, 160, 162, 164, 166, 168, 170, 172, 174, 176, 178, 180, 182, 184, 186, 188, 190, 192, 194, 196, 198, 200, 202, 204, 206, 208, 210, 212, 214, 216, 218, 220, 222, 224, 226, 228, 230, 232, 234, 236, 238, 240, 242, 244, 246, 248, 250, 252, 254, 256, 258, 260, 262, 264, 266, 268, 270, 272, 274, 276, 278, 280, 282, 284, 286, 288, 290, 292, 294, 296, 298, 300, 302, 304, 306, 308, 310, 312, 314, 316, 318, 320, 322, 324, 326, 328, 330, 332, 334, 336, 338, 340, 342, 344, 346, 348, 350, 352, 354, 356, 358, 360, 362, 364, 366, 368, 370, 372, 374, 376, 378, 380, 382, 384, 386, 388, 390, 392, 394, 396, 398, 400, 402, 404, 406, 408, 410, 412, 414, 416, 418, 420, 422, 424, 426, 428, 430, 432, 434, 436, 438, 440, 442, 444, 446, 448, 450, 452, 454, 456, 458, 460, 462, 464, 466, 468, 470, 472, 474, 476, 478, 480, 482, 484, 486, 488, 490, 492, 494, 496, 498, 500, 502, 504, 506, 508, 510, 512, 514, 516, 518, 520, 522, 524, 526, 528, 530, 532, 534, 536, 538, 540, 542, 544, 546, 548, 550, 552, 554, 556, 558, 560, 562, 564, 566, 568, 570, 572, 574, 576, 578, 580, 582, 584, 586, 588, 590, 592, 594, 596, 598, 600, 602, 604, 606, 608, 610, 612, 614, 616, 618, 620, 622, 624, 626, 628, 630, 632, 634, 636, 638, 640, 642, 644, 646, 648, 650, 652, 654, 656, 658, 660, 662, 664, 666, 668, 670, 672, 674, 676, 678, 680, 682, 684, 686, 688, 690, 692, 694, 696, 698, 700, 702, 704, 706, 708, 710, 712, 714, 716, 718, 720, 722, 724, 726, 728, 730, 732, 734, 736, 738, 740, 742, 744, 746, 748, 750, 752, 754, 756, 758, 760, 762, 764, 766, 768, 770, 772, 774, 776, 778, 780, 782, 784, 786, 788, 790, 792, 794, 796, 798, 800, 802, 804, 806, 808, 810, 812, 814, 816, 818, 820, 822, 824, 826, 828, 830, 832, 834, 836, 838, 840, 842, 844, 846, 848, 850, 852, 854, 856, 858, 860, 862, 864, 866, 868, 870, 872, 874, 876, 878, 880, 882, 884, 886, 888, 890, 892, 894, 896, 898, 900, 902, 904, 906, 908, 910, 912, 914, 916, 918, 920, 922, 924, 926, 928, 930, 932, 934, 936, 938, 940, 942, 944, 946, 948, 950, 952, 954, 956, 958, 960, 962, 964, 966, 968, 970, 972, 974, 976, 978, 980, 982, 984, 986, 988, 990, 992, 994, 996, 998, 1000, 1002, 1004, 1006, 1008, 1010, 1012, 1014, 1016, 1018, 1020, 1022, 1024, 1026, 1028, 1030, 1032, 1034, 1036, 1038, 1040, 1042, 1044, 1046, 1048, 1050, 1052, 1054, 1056, 1058, 1060, 1062, 1064, 1066, 1068, 1070, 1072, 1074, 1076, 1078, 1080, 1082, 1084, 1086, 1088, 1090, 1092, 1094, 1096, 1098, 1100, 1102, 1104, 1106, 1108, 1110, 1112, 1114, 1116, 1118, 1120, 1122, 1124, 1126, 1128, 1130, 1132, 1134, 1136, 1138, 1140, 1142, 1144, 1146, 1148, 1150, 1152, 1154, 1156, 1158, 1160, 1162, 1164, 1166, 1168, 1170, 1172, 1174, 1176, 1178, 1180, 1182, 1184, 1186, 1188, 1190, 1192, 1194, 1196, 1198, 1200, 1202, 1204, 1206, 1208, 1210, 1212, 1214, 1216, 1218, 1220, 1222, 1224, 1226, 1228, 1230, 1232, 1234, 1236, 1238, 1240, 1242, 1244, 1246, 1248, 1250, 1252, 1254, 1256, 1258, 1260, 1262, 1264, 1266, 1268, 1270, 1272, 1274, 1276, 1278, 1280, 1282, 1284, 1286, 1288, 1290, 1292, 1294, 1296, 1298, 1300, 1302, 1304, 1306, 1308, 1310, 1312, 1314, 1316, 1318, 1320, 1322, 1324, 1326, 1328, 1330, 1332, 1334, 1336, 1338, 1340, 1342, 1344, 1346, 1348, 1350, 1352, 1354, 1356, 1358, 1360, 1362, 1364, 1366, 1368, 1370, 1372, 1374, 1376, 1378, 1380, 1382, 1384, 1386, 1388, 1390, 1392, 1394, 1396, 1398, 1400, 1402, 1404, 1406, 1408, 1410, 1412, 1414, 1416, 1418, 1420, 1422, 1424, 1426, 1428, 1430, 1432, 1434, 1436, 1438, 1440, 1442, 1444, 1446, 1448, 1450, 1452, 1454, 1456, 1458, 1460, 1462, 1464, 1466, 1468, 1470, 1478, 1480, 1482, 1484, 1486, 1488, 1490, 1492, 1494, 1496, 1498, 1500, 1502, 1504, 1506, 1508, 1510, 1512, 1514, 1516, 1518, 1520, 1522, 1524, 1526, 1528, 1530, 1532, 1534, 1536, 1538, 1540, 1542, 1544, 1546, 1548, 1550, 1552, 1554, 1556, 1558, 1560, 1562, 1564, 1566, 1568, 1570, 1572, 1574, 1576, 1578, 1580, 1582, 1584, 1586, 1588, 1590, 1592, 1594, 1596, 1598, 1600, 1602, 1604, 1606, 1608, 1610, 1612, 1614, 1616, 1618, 1620, 1622, 1624, 1626, 1628, 1630, 1632, 1634, 1636, 1638, 1640, 1642, 1644, 1646, 1648, 1650, 1652, 1654, 1656, 1658, 1660, 1662, 1664, 1666, 1668, 1670, 1672, 1674, 1676, 1678, 1680, 1682, 1684, 1686, 1688, 1690, 1692, 1694, 1696, 1698, 1700, 1702, 1704, 1706, 1708, 1710, 1712, 1714, 1716, 1718, 1720, 1722, 1724, 1726, 1728, 1730, 1732, 1734, 1736, 1738, 1740, 1742, 1744, 1746, 1748, 1750, 1752, 1754, 1756, 1758, 1760, 1762, 1764, 1766, 1768, 1770, 1772, 1774, 1776, 1778, 1780, 1782, 1784, 1786, 1788, 1790, 1792, 1794, 1796, 1798, 1800, 1802, 1804, 1806, 1808, 1810, 1812, 1814, 1816, 1818, 1820, 1822, 1824, 1826, 1828, 1830, 1832, 1834, 1836, 1838, 1840, 1842, 1844, 1846, 1848, 1850, 1852, 1854, 1856, 1858, 1860, 1862, 1864, 1866, 1868, 1870, 1872, 1874, 1876, 1878, 1880, 1882, 1884, 1886, 1888, 1890, 1892, 1894, 1896, 1898, 1900, 1902, 1904, 1906, 1908, 1910, 1912, 1914, 1916, 1918, 1920, 1922, 1924, 1926, 1928, 1930, 1932, 1934, 1936, 1938, 1940, 1942, 1944, 1946, 1948, 1950, 1952, 1954, 1956, 1958, 1960, 1962, 1964, 1966, 1968, 1970, 1972, 1974, 1976, 1978, 1980, 1982, 1984, 1986, 1988, 1990, 1992, 1994, 1996, 1998, 2000, 2002. 2004, 2006, 2008, 2010, 2012, 2014, 2016, 2018, 2020, 2022, 2024, 2026, 2028, 2030, 2032, 2034, 2036, 2038, 2040, 2042, 2044, 2046, 2048, 2050, 2052, 2054, 2056, 2058, 2060, 2062, 2064, 2066, 2068, 2070, 2072, 2074, 2076, 2078, 2080, 2082, 2084, 2086, 2088, 2090, 2092, 2094, 2096, 2098, 2100, 2102, 2104, 2106, 2108, 2110, 2112, 2114, 2116, 2118, 2120, 2122, 2124, 2126, 2128, 2130, 2132, 2134, 2136, 2138, 2140, 2142, 2144, 2146, 2148, 2150, 2152, 2154, 2156, 2158, 2160, 2162, 2164, 2166, 2168, 2170, 2172, 2174, 2176, 2178, 2180, 2182, 2184, 2186, 2188, 2190, 2192, 2194, 2196, 2198, 2200, 2202, 2204, 2206, 2208, 2210, 2212, 2214, 2216, 2218, 2220, 2222, 2224, 2226, 2228, 2230, 2232, 2234, 2236, 2238, 2240, 2242, 2244, 2246, 2248, 2250, 2252, 2254, 2256, 2258, 2260, 2262, 2264, 2266, 2268, 2270, 2272, 2274, 2276, 2278, 2280, 2282, 2284, 2286, 2288, 2290, 2292, 2294, 2296, 2298, 2300, 2302, 2304, 2306, 2308, 2310, 2312, 2314, 2316, 2318, 2320, 2322, 2324, 2326, 2328, 2330, 2332, 2334, 2336, 2338, 2340, 2342, 2344, 2346, 2348, 2350, 2352, 2354, 2356, 2358, 2360, 2362, 2364, 2366, 2368, 2370, 2372, 2374, 2376, 2378, 2380, 2382, 2384, 2386, 2388, 2390, 2392, 2394, 2396, 2398, 2400, 2402, 2404, 2406, 2408, 2410, 2412, 2414, 2416, 2418, 2420, 2422, 2424, 2426, 2428, 2430, 2432, 2434, 2436, 2438, 2440, 2442, 2444, 2446, 2448, 2450, 2452, 2454, 2456, 2458, 2460, 2462, 2464, 2466, 2468, 2470, 2472, 2474, 2476, 2478, 2480, 2482, 2484, 2486, 2488, 2490, 2492, 2494, 2496, 2498, 2500, 2502, 2504, 2506, 2508, 2510, 2512, 2514, 2516, 2518, 2520, 2522, 2524, 2526, 2528, 2530, 2532, 2534, 2536, 2538, 2540, 2542, 2544, 2546, 2548, 2550, 2552, 2554, 2556, 2558, 2560, 2562, 2564, 2566, 2568, 2570, 2572, 2574, 2576, 2578, 2580, 2582, 2584, 2586, 2588, 2590, 2592, 2594, 2596, 2598, 2600, 2602, 2604, 2606, 2608, 2610, 2612, 2614, 2616, 2618, 2620, 2622, 2624, 2626, 2628, 2630, 2632, 2634, 2636, 2638, 2640, 2642, 2644, 2646, 2648, 2650, 2652, 2654, 2656, 2658, 2660, 2662, 2664, 2666, 2668, 2670, 2672, 2674, 2676, 2678, 2680, 2682, 2684, 2686, 2688, 2690, 2692, 2694, 2696, 2698, 2700, 2702, 2704, 2706, 2708, 2710, 2712, 2714, 2716, 2718, 2720, 2722, 2724, 2726, 2728, 2730, 2732, 2734, 2736, 2738, 2740, 2742, 2744, 2746, 2748, 2750, 2752, 2754, 2756, 2758, 2760, 2762, 2764, 2766, 2768, 2770, 2772, 2774, 2776, 2778, 2780, 2782, 2784, 2786, 2788, 2790, 2792, 2794, 2796, 2798, 2800, 2802, 2804, 2806, 28208, 2810, 2812, 2814, 2816, 2818, 2820, 2822, 2824, 2826, 2828, 2830, 2832, 2834, 2836, 2838, 2840, 2842, 2844, 2846, 2848, 2850, 2852, 2854, 2856, 2858, 2860, 2862, 2864, 2866, 2868, 2870, 2872, 2874, 2876, 2878, 2880, 2882, 2884, 2886, 2888, 2890, 2892, 2894, 2896, 2898, 2900, 2902, 2904, 2906, 2908, 2910, 2912, 2914, 2916, 2918, 2920, 2922, 2924, 2926, 2928, 2930, 2932, 2934, 2936, 2938, 2940, 2942, 2944, 2946, 2948, 2950, 2952, 2954, 2956, 2958, 2960, 2962, 2964, 2966, 2968, 2970, 2972, 2974, 2976, 2978, 2980, 2982, 2984, 2986, 2988, 2990, 2992, 2994, 2996, 2998, 3000, 3002, 3004, 3006, 3008, 3010, 3012, 3014, 3016, 3018, 3020, 3022, 3024, 3026, 3028, 3030, 3032, 3034, 3036, 3038, 3040, 3042, 3044, 3046, 3048, 3050, 3052, 3054, 3056, or 3058. In some embodiments, the amino acid sequence of the engineered RNA ligase optionally includes 1, 2, 3, 4, 5, 6, 7, 8, 9, or up to 10 substitutions, insertions, and/or deletions. In some embodiments, the amino acid sequence of the engineered RNA ligase optionally includes 1, 2, 3, 4, 5, 6, 7, 8, 9, or up to 10 substitutions. In some embodiments, the amino acid sequence of the engineered RNA ligase optionally includes 1, 2, 3, 4, or 5 substitutions, insertions, and/or deletions. In some embodiments, the amino acid sequence of the engineered RNA ligase optionally includes 1, 2, 3, 4, or 5 substitutions.

[0350] In some embodiments, the engineered RNA ligase comprises an amino acid sequence comprising residues 12 to 346 of SEQ ID NO: 54, 244, 648, 862, 956, 1088, 1416, 1612, 1840, 1866, 1954, 2062, 2674, 2754, or 2786, or an amino acid sequence comprising SEQ ID NO: 54, 244, 648, 862, 956, 1088, 1416, 1612, 1840, 1866, 1954, 2062, 2674, 2754, or 2786. In some embodiments, the amino acid sequence of the engineered RNA ligase optionally includes 1, 2, 3, 4, 5, 6, 7, 8, 9, or up to 10 substitutions, insertions, and/or deletions. In some embodiments, the amino acid sequence of the engineered RNA ligase optionally includes 1, 2, 3, 4, 5, 6, 7, 8, 9, or up to 10 substitutions. In some embodiments, the amino acid sequence of the engineered RNA ligase optionally includes 1, 2, 3, 4, or 5 substitutions, insertions, and/or deletions. In some embodiments, the amino acid sequence of the engineered RNA ligase optionally includes 1, 2, 3, 4, or 5 substitutions.

[0351] In some of the foregoing embodiments, the engineered RNA ligase polypeptide has 1, 2, 3, 4, or up to 5 substitutions in the amino acid sequence. In some embodiments, the engineered RNA ligase polypeptide has 1, 2, 3, or 4 substitutions in the amino acid sequence. In some embodiments, the substitutions comprises non-conservative or conservative substitutions. In some embodiments, the substitutions comprises conservative substitutions. In some embodiments, the substitutions comprises non-conservative substitutions. In some embodiments, guidance on non-conservative and conservative substitutions are provided by the variants disclosed herein.

[0352] In some embodiments, an engineered RNA ligase comprises an amino acid sequence having one or more amino acid differences in the N-terminal domain (also referred to herein as the adenyltransferase domain), the C-terminal domain, and/or the linker region connecting the N-terminal and C-terminal domains as compared to a reference RNA ligase. In some embodiments, the reference RNA ligase has an amino acid sequence corresponding to amino acid residues 12-346 of SEQ ID NO: 3060, which is the naturally occurring RNA ligase of Klebsiella phage KP179 (see, e.g., International patent publication WO2024138200, incorporated herein by reference). In some embodiments, the N-terminal domain corresponds to amino acid residues 12-246, the C-terminal domain corresponds to amino acid residues 256-346, and the linker region corresponds to amino acid residues 247-255 of the reference RNA ligase sequence of SEQ ID NO: 3060. The N-terminal, C-terminal, and linker region of other RNA ligases can be ascertained by sequence and/or structural alignments. By way of example and not limitation, for T4 RNA ligase 2, the N-terminal domain corresponds to amino acid residues 1-234, the C-terminal domain corresponds to amino acid residues 244-329, and the linker region corresponds to amino acid residues 235-243 of the amino acid sequence of naturally occurring T4 RNA ligase 2.

[0353] Without being bound by any theory of operation, the mechanism of a nucleic acid ligase involves the steps of (i) reaction of the ligase with ATP in the absence of nucleic acid to form a covalent ligase-AMP intermediate and corresponding release of pyrophosphate, (ii) binding of the ligase-AMP intermediate to a nucleic acid containing a nick, and transfer of the adenylate to the 5′-phosphate of the donor strand to form a adenylated nicked intermediate, and (iii) a ligase mediated attack of the 3′-OH of the acceptor strand on the 5′-phosphoanhydride linkage, resulting in a 3′-5′ phosphodiester linkage and release of AMP.

[0354] As used herein, the N-terminal domain, also referred to as the adenyltransferase domain, refers to the region or domain that mediates reaction of the ligase with ATP to form a covalent ligase-AMP intermediate with the release of pyrophosphate, and attack of the 3′-OH of the nick on the 5′-phosphoanhydride linkage, resulting in the closure or repaired 3′-5′ phosphodiester and release of AMP. This corresponds to catalytic steps (i) and (iii) above. The C-terminal domain refers to a region or domain of the ligase that mediates catalytic step (ii). The linker region connecting the N-terminal and the C-terminal domains acts as a fulcrum for domain movements that accompany substrate binding and reaction chemistry (see, e.g., Nandakumar et al., Cell, 2006, 127 (1): 71-84).

[0355] In some embodiments, the amino acid sequence of the engineered RNA ligase comprises
[0356] (a) one or more amino acid differences in the N-terminal domain at amino acid positions 12, 13, 15, 17, 18, 21, 23, 25, 26, 28, 29, 30, 32, 33, 37, 38, 39, 40, 41, 42, 45, 52, 54, 56, 57, 58, 60, 61, 62, 64, 65, 67, 71, 73, 74, 75, 77, 80, 81, 83, 84, 86, 87, 89, 90, 91, 93, 95, 97, 99, 100, 101, 102, 103, 104, 105, 106, 107, 109, 113, 114, 116, 117, 119, 121, 122, 123, 125, 126, 127, 128, 129, 131, 135, 137, 140, 141, 143, 144, 148, 150, 154, 156, 157, 158, 159, 160, 161, 162, 165, 169, 170, 171, 173, 175, 177, 178, 179, 181, 183, 184, 185, 190, 191, 192, 193, 194, 197, 198, 204, 206, 208, 210, 212, 213, 214, 215, 218, 223, 224, 226, 228, 229, 230, 232, 236, 238, 241, and 243, or at equivalent positions thereof;
[0357] (b) one or more amino acid differences in the C-terminal domain at amino acid positions 256, 257, 258, 260, 261, 264, 265, 266, 267, 268, 270, 271, 272, 274, 276, 277, 280, 282, 283, 286, 288, 289, 290, 291, 292, 294, 295, 296, 297, 298, 299, 300, 301, 302, 305, 306, 307, 310, 311, 315, 316, 317, 318, 323, 324, 325, 326, 327, 330, 331, 332, 334, 335, 336, 337, 338, 341, 342, 344, 345, and 346, or at equivalent positions thereof; and/or
[0358] (c) one or more amino acid differences in the linker region connecting the N-terminal and C-terminal domains at one or more amino acid positions 247, 248, 249, 250, 251, 252, 253, 254, and 255, or at equivalent positions thereof,
[0359] wherein the amino acid positions are relative to the reference sequence corresponding to residues 12-346 of SEQ ID NO: 3060.

[0360] In some embodiments, the amino acid sequence of the engineered RNA ligase comprises
[0361] (a) in the N-terminal domain one or more amino acid residues 12A/F/L/M/P/R/T/V, 13W, 15M, 17P, 18A/H, 21S, 23K/T, 25A/D/F/G/L/M/S/T, 26L, 28A/L/M/V, 29D/S, 30A/L/T/V/W, 32E, 33A/I/L/T/V, 37A/F/K/L/M/R, 38A/E/L/R/S/T/V, 39P, 40D/I/P/S, 41E/I, 42T, 45S, 52C, 54L, 56I/L, 57V, 58M, 60A/C/D/R/S/V, 61A, 62A/V, 64A/Q/W, 65C, 67R, 71T, 73Q/W, 74D, 75A/D, 77M, 80E, 81Y, 83A/E/G/L/T/V, 84V, 86D/G/L, 87E, 89C/D/E/G/L/M/N/Q/R/S/T/V/W/Y, 90E/F, 91A/E/V, 93K/V, 95A/C/G/I, 97A/E, 991, 100A/G/H/L/R/S/T/V, 101P/V/W, 102T, 103G/V, 104T, 105K/L/R, 106G/L/M/Q/R/V/W, 107M/S, 109F/L, 113L/M, 114E, 116L, 117A/Q, 119L, 121N, 122C/F/G/L/Q/T/W, 123K/R, 125K/T, 126M, 127P, 128E, 129L/W, 131T, 135A/H/M/Q/V, 137N/R, 140I, 141D/G, 143A/C/E/F/H/M/S/T/V, 144L, 148F, 150D/L, 154S/V, 156G/H/Q/S, 157F/L/Q/V, 158R/S, 159F, 160R, 161M/V, 162C, 165M, 169G/N, 170H/Y, 171S, 173M, 175A, 177K, 178V, 179E, 181E/N/P/R/S, 183L/V, 184L, 185C/F/G/K/M/P/S/T/V, 190I/M, 191C, 192D/E/F/L/N, 193K/Q, 194A/G/V, 197W, 198M, 204W, 206L, 208H/I/K/L/P/T, 210G/V, 212E/G/I/K/L, 213D/N/R/T, 214A/C/H/K/L/Q/Y, 215G/T, 218F, 223C, 224A/Q/R, 226R, 228D/L, 229W, 230T/V, 232G/M/N/R/S, 236L/V, 238K/S/V, 241E/G/Q/R, and 243H, or at equivalent positions thereof;
[0362] (b) in the C-terminal domain one or more amino acid residues 256A/E/G/M/S/W, 257D/E/G, 258D/M/P/V, 260G, 261D/P/T, 264A/E/G/S/V, 265A/F, 266C/I/L, 267I/M, 268F/G/M, 270L/M/V, 271A/E/G/T, 272M/S, 274A, 276A/G/M/V, 277A, 280L/N/W, 282A/M, 283C/V, 286D/E/F/M/V, 288E/L/R/W, 289A/D/E/I/P/T, 290D/H/N/P, 291H/L/Q/R/S/T/W, 292N/S, 294A/S/V/Y, 295C/F/G/K/L/M/P/Q/R/S/T/V/Y,296E/G/L/Q/W, 297A/I/L, 298C/I/K/R/S/V, 299E/I/K/Q/R/T/V, 300A, 301A/F/I/L/M/V, 302A/C/I/L/S, 305V, 306G/L/T, 307K/R, 310H/L/M/N/Q/R/S/T, 311C, 315E/S, 316I/L/Y, 317E/F/G/Q/V/W, 318A/E/G/S, 323E/G, 324D/G/M, 325L, 326C/L, 327E/G/M/S, 330A/D/E/G/K/R, 331D/G/R/S/W, 332E/H/W, 334E/R, 335H/Q, 336I/L/M, 337A/V, 338G/L/M, 341A, 342R/S/T, 344K, 345Q/S, and 346S; or at equivalent positions thereof; and/or
[0363] (c) in the linker region connecting the N-terminal and C-terminal domains one or more amino acid residues 247I/L/R/S, 248F/G/I/K/T, 249K/L/R/S, 250E/I/S, 251C/E/F/G/L/R/S/T/Y, 252A/Q, 253L/W, 254E/K/L/N/Q/S/V, and 255N/S/V/Y, or at equivalent positions thereof,
[0364] wherein the amino acid positions are relative to the reference sequence corresponding to residues 12-346 of SEQ ID NO: 3060.

[0365] In some embodiments, the N-terminal domain of the engineered RNA ligase comprises one or more amino acid residues 12A/F/L/P/R/T/V, 23K/T, 25A/D/F/G/L/M/S/T, 29D/S, 37A/F/K/L/M/R, 38A/E/L/R/S/T/V, 75A/D, 86D/L, 89C/D/E/L/N/Q/R/S/T/V/Y, 93K, 101P/V/W, 122C/F/G/L/Q/T/W, 143A/C/E/F/H/M/T/V, 157F/Q/V, 183L/V, 192E/F/L/N, 194A/G/V, 198M, 212E/G/I/K/L, 214A/C/H/K/L/Q/Y, 230T/V, and 241E/G/Q/R. or at equivalent positions thereof, wherein the amino acid positions are relative to the reference sequence corresponding to residues 12-346 of SEQ ID NO: 3060.

[0366] In some embodiments, the N-terminal domain of the engineered RNA ligase comprises one or more amino acid residues 12T, 23T, 25A, 29S, 37L, 38A/S, 75D, 86D, 89M, 93K, 101P, 122F, 157V, 183L, 192E, 194V, 198M, 212E, 214L, 226R, 230T/V, and 241G, or at equivalent positions thereof, wherein the amino acid positions are relative to the reference sequence corresponding to residues 12-346 of SEQ ID NO: 3060.

[0367] In some embodiments, the C-terminal domain of the engineered RNA ligase comprises one or more amino acid residues 266C/I/L, 268F/G/M, 280L/N/W, 291H/L/Q/R/S/T/W, 295C/F/K/L/M/P/Q/R/S/T/V/Y, 298C/I/K/R/S/V, 307K/R, 316I/L/Y, 318A/E/G/S, 326C/L, 330A/D/E/G/K/R, and 331D/G/R/S/W, or at equivalent positions thereof, wherein the amino acid positions are relative to the reference sequence corresponding to residues 12-346 of SEQ ID NO: 3060.

[0368] In some embodiments, the C-terminal domain of the engineered RNA ligase comprises one or more amino acid residues 266L, 268G, 280L, 291Q, 295V, 298S/V, 307R, 316L, 318S, 326L, 330A, and 331G, or at equivalent positions thereof, wherein the amino acid positions are relative to the reference sequence corresponding to residues 12-346 of SEQ ID NO: 3060.

[0369] In some embodiments, the linker region connecting the N-terminal and C-terminal domains comprises one or more amino acid residues 248G/I/K/T, 249K/L/R/S, 250E/I/S, 251C/E/F/G/L/R/S/T/Y, and 254E/K/L/N/Q/S/V, or at equivalent positions thereof, wherein the amino acid positions are relative to the reference sequence corresponding to residues 12-346 of SEQ ID NO: 3060.

[0370] In some embodiments, the linker region connecting the N-terminal and C-terminal domains comprises one or more amino acid residues 249L, 2501, 251E/S, and 254S, or at equivalent positions thereof, wherein the amino acid positions are relative to the reference sequence corresponding to residues 12-346 of SEQ ID NO: 3060.

[0371] In some embodiments, the engineered RNA ligase comprises an amino acid sequence having at least 70%, 75%, 80%, 81%, 82%, 83%, 84%, 85%, 86%, 87%, 88%, 89%, 90%, 91%, 92%, 93%, 94%, 95%, 96%, 97%, 98%, 99% or more sequence identity to the N-terminal domain corresponding to amino acid residues 12-246 of SEQ ID NO: 3060, wherein the amino acid sequence of the RNA ligase comprises one or more amino acid differences or amino acid residues in the N-terminal domain, as provided in the foregoing.

[0372] In some embodiments, the engineered RNA ligase comprises an amino acid sequence having at least 70%, 75%, 80%, 81%, 82%, 83%, 84%, 85%, 86%, 87%, 88%, 89%, 90%, 91%, 92%, 93%, 94%, 95%, 96%, 97%, 98%, 99% or more sequence identity to the C-terminal domain corresponding to amino acid residues 256-346 of SEQ ID NO: 3060, wherein the amino acid sequence of the RNA ligase comprises one or more amino acid differences or amino acid residues in the C-terminal domain, as provided in the foregoing.

[0373] In some embodiments, the engineered RNA ligase comprises an amino acid sequence having at least 70%, 75%, 80%, 81%, 82%, 83%, 84%, 85%, 86%, 87%, 88%, 89%, 90%, 91%, 92%, 93%, 94%, 95%, 96%, 97%, 98%, 99% or more sequence identity to the linker region corresponding to amino acid residues 247-255 of the reference sequence of SEQ ID NO: 3060, wherein the amino acid sequence of the RNA ligase comprises one or more amino acid differences or amino acid residues in the linker region, as provided in the foregoing.

[0374] In some embodiments, the engineered RNA ligase of the present disclosure has RNA ligase 2 activity, particularly with the improved or enhanced properties described herein. In some embodiments, the engineered RNA ligase has at least one improved or enhanced property as compared to a reference RNA ligase. Exemplary improved properties are provided in the Examples.

[0375] In some embodiments, the engineered RNA ligase has increased activity as compared to the reference RNA ligase. In some embodiments, the engineered RNA ligase has at least 1.1 fold, 1.2 fold, 1.3 fold, 1.4 fold, 1.5 fold, 2-fold, 3-fold, 4-fold, 5-fold, 10-fold, 15-fold, 20-fold, or more fold activity compared to the reference RNA ligase. In some embodiments, the increased activity is on modified polynucleotide substrates, as discussed herein and in the Examples.

[0376] In some embodiments, the engineered RNA ligase exhibits increased product yield as compared to the reference RNA ligase. In some embodiments, the engineered RNA ligase exhibits increased product yield at substrate concentration of 10 uM to 10 uM, 20 uM to 350 uM, 50 uM to 300 uM, or 100 uM to 250 uM, preferably 200 to 400 uM as compared to the reference RNA ligase. In some embodiments, the engineered RNA ligase exhibits increased product yield at substrate concentration of 10 uM, 20 uM, 50 uM, 100 uM, 150 uM, 200 uM, 250 uM, 300 uM, 350 uM, or 400 uM or higher as compared to the reference RNA ligase. In some embodiments, the engineered RNA ligase exhibits increased product yield at a substrate concentration of 1-10 mM, 2-8 mM, or 4-6 mM. In some embodiments, the engineered RNA ligase exhibits increased product yield at 1 mM, 2 mM, 3 mM, 4 mM, 5 mM, 6 mM, 7 mM, 8 mM, 9 mM, or about 10 mM.

[0377] In some embodiments, the engineered RNA ligase has increased activity on polynucleotides substrates with phosphorothioate internucleoside linkages as compared to the reference RNA ligase.

[0378] In some embodiments, the engineered RNA ligase has increased activity or product yield on polynucleotides substrates with 2′-modifications (e.g., 2′-O-methyl and/or 2′-fluoro) as compared to the reference RNA ligase. In particular, the engineered RNA ligase has increased activity on polynucleotide substrates having a 2′-modified sugar moiety on the 3′-terminal nucleotide and/or 5′-terminal nucleotide, where the 3′-terminal nucleotide on the polynucleotide acceptor strand is being ligated to the 5′-terminal nucleotide of the polynucleotide donor strand substrates.

[0379] In some embodiments, the engineered RNA ligase exhibits for double stranded ligase substrates a efficiency of at least 90%, 91%, 92%, 93%, 94%, 95%, 96%, 97%, 98%, 99%, or greater on polynucleotide substrates comprising a modified nucleoside at the 3′-terminal nucleoside of the polynucleotide acceptor strand. In some embodiments, the engineered RNA ligase exhibits a ligation efficiency of at least 90%, 91%, 92%, 93%, 94%, 95%, 96%, 97%, 98%, 99%, or greater for a polynucleotide acceptor strand having a modified 3′-terminal nucleoside of 2′-fluoro-adenosine, 2′-fluoro-guanosine, 2′-fluoro-cytidine, 2′-fluoro-uridine, 2′-fluoro-thymidine, 2′-O-methyl-adenosine, 2′-O-methyl-guanosine, 2′-O-methyl-cytidine, 2′-O-methyl-uridine, or 2′-O-methyl-thymidine.

[0380] In some embodiments, In some embodiments, the engineered RNA ligase exhibits a ligation efficiency of at least 90%, 91%, 92%, 93%, 94%, 95%, 96%, 97%, 98%, 99%, or greater for a polynucleotide donor strand having a modified 5′-terminal nucleoside of 2′-fluoro-adenosine, 2′-fluoro-guanosine, 2′-fluoro-cytidine, 2′-fluoro-uridine, 2′-fluoro-thymidine, 2′-O-methyl-adenosine, 2′-O-methyl-guanosine, 2′-O-methyl-cytidine, 2′-O-methyl-uridine, or 2′-O-methyl-thymidine.

[0381] In some embodiments, the engineered RNA ligase exhibits for double stranded ligase substrates a efficiency of at least 90%, 91%, 92%, 93%, 94%, 95%, 96%, 97%, 98%, 99%, or greater on polynucleotide substrates comprising a modified nucleoside at the 3′-terminal nucleoside of the polynucleotide acceptor strand. In some embodiments, the engineered RNA ligase exhibits a ligation efficiency of at least 90%, 91%, 92%, 93%, 94%, 95%, 96%, 97%, 98%, 99%, or greater for ligation of a polynucleotide acceptor strand having a modified 3′-terminal nucleoside of 2′-fluoro-adenosine, 2′-fluoro-guanosine, 2′-fluoro-cytidine, 2′-fluoro-uridine, 2′-fluoro-thymidine, 2′-O-methyl-adenosine, 2′-O-methyl-guanosine, 2′-O-methyl-cytidine, 2′-O-methyl-uridine, or 2′-O-methyl-thymidine, and a polynucleotide donor strand having a modified 5′-terminal nucleoside of 2′-fluoro-adenosine, 2′-fluoro-guanosine, 2′-fluoro-cytidine, 2′-fluoro-uridine, 2′-fluoro-thymidine, 2′-O-methyl-adenosine, 2′-O-methyl-guanosine, 2′-O-methyl-cytidine, 2′-O-methyl-uridine, or 2′-O-methyl-thymidine.

[0382] In some embodiments, the engineered RNA ligase exhibits for double stranded ligase substrates a efficiency of at least 90%, 91%, 92%, 93%, 94%, 95%, 96%, 97%, 98%, 99%, or greater on polynucleotide substrates comprising a modified nucleoside at the 3′-terminal nucleoside of the polynucleotide acceptor strand. In some embodiments, the engineered RNA ligase exhibits a ligation efficiency of at least 90%, 91%, 92%, 93%, 94%, 95%, 96%, 97%, 98%, 99%, or greater for ligation of a ligase substrate comprising:
[0383] a polynucleotide acceptor strand having a modified 3′-terminal nucleoside of 2′-fluoro-adenosine, 2′-fluoro-guanosine, 2′-fluoro-cytidine, 2′-fluoro-uridine, 2′-fluoro-thymidine, 2′-O-methyl-adenosine, 2′-O-methyl-guanosine, 2′-O-methyl-cytidine, 2′-O-methyl-uridine, or 2′-fluoro-thymidine;
[0384] a polynucleotide donor strand having a modified 5′-terminal nucleoside of 2′-fluoro-adenosine, 2′-fluoro-guanosine, 2′-fluoro-cytidine, 2′-fluoro-uridine, 2′-fluoro-thymidine, 2′-O-methyl-adenosine, 2′-O-methyl-guanosine, 2′-O-methyl-cytidine, 2′-O-methyl-uridine, or 2′-fluoro-thymidine; and
[0385] a polynucleotide complementary to the polynucleotide acceptor strand and polynucleotide donor strand, wherein the polynucleotide complementary to the polynucleotide acceptor strand and polynucleotide donor strand comprises a complementary 2′-fluoro or 2′-O-methyl nucleoside at the position complementary to the 3′-terminal nucleoside of the polynucleotide acceptor strand, and/or a complementary 2-fluoro or 2-O-methyl nucleoside at the position complementary to the 5′-terminal nucleoside of the polynucleotide donor strand.

[0386] In some embodiments, the reference RNA ligase has the sequence corresponding to residues 12 to 346 of SEQ ID NO: 2, 54, 244, 648, 862, 956, 1088, 1416, 1612, 1840, 1866, 1954, 2062, 2674, 2754, or 2786, or the sequence corresponding to SEQ ID NO: 2, 54, 244, 648, 862, 956, 1088, 1416, 1612, 1840, 1866, 1954, 2062, 2674, 2754, or 2786. In some embodiments, the reference RNA ligase has the sequence corresponding to residues 12 to 346 of SEQ ID NO: 2, or the sequence corresponding to SEQ ID NO: 2.

[0387] In some embodiments, the engineered RNA ligase has one or more improved property selected from i) increased activity, ii) increased stability, iii) increased thermostability, iv) increased product yield, v) increased activity on polynucleotides ligase substrates with phosphorothioate internucleoside linkages, vi) increased activity on oligonucleotides with 2′-modifications, vii) increased substrate tolerance, or any combination of i), ii), iii), iv), v), vi), and vii), compared to a reference RNA ligase. In some embodiments, the improved property of the engineered RNA ligase is in comparison to the reference RNA ligase having the sequence corresponding to residues 12 to 346 of SEQ ID NO: 2, 54, 244, 648, 862, 956, 1088, 1416, 1612, 1840, 1866, 1954, 2062, 2674, 2754, or 2786, or the sequence corresponding to SEQ ID NO: 2, 54, 244, 648, 862, 956, 1088, 1416, 1612, 1840, 1866, 1954, 2062, 2674, 2754, or 2786. In some embodiments, the reference RNA ligase has the sequence corresponding to residues 12 to 346 of SEQ ID NO: 2, or the sequence corresponding to SEQ ID NO: 2.

[0388] In some embodiments, the engineered RNA ligase is expressed as a fusion protein. In some embodiments, the engineered RNA ligase described herein can be fused to a variety of polypeptide sequences, such as, by way of example and not limitation, polypeptide tags that can be used for detection and/or purification, and nucleic binding domains to enhance activity. In some embodiments, the fusion protein of the engineered RNA ligase comprises a glycine-histidine or histidine-tag (His-tag). In some embodiments, the fusion protein of the engineered RNA ligase comprises a polylysine, for example, 2-12 contiguous lysine residues. In some embodiments, the fusion protein of the engineered RNA ligase comprises an epitope tag, such as c-myc, FLAG, V5, or hemagglutinin (HA). In some embodiments, the fusion protein of the engineered RNA ligase comprises a GST, SUMO, Strep, MBP, or GFP tag. In some embodiments, the engineered RNA ligase is fused to protein domains that bind nucleic acids, particularly RNA, for example, zinc knuckle (zk), helix zinc knuckle (hzk), RGG/RG box motifs, RNase III (rnc), and homeodomains (see, e.g., Tong et al., Nucleic Acids Res., 50 (19): 11175-11185, incorporated by reference herein). In some embodiments, the fusion is to the amino (N—) terminus of engineered RNA ligase polypeptide. In some embodiments, the fusion is to the carboxy (C—) terminus of the engineered RNA ligase polypeptide.

[0389] In some embodiments, the engineered RNA ligase polypeptide described herein is an isolated composition. In some embodiments, the engineered RNA ligase polypeptide is purified. In some embodiments, the engineered RNA ligase is provided in solution, as a lyophilizate, or immobilized on a substrate, as further discussed herein.

[0390] In some embodiments, the present disclosure further provides functional fragments or biologically active fragments of engineered RNA ligase polypeptides described herein. Thus, for each and every embodiment herein of an engineered RNA ligase, a functional fragment or biologically active fragment of the engineered RNA ligase is provided herewith. In some embodiments, a functional fragment or biologically active fragments of an engineered RNA ligase comprises at least about 90%, 91%, 92%, 93%, 94%, 95%, 96%, 97%, 98%, or 99% of the activity of the RNA ligase polypeptide from which it was derived (i.e., the parent RNA ligase). In some embodiments, functional fragments or biologically active fragments comprise at least 90%, 91%, 92%, 93%, 94%, 95%, 96%, 97%, 98%, or 99% of the parent sequence of the RNA ligase. In some embodiments, the functional fragment will be truncated by less than 5, less than 10, less than 15, less than 10, less than 25, less than 30, less than 35, less than 40, less than 45, less than 50 amino acids, less than 55 amino acids, less than 60 amino acids, less than 65 amino acids, or less than 70 amino acids.

[0391] In some embodiments, a functional fragment of an engineered RNA ligase herein comprises at least 70%, 75%, 80%, 81%, 82%, 83%, 84%, 85%, 90%, 91%, 92%, 93%, 94%, 95%, 96%, 97%, 98%, or 99% of the parent sequence of the engineered RNA ligase. In some embodiments, the functional fragment will be truncated by less than 5, less than 10, less than 15, less than 10, less than 25, less than 30, less than 35, less than 40, less than 45, less than 50, less than 55, less than 60, less than 65, or less than 70 amino acids.

[0392] In some embodiments, the functional fragments or biologically active fragments of the engineered RNA ligase polypeptide described herein include at least a mutation or mutation set in the amino acid sequence of the engineered RNA ligase described herein. Accordingly, in some embodiments, the functional fragments or biologically active fragments of the engineered RNA ligase displays the enhanced or improved property associated with the mutation or mutation set in the parent RNA ligase.

### Polynucleotides Encoding Engineered Polypeptides, Expression Vectors and Host Cells

[0393] In another aspect, the present disclosure provides recombinant polynucleotides encoding the engineered RNA ligase described herein. In some embodiments, the recombinant polynucleotides are operably linked to one or more heterologous regulatory sequences that control gene expression to create a recombinant polynucleotide construct capable of expressing the engineered RNA ligase.

[0394] As will be apparent to the skilled artisan, availability of a protein sequence and the knowledge of the codons corresponding to the various amino acids provide a description of all the polynucleotides capable of encoding the subject polypeptides. The degeneracy of the genetic code, where the same amino acids are encoded by alternative or synonymous codons, allows an extremely large number of nucleic acids to be made, all of which encode an engineered RNA ligase of the present disclosure. Thus, the present disclosure provides methods and compositions for the production of each and every possible variation of polynucleotides that could be made that encode the engineered RNA ligase polypeptides described herein by selecting combinations based on the possible codon choices, and all such variations of polynucleotides are to be considered specifically disclosed for any polypeptide described herein, including the amino acid sequences presented in the Examples (e.g., in Tables 5.1, 6.1, 6.2, 7.1, 8.1, 8.2, 9.1, 10.1, 11.1, 12.1, 13.1, 14.1, 15.1, 16.1, 17.1,18.1, 19.1, 20.1, 21.1, 22.1, 23.1, 24.1, 25.1, and 26.1,) and in the accompanying Sequence Listing.

[0395] In some embodiments, the codons are preferably optimized for utilization by the chosen host cell for protein production. In some embodiments, preferred codons in bacterial cells are used for expression in bacterial cells. In some embodiments, preferred codons in fungal cells are used for expression in fungal cells. In some embodiments, preferred codons in insect cells are used for expression in insect cells. In some embodiments, preferred codons in mammalian cells are used for expression in mammalian cells. In some embodiments, codon optimized polynucleotides encoding an engineered RNA ligase polypeptide described herein contain preferred codons at about 40%, 50%, 60%, 70%, 80%, 90%, or greater than 90% of the codon positions in the full length coding region.

[0396] Accordingly, in some embodiments, a recombinant polynucleotide of the present disclosure encodes an engineered RNA ligase polypeptides described herein. In some embodiments, the polynucleotide sequence of the recombinant polynucleotide is codon optimized.

[0397] In some embodiments, the recombinant polynucleotide comprises a polynucleotide sequence encoding an engineered RNA ligase comprising an amino acid sequence having at least 70%, 75%, 80%, 81%, 82%, 83%, 84%, 85%, 86%, 87%, 88%, 89%, 90%, 91%, 92%, 93%, 94%, 95%, 96%, 97%, 98%, 99%, or more sequence identity to a reference sequence corresponding to residues 12 to 346 of an even-numbered SEQ ID NO. of SEQ ID NOs: 2-1470 and 1478-3058, or to a reference sequence corresponding to an even-numbered SEQ ID NO. of SEQ ID NOs: 2-1470 and 1478-3058, wherein the amino acid sequence comprises one or more substitutions relative to the reference sequence corresponding to residues 12 to 346 of SEQ ID NO: 2, 54, 244, 648, 862, 956, 1088, 1416, 1612, 1840, 1866, 1954, 2062, 2674, 2754, or 2786, or relative to the reference sequence corresponding to SEQ ID NO: 2, 54, 244, 648, 862, 956, 1088, 1416, 1612, 1840, 1866, 1954, 2062, 2674, 2754, or 2786.

[0398] In some embodiments, the recombinant polynucleotide comprises a polynucleotide sequence encoding an engineered RNA ligase comprising an amino acid sequence having at least 70%, 75%, 80%, 81%, 82%, 83%, 84%, 85%, 86%, 87%, 88%, 89%, 90%, 91%, 92%, 93%, 94%, 95%, 96%, 97%, 98%, 99%, or more sequence identity to the reference sequence corresponding to residues 12 to 346 of SEQ ID NO: 2, 54, 244, 648, 862, 956, 1088, 1416, 1612, 1840, 1866, 1954, 2062, 2674, 2754, or 2786, or to the reference sequence corresponding to SEQ ID NO: 2, 54, 244, 648, 862, 956, 1088, 1416, 1612, 1840, 1866, 1954, 2062, 2674, 2754, or 2786, wherein the amino acid sequence comprises one or more substitutions relative to the reference sequence corresponding to residues 12 to 346 of SEQ ID NO: 2, 54, 244, 648, 862, 956, 1088, 1416, 1612, 1840, 1866, 1954, 2062, 2674, 2754, or 2786, or relative to the reference sequence corresponding to SEQ ID NO: 2, 54, 244, 648, 862, 956, 1088, 1416, 1612, 1840, 1866, 1954, 2062, 2674, 2754, or 2786.

[0399] In some embodiments, the recombinant polynucleotide comprises a polynucleotide sequence encoding an engineered RNA ligase comprising an amino acid sequence having at least 70%, 75%, 80%, 81%, 82%, 83%, 84%, 85%, 86%, 87%, 88%, 89%, 90%, 91%, 92%, 93%, 94%, 95%, 96%, 97%, 98%, 99%, or more sequence identity to the reference sequence corresponding to residues 12 to 346 of SEQ ID NO: 2, or to the reference sequence corresponding to SEQ ID NO: 2, wherein the amino acid sequence comprises one or more substitutions relative to the reference sequence corresponding to residues 12 to 346 of SEQ ID NO: 2, or relative to the reference sequence corresponding to SEQ ID NO: 2.

[0400] In some embodiments, the recombinant polynucleotide comprises a polynucleotide sequence encoding an engineered RNA ligase comprising an amino acid sequence having at least 70%, 75%, 80%, 81%, 82%, 83%, 84%, 85%, 86%, 87%, 88%, 89%, 90%, 91%, 92%, 93%, 94%, 95%, 96%, 97%, 98%, 99%, or more sequence identity to the reference sequence corresponding to residues 12 to 346 of SEQ ID NO: 54, 244, 648, 862, 956, 1088, 1416, 1612, 1840, 1866, 1954, 2062, 2674, 2754, or 2786, or to the reference sequence corresponding to SEQ ID NO: 54, 244, 648, 862, 956, 1088, 1416, 1612, 1840, 1866, 1954, 2062, 2674, 2754, or 2786, wherein the amino acid sequence comprises one or more substitutions relative to the reference sequence corresponding to residues 12 to 346 of SEQ ID NO: 2, or relative to the reference sequence corresponding to SEQ ID NO: 2.

[0401] In some embodiments, the recombinant polynucleotide comprises a polynucleotide sequence encoding an engineered RNA ligase comprising an amino acid sequence having at least 70%, 75%, 80%, 81%, 82%, 83%, 84%, 85%, 86%, 87%, 88%, 89%, 90%, 91%, 92%, 93%, 94%, 95%, 96%, 97%, 98%, 99%, or more sequence identity to the reference sequence corresponding to residues 12 to 346 of an even-numbered SEQ ID NO. of SEQ ID NOs: 4-1470 and 1478-3058, or to the reference sequence corresponding to an even-numbered SEQ ID NO. of SEQ ID NOs: 4-1470 and 1478-3058, wherein the amino acid sequence comprises one or more substitutions relative to the reference sequence corresponding to residues 12 to 346 of SEQ ID NO: 2, or relative to the reference sequence corresponding to SEQ ID NO: 2.

[0402] In some embodiments, the recombinant polynucleotide comprises a polynucleotide sequence encoding an engineered RNA ligase comprising an amino acid sequence having at least 70%, 75%, 80%, 81%, 82%, 83%, 84%, 85%, 86%, 87%, 88%, 89%, 90%, 91%, 92%, 93%, 94%, 95%, 96%, 97%, 98%, 99%, or more sequence identity to the reference sequence corresponding to residues 12 to 346 of an even-numbered SEQ ID NO. of SEQ ID NOs: 4-218, or to the reference sequence corresponding to an even-numbered SEQ ID NO. of SEQ ID NOs: 4-218, wherein the amino acid sequence comprises one or more substitutions relative to the reference sequence corresponding to residues 12 to 346 of SEQ ID NO: 2, or relative to the reference sequence corresponding to SEQ ID NO: 2.

[0403] In some embodiments, the recombinant polynucleotide comprises a polynucleotide sequence encoding an engineered RNA ligase comprising an amino acid sequence comprising at least a substitution at amino acid position 10, 11, 12, 13, 15, 17, 18, 21, 23, 25, 26, 28, 29, 30, 32, 33, 37, 38, 39, 40, 41, 42, 45, 52, 54, 56, 57, 58, 60, 61, 62, 64, 65, 67, 71, 73, 74, 75, 77, 80, 81, 83, 84, 86, 87, 89, 90, 91, 93, 95, 97, 99, 100, 101, 102, 103, 104, 105, 106, 107, 109, 113, 114, 116, 117, 119, 121, 122, 123, 125, 126, 127, 128, 129, 131, 135, 137, 140, 141, 143, 144, 148, 150, 154, 156, 157, 158, 159, 160, 161, 162, 165, 169, 170, 171, 173, 175, 177, 178, 179, 181, 183, 184, 185, 190, 191, 192, 193, 194, 197, 198, 204, 206, 208, 210, 212, 213, 214, 215, 218, 223, 224, 226, 228, 229, 230, 232, 236, 238, 241, 243, 247, 248, 249, 250, 251, 252, 253, 254, 255, 256, 257, 258, 260, 261, 264, 265, 266, 267, 268, 270, 271, 272, 274, 276, 277, 280, 282, 283, 286, 288, 289, 290, 291, 292, 294, 295, 296, 297, 298, 299, 300, 301, 302, 305, 306, 307, 310, 311, 315, 316, 317, 318, 323, 324, 325, 326, 327, 330, 331, 332, 334, 335, 336, 337, 338, 341, 342, 344, 345, or 346, or any combinations thereof, wherein the amino acid positions are relative to the reference sequence corresponding to residues 12 to 346 of SEQ ID NO: 2, or relative to the reference sequence corresponding to SEQ ID NO: 2.

[0404] In some embodiments, the recombinant polynucleotide comprises a polynucleotide sequence encoding an engineered RNA ligase comprising an amino acid sequence comprising at least a substitution at amino acid position 10, 11, 12, 13, 17, 21, 23, 25, 26, 28, 29, 30, 32, 37, 38, 40, 41, 42, 45, 52, 54, 56, 57, 58, 60, 61, 62, 64, 65, 67, 71, 73, 74, 75, 77, 80, 83, 84, 87, 90, 91, 93, 97, 99, 100, 101, 102, 103, 104, 105, 106, 107, 109, 113, 114, 121, 122, 123, 125, 126, 127, 128, 129, 131, 135, 137, 140, 141, 143, 148, 150, 157, 158, 160, 161, 162, 165, 169, 170, 173, 178, 179, 184, 190, 191, 192, 193, 194, 197, 198, 204, 206, 208, 210, 213, 215, 218, 223, 228, 229, 232, 236, 238, 241, 243, 248, 249, 250, 251, 252, 253, 254, 255, 258, 261, 264, 265, 267, 268, 270, 271, 272, 274, 276, 277, 282, 286, 289, 290, 292, 294, 295, 297, 298, 299, 300, 301, 302, 305, 311, 318, 323, 324, 325, 327, 332, 336, 338, 341, 344, or 346; a substitution or amino acid residue 18A/H, 33A/I/T/V, 39P, 86D/L, 89C/D/E/L/N/Q/R/S/T/V/Y, 95A/C/G/I, 116L, 117A/Q, 119L, 144L, 154S/V, 156G/H/S, 171S, 175A, 177K, 181E/N/P/R/S, 183L, 212E/G/K/L, 224A/Q/R, 226R, 230T/V, 247I/L/R/S, 256E/G/M/S/W, 257D/E/G, 260G, 280L/W, 283C/V, 288L/R/W, 291S, 296E/G/L/Q/W, 306G/T, 307K/R, 310H/L/M/N/Q/R/S/T, 315E, 316I/Y, 317E/F/G/Q/V/W, 326C/L, 330A/D/E/G/K, 331D/G/S, 334E, 335Q, 337A/V, 338G/L/M, 342R/S/T, or 345Q/S; or any combinations thereof, wherein the amino acid positions are relative to the reference sequence corresponding to residues 12 to 346 of SEQ ID NO: 2, or relative to the reference sequence corresponding to SEQ ID NO: 2.

[0405] In some embodiments, the recombinant polynucleotide comprises a polynucleotide sequence encoding an engineered RNA ligase comprising an amino acid sequence comprising at least a substitution at amino acid position 11, 12, 23, 25, 29, 37, 38, 75, 86, 89, 93, 101, 122, 143, 157, 183, 192, 194, 198, 212, 214, 230, 241, 248, 249, 250, 251, 254, 266, 268, 280, 291, 295, 298, 307, 316, 318, 326, 330, or 331, or any combinations thereof, wherein the amino acid positions are relative to the reference sequence corresponding to residues 12 to 346 of SEQ ID NO: 2, or relative to the reference sequence corresponding to SEQ ID NO: 2.

[0406] In some embodiments, the recombinant polynucleotide comprises a polynucleotide sequence encoding an engineered RNA ligase comprising an amino acid sequence comprising at least a substitution at amino acid position 11, 12, 23, 25, 29, 37, 38, 75, 93, 101, 122, 143, 157, 192, 194, 198, 241, 248, 249, 250, 251, 254, 268, 295, 298, or 318; a substitution or amino acid residue 86D/L, 89C/D/E/L/N/Q/R/S/T/V/Y, 183L, 212E/G/K/L, 214A/C/H/K/L/Q/Y, 226R, 230T/V, 266C/1, 280L/W, 291H/L/Q/R/S/T/W, 307K/R, 326C/L, 330A/D/E/G/K, or 331D/G/S; or any combinations thereof, wherein the amino acid positions are relative to the reference sequence corresponding to residues 12 to 346 of SEQ ID NO: 2, or relative to the reference sequence corresponding to SEQ ID NO: 2.

[0407] In some embodiments, the recombinant polynucleotide comprises a polynucleotide sequence encoding an engineered RNA ligase comprising an amino acid sequence comprising at least a substitution or substitution set at amino acid position(s) 256, 258, 254, 251, 248, 37, 54, 232, 15, 71, 26, 116, 38, 25, 106/251, 52, 33, 247, 37/249/266/316/330/334/335, 21, 11/37/249/266/316, 261, 11/266/316, 11/248/249/266, 331, 11/248/249, 255, 37/249/266/316/334, 266, 11/37/156/249/335, 37/156/248/249/266/334, 334, 156, 11/266/316/334, 11/39/156/248/316, 11/249, 37/156,107/251, 156/249/316, 37/156/316, 11/37/156/249, 11/37/334, 194, 37/316,175, 11/156/249/316, 11/37, 252, 12, 37/266, 11/37/156/266, 11/37/156/248/266, 37/236/248/249, 37/156/248/249, 11/266/330/335, 249, 11/156/248/249/316, 37/249/316, 11, 11/156, 11/37/249, 330, 316, 156/249/266/335, 249/266/316/330/335, 11/156/249, 266/316/330/334/335, 156/248/249/316/334, 37/156/248/249/316, 156/266, 248/249, 156/249/316/330/335, 218, 37/156/248/249/266, 11/37/156/248/249/316, 37/156/316/330, 11/37/248/249/316/330, 11/37/248/249, 249/330/335, 11/37/156/330/334, 40, 11/37/148/249/316, 83, 323, 193, 335, or 257, wherein the amino acid positions are relative to the reference sequence corresponding to residues 12 to 346 of SEQ ID NO: 2, or relative to the reference sequence corresponding to SEQ ID NO: 2.

[0408] In some embodiments, the recombinant polynucleotide comprises a polynucleotide sequence encoding an engineered RNA ligase comprising an amino acid sequence comprising at least a substitution at an amino acid position provided in Tables 5.1, 6.1, 6.2, 7.1, 8.1, 8.2, 9.1, 10.1, 11.1, 12.1, 13.1, 14.1, 15.1, 16.1, 17.1, 18.1, 19.1, 20.1, 21.1, 22.1, 23.1, 24.1, 25.1, and 26.1, wherein the amino acid positions are relative to the reference sequence corresponding to residues 12 to 346 of SEQ ID NO: 2, or relative to the reference sequence corresponding to SEQ ID NO: 2.

[0409] In some embodiments, the recombinant polynucleotide comprises a polynucleotide sequence encoding an engineered RNA ligase comprising an amino acid sequence comprising at least one substitution provided in Tables 5.1, 6.1, 6.2, 7.1, 8.1, 8.2, 9.1, 10.1, 11.1, 12.1, 13.1, 14.1, 15.1, 16.1, 17.1, 18.1, 19.1, 20.1, 21.1, 22.1, 23.1, 24.1, 25.1, and 26.1, wherein the amino acid positions are relative to the reference sequence corresponding to residues 12 to 346 of SEQ ID NO: 2, or relative to the reference sequence corresponding to SEQ ID NO: 2.

[0410] In some embodiments, the recombinant polynucleotide comprises a polynucleotide sequence encoding an engineered RNA ligase comprising an amino acid sequence comprising at least a substitution or substitution set at amino acid position(s) provided in Tables 5.1, 6.1, 6.2, 7.1, 8.1, 8.2, 9.1, 10.1, 11.1, 12.1, 13.1, 14.1, 15.1, 16.1, 17.1, 18.1, 19.1, 20.1, 21.1, 22.1, 23.1, 24.1, 25.1, and 26.1, wherein the amino acid positions are relative to the reference sequence corresponding to residues 12 to 346 of SEQ ID NO: 2, or relative to the reference sequence corresponding to SEQ ID NO: 2.

[0411] In some embodiments, the recombinant polynucleotide comprises a polynucleotide sequence encoding an engineered RNA ligase comprising an amino acid sequence comprising at least a substitution or substitution set of an RNA ligase variant provided in Tables 5.1, 6.1, 6.2, 7.1, 8.1, 8.2, 9.1, 10.1, 11.1, 12.1, 13.1, 14.1, 15.1, 16.1, 17.1, 18.1, 19.1, 20.1, 21.1, 22.1, 23.1, 24.1, 25.1, and 26.1, wherein the amino acid positions are relative to the reference sequence corresponding to residues 12 to 346 of SEQ ID NO: 2, or relative to the reference sequence corresponding to SEQ ID NO: 2.

[0412] In some embodiments, the recombinant polynucleotide comprises a polynucleotide sequence encoding an engineered RNA ligase comprising an amino acid sequence having at least 70%, 75%, 80%, 81%, 82%, 83%, 84%, 85%, 86%, 87%, 88%, 89%, 90%, 91%, 92%, 93%, 94%, 95%, 96%, 97%, 98%, 99%, or more sequence identity to a reference sequence comprising a substitution or substitution set of an RNA ligase variant provided in Tables 5.1, 6.1, 6.2, 7.1, 8.1, 8.2, 9.1, 10.1, 11.1, 12.1, 13.1, 14.1, 15.1, 16.1, 17.1, 18.1, 19.1, 20.1, 21.1, 22.1, 23.1, 24.1, 25.1, and 26.1, wherein the amino acid positions are relative to the reference sequence corresponding to residues 12 to 346 of SEQ ID NO: 2, or relative to the reference sequence corresponding to SEQ ID NO: 2.

[0413] In some embodiments, the recombinant polynucleotide comprises a polynucleotide sequence encoding an engineered RNA ligase comprising an amino acid sequence having at least 70%, 75%, 80%, 81%, 82%, 83%, 84%, 85%, 86%, 87%, 88%, 89%, 90%, 91%, 92%, 93%, 94%, 95%, 96%, 97%, 98%, 99%, or more sequence identity to the reference sequence corresponding to residues 12 to 346 of SEQ ID NO: 54, 244, 648, 862, 956, 1088, 1416, 1612, 1840, 1866, 1954, 2062, 2674, 2754, or 2786, or to the reference sequence corresponding to SEQ ID NO: 54, 244, 648, 862, 956, 1088, 1416, 1612, 1840, 1866, 1954, 2062, 2674, 2754, or 2786.

[0414] In some embodiments, the recombinant polynucleotide comprises a polynucleotide sequence encoding an engineered RNA ligase comprising an amino acid sequence having at least 70%, 75%, 80%, 81%, 82%, 83%, 84%, 85%, 86%, 87%, 88%, 89%, 90%, 91%, 92%, 93%, 94%, 95%, 96%, 97%, 98%, 99%, or more sequence identity to the reference sequence corresponding to residues 12 to 346 of an even-numbered SEQ ID NO. of SEQ ID NOs: 4-1470 and 1478-3058, or to the reference sequence corresponding to an even-numbered SEQ ID NO. of SEQ ID NOs: 4-1470 and 1478-3058.

[0415] In some embodiments, the recombinant polynucleotide comprises a polynucleotide sequence encoding an engineered RNA ligase comprising an amino acid sequence having at least 70%, 75%, 80%, 81%, 82%, 83%, 84%, 85%, 86%, 87%, 88%, 89%, 90%, 91%, 92%, 93%, 94%, 95%, 96%, 97%, 98%, 99%, or more sequence identity to the reference sequence corresponding to residues 12 to 346 of SEQ ID NO: 54, 244, 648, 862, 956, 1088, 1416, 1612, 1840, 1866, 1954, 2062, 2674, 2754, or 2786, or to the reference sequence corresponding to SEQ ID NO: 54, 244, 648, 862, 956, 1088, 1416, 1612, 1840, 1866, 1954, 2062, 2674, 2754, or 2786, wherein the amino acid sequence comprises one or more substitutions relative to the reference sequence corresponding to residues 12 to 346 of SEQ ID NO: 54, 244, 648, 862, 956, 1088, 1416, 1612, 1840, 1866, 1954, 2062, 2674, 2754, or 2786, or relative to the reference sequence corresponding to SEQ ID NO: 54, 244, 648, 862, 956, 1088, 1416, 1612, 1840, 1866, 1954, 2062, 2674, 2754, or 2786.

[0416] In some embodiments, the recombinant polynucleotide comprises a polynucleotide sequence encoding an engineered RNA ligase comprising an amino acid sequence having at least 70%, 75%, 80%, 81%, 82%, 83%, 84%, 85%, 86%, 87%, 88%, 89%, 90%, 91%, 92%, 93%, 94%, 95%, 96%, 97%, 98%, 99%, or more sequence identity to the reference sequence corresponding to residues 12 to 346 of an even-numbered SEQ ID NO. of SEQ ID NOs: 4-1470 and 1478-3058, or to the reference sequence corresponding to an even-numbered SEQ ID NO. of SEQ ID NOs: 4-1470 and 1478-3058, wherein the amino acid sequence comprises one or more substitutions relative to the reference sequence corresponding to residues 12 to 346 of SEQ ID NO: 54, 244, 648, 862, 956, 1088, 1416, 1612, 1840, 1866, 1954, 2062, 2674, 2754, or 2786, or relative to the reference sequence corresponding to SEQ ID NO: 54, 244, 648, 862, 956, 1088, 1416, 1612, 1840, 1866, 1954, 2062, 2674, 2754, or 2786.

[0417] In some embodiments, the recombinant polynucleotide comprises a polynucleotide sequence encoding an engineered RNA ligase comprising an amino acid sequence comprising at least a substitution at amino acid position 10, 11, 12, 13, 15, 17, 18, 21, 23, 25, 26, 28, 29, 30, 32, 33, 37, 38, 39, 40, 41, 42, 45, 52, 54, 56, 57, 58, 60, 61, 62, 64, 65, 67, 71, 73, 74, 75, 77, 80, 81, 83, 84, 86, 87, 89, 90, 91, 93, 95, 97, 99, 100, 101, 102, 103, 104, 105, 106, 107, 109, 113, 114, 116, 117, 119, 121, 122, 123, 125, 126, 127, 128, 129, 131, 135, 137, 140, 141, 143, 144, 148, 150, 154, 156, 157, 158, 159, 160, 161, 162, 165, 169, 170, 171, 173, 175, 177, 178, 179, 181, 183, 184, 185, 190, 191, 192, 193, 194, 197, 198, 204, 206, 208, 210, 212, 213, 214, 215, 218, 223, 224, 226, 228, 229, 230, 232, 236, 238, 241, 243, 247, 248, 249, 250, 251, 252, 253, 254, 255, 256, 257, 258, 260, 261, 264, 265, 266, 267, 268, 270, 271, 272, 274, 276, 277, 280, 282, 283, 286, 288, 289, 290, 291, 292, 294, 295, 296, 297, 298, 299, 300, 301, 302, 305, 306, 307, 310, 311, 315, 316, 317, 318, 323, 324, 325, 326, 327, 330, 331, 332, 334, 335, 336, 337, 338, 341, 342, 344, 345, or 346, or any combinations thereof, wherein the amino acid positions are relative to the reference sequence corresponding to residues 12 to 346 of SEQ ID NO: 54, 244, 648, 862, 956, 1088, 1416, 1612, 1840, 1866, 1954, 2062, 2674, 2754, or 2786, or relative to the reference sequence corresponding to SEQ ID NO: 54, 244, 648, 862, 956, 1088, 1416, 1612, 1840, 1866, 1954, 2062, 2674, 2754, or 2786.

[0418] In some embodiments, the recombinant polynucleotide comprises a polynucleotide sequence encoding an engineered RNA ligase comprising an amino acid sequence comprising at least a substitution at amino acid position 10, 11, 12, 13, 17, 21, 23, 25, 26, 28, 29, 30, 32, 37, 38, 40, 41, 42, 45, 52, 54, 56, 57, 58, 60, 61, 62, 64, 65, 67, 71, 73, 74, 75, 77, 80, 83, 84, 87, 90, 91, 93, 97, 99, 100, 101, 102, 103, 104, 105, 106, 107, 109, 113, 114, 121, 122, 123, 125, 126, 127, 128, 129, 131, 135, 137, 140, 141, 143, 148, 150, 157, 158, 160, 161, 162, 165, 169, 170, 173, 178, 179, 184, 190, 191, 192, 193, 194, 197, 198, 204, 206, 208, 210, 213, 215, 218, 223, 228, 229, 232, 236, 238, 241, 243, 248, 249, 250, 251, 252, 253, 254, 255, 258, 261, 264, 265, 267, 268, 270, 271, 272, 274, 276, 277, 282, 286, 289, 290, 292, 294, 295, 297, 298, 299, 300, 301, 302, 305, 311, 318, 323, 324, 325, 327, 332, 336, 338, 341, 344, or 346; a substitution or amino acid residue 18A/H, 33A/I/T/V, 39P, 86D/L, 89C/D/E/L/N/Q/R/S/T/V/Y, 95A/C/G/I, 116L, 117A/Q, 119L, 144L, 154S/V, 156G/H/S, 171S, 175A, 177K, 181E/N/P/R/S, 183L, 212E/G/K/L, 224A/Q/R, 226R, 230T/V, 247I/L/R/S, 256E/G/M/S/W, 257D/E/G, 260G, 280L/W, 283C/V, 288L/R/W, 291S, 296E/G/L/Q/W, 306G/T, 307K/R, 310H/L/M/N/Q/R/S/T, 315E, 316I/Y, 317E/F/G/Q/V/W, 326C/L, 330A/D/E/G/K, 331D/G/S, 334E, 335Q, 337A/V, 338G/L/M, 342R/S/T, or 345Q/S; or any combinations thereof, wherein the amino acid positions are relative to the reference sequence corresponding to residues 12 to 346 of SEQ ID NO: 54, 244, 648, 862, 956, 1088, 1416, 1612, 1840, 1866, 1954, 2062, 2674, 2754, or 2786, or relative to the reference sequence corresponding to SEQ ID NO: 54, 244, 648, 862, 956, 1088, 1416, 1612, 1840, 1866, 1954, 2062, 2674, 2754, or 2786.

[0419] In some embodiments, the recombinant polynucleotide comprises a polynucleotide sequence encoding an engineered RNA ligase comprising an amino acid sequence comprising at least a substitution at amino acid position 11, 12, 23, 25, 29, 37, 38, 75, 86, 89, 93, 101, 122, 143, 157, 183, 192, 194, 198, 212, 214, 230, 241, 248, 249, 250, 251, 254, 266, 268, 280, 291, 295, 298, 307, 316, 318, 326, 330, or 331, or any combinations thereof, wherein the amino acid positions are relative to the reference sequence corresponding to residues 12 to 346 of SEQ ID NO: 54, 244, 648, 862, 956, 1088, 1416, 1612, 1840, 1866, 1954, 2062, 2674, 2754, or 2786, or relative to the reference sequence corresponding to SEQ ID NO: 54, 244, 648, 862, 956, 1088, 1416, 1612, 1840, 1866, 1954, 2062, 2674, 2754, or 2786.

[0420] In some embodiments, the recombinant polynucleotide comprises a polynucleotide sequence encoding an engineered RNA ligase comprising an amino acid sequence comprising at least a substitution at amino acid position 11, 12, 23, 25, 29, 37, 38, 75, 93, 101, 122, 143, 157, 192, 194, 198, 241, 248, 249, 250, 251, 254, 268, 295, 298, or 318; a substitution or amino acid residue 86D/L, 89C/D/E/L/N/Q/R/S/T/V/Y, 183L, 212E/G/K/L, 214A/C/H/K/L/Q/Y, 226R, 230T/V, 266C/I, 280L/W, 291H/L/Q/R/S/T/W, 307K/R, 326C/L, 330A/D/E/G/K, or 331D/G/S; or any combinations thereof, wherein the amino acid positions are relative to the reference sequence corresponding to residues 12 to 346 of SEQ ID NO: 54, 244, 648, 862, 956, 1088, 1416, 1612, 1840, 1866, 1954, 2062, 2674, 2754, or 2786, or relative to the reference sequence corresponding to SEQ ID NO: 54, 244, 648, 862, 956, 1088, 1416, 1612, 1840, 1866, 1954, 2062, 2674, 2754, or 2786.

[0421] In some embodiments, the recombinant polynucleotide comprises a polynucleotide sequence encoding an engineered RNA ligase further comprising an amino acid sequence comprising at least a substitution at amino acid position 2, 14, 15, 63, 69, 81, 85, 95, 138, 142, 149, 159, 171, 186, 195, 202, 266, 275, 283, 285, 303, 314, 333, or 339; a substitution or amino acid residue 181, 33L, 39Q/S, 86G, 89G/H/I/M/W, 116N, 117D, 119T, 144W, 154C, 156A/L/N/Q/T, 175K, 177P, 181D, 183V, 185G/K, 212I, 2141, 224Y, 226I, 230D, 247K, 256A, 257L, 260S, 280G/N, 288E, 291P, 296K, 306L, 307E/Q, 310K, 315S/T, 316L, 317A, 326R, 330M/R, 331L/R/W, 334R, 335D/H, 337L, 3421, or 345V; or any combinations thereof, wherein the amino acid positions are relative to the reference sequence corresponding to residues 12 to 346 of SEQ ID NO: 54, 244, 648, 862, 956, 1088, 1416, 1612, 1840, 1866, 1954, 2062, 2674, 2754, or 2786, or relative to the reference sequence corresponding to SEQ ID NO: 54, 244, 648, 862, 956, 1088, 1416, 1612, 1840, 1866, 1954, 2062, 2674, 2754, or 2786.

[0422] In some embodiments, the recombinant polynucleotide comprises a polynucleotide sequence encoding an engineered RNA ligase comprising an amino acid sequence having at least 70%, 75%, 80%, 81%, 82%, 83%, 84%, 85%, 86%, 87%, 88%, 89%, 90%, 91%, 92%, 93%, 94%, 95%, 96%, 97%, 98%, 99%, or more sequence identity to the reference sequence corresponding to residues 12 to 346 of SEQ ID NO: 54, or to the reference sequence corresponding to SEQ ID NO: 54, wherein the amino acid sequence comprises one or more substitutions relative to the reference sequence corresponding to residues 12 to 346 of SEQ ID NO: 54, or relative to the reference sequence corresponding to SEQ ID NO: 54.

[0423] In some embodiments, the recombinant polynucleotide comprises a polynucleotide sequence encoding an engineered RNA ligase comprising an amino acid sequence having at least 70%, 75%, 80%, 81%, 82%, 83%, 84%, 85%, 86%, 87%, 88%, 89%, 90%, 91%, 92%, 93%, 94%, 95%, 96%, 97%, 98%, 99%, or more sequence identity to the reference sequence corresponding to residues 12 to 346 of an even-numbered SEQ ID NO. of SEQ ID NOs: 220-630, or to the reference sequence corresponding to an even-numbered SEQ ID NO. of SEQ ID NOs: 220-630, wherein the amino acid sequence comprises one or more substitutions relative to the reference sequence corresponding to residues 12 to 346 of SEQ ID NO: 54, or relative to the reference sequence corresponding to SEQ ID NO: 54.

[0424] In some embodiments, the recombinant polynucleotide comprises a polynucleotide sequence encoding an engineered RNA ligase comprising an amino acid sequence comprising at least a substitution or substitution set at amino acid position(s) 156/232/334/335, 12/254/256, 12/230, 12/230/251, 12/230/251/254/256, 12/38/230, 230/251, 12/38/254, 230/256, 254, 230, 12/230/254, 12/38/230/251/256, 12/251, 12/251/254/256, 38, 12/230/256, 12, 12/25/38/230/251, 12/38/102/230/251/256, 12/256, 38/230/256, 256, 12/230/251/256, 230/251/254, 230/254, 251/254, 12/25/230, 38/230, 38/251, 12/38/230/256, 102, 251, 12/25/251/256, 12/102/256, 12/38/230/251/254/256, 12/251/256, 102/230/251/254/256, 12/38/251, 12/230/251/254, 156/248/334/335, 12/25/38, 12/102/230/251/254, 12/38/251/254, 12/251/254, 12/102, 38/230/251/254/256, 12/25/230/251/256, 12/230/311, 12/254, 38/230/251/254, 12/38/251/256, 156/334/335, 257/258/334, 12/25/38/251/256, 334, 12/25/230/254/256, 38/251/256, 12/38/230/251/254, 12/38, 257/258/334/335, 12/38/254/256, 232/248/257/258/334/335, 156/258/334/335, 156/249/334/335, 12/102/230/254, 25, 156/257/258/334/335, 12/102/230, 156/248/257/258/334, 248/249/334/335, 232/257/258/334/335, 334/335, 156/334, 12/38/102/256, 156/257/334/335, 12/140/251/254, 251/254/256, 248/334/335, 156/258/334, 156/248/330/335, 12/38/256, 232/334/335, 156/249/334, 330/334/335, 156/248/334, 156/335, 257/334, 248/334, 232/248/334/335, 12/25/38/230/251/256, 156/248/249/334/335, 330/335, 248/257/334/335, 232/248/334, 156/232/248/334/335, 232/257/330/334, 156/248/291/334/335, 156/232/248/257/258/334, 156/232/249/334/335, 12/25, 156/248/330/334/335, 156/248/249/334, 232/248/330/335, 156/232/330/334/335, 197, 338, 327, 192, 331, 326, 345, 101, 100, 141, 198, 64, 306, 317, 265, 296, 194, 62, 90, 307, 103, 210, 105, or 61, wherein the amino acid positions are relative to the reference sequence corresponding to residues 12 to 346 of SEQ ID NO: 54, or relative to the reference sequence corresponding to SEQ ID NO: 54.

[0425] In some embodiments, the recombinant polynucleotide comprises a polynucleotide sequence encoding an engineered RNA ligase comprising an amino acid sequence having at least 70%, 75%, 80%, 81%, 82%, 83%, 84%, 85%, 86%, 87%, 88%, 89%, 90%, 91%, 92%, 93%, 94%, 95%, 96%, 97%, 98%, 99%, or more sequence identity to the reference sequence corresponding to residues 12 to 346 of SEQ ID NO: 244, or to the reference sequence corresponding to SEQ ID NO: 244, wherein the amino acid sequence comprises one or more substitutions relative to the reference sequence corresponding to residues 12 to 346 of SEQ ID NO: 244, or relative to the reference sequence corresponding to SEQ ID NO: 244.

[0426] In some embodiments, the recombinant polynucleotide comprises a polynucleotide sequence encoding an engineered RNA ligase comprising an amino acid sequence having at least 70%, 75%, 80%, 81%, 82%, 83%, 84%, 85%, 86%, 87%, 88%, 89%, 90%, 91%, 92%, 93%, 94%, 95%, 96%, 97%, 98%, 99%, or more sequence identity to the reference sequence corresponding to residues 12 to 346 of an even-numbered SEQ ID NO. of SEQ ID NOs: 632-820, or to the reference sequence corresponding to an even-numbered SEQ ID NO. of SEQ ID NOs: 632-820, wherein the amino acid sequence comprises one or more substitutions relative to the reference sequence corresponding to residues 12 to 346 of SEQ ID NO: 244, or relative to the reference sequence corresponding to SEQ ID NO: 244.

[0427] In some embodiments, the recombinant polynucleotide comprises a polynucleotide sequence encoding an engineered RNA ligase comprising an amino acid sequence comprising at least a substitution or substitution set at amino acid position(s) 141/197/326/327, 100/101/338, 141/198/326, 64/100/101, 100/338, 101/141/198/326, 101/198/326/327, 198/326, 64/100/101/338/345, 197/326, 198/327, 141/198/327, 198/326/327, 197/326/327, 64/100/338, 64/100/101/156/197/338, 64/100/101/338, 100/197/338, 197/338, 101/197/326, 64/100/197/338, 101/198, 141/197/327, 64/100/101/197/338, 101/326, 101/197/326/327, 197/327, 197, 141/197, 101, 101/198/326, 64/197/198/338, 141, 101/141, 100/101/197/338, 141/326, 338, 326, 197/198/338, 64/101/338, 64/197/198, 101/197, 100/101, 100/109/197/338, 101/197/338, 197/198, 141/326/327, 100/197, 64/100, 64/197/338, 100/197/198, 101/338, 141/327, 101/306, 64/100/101/197, 101/326/327, 100, 327, 326/345, 64/100/101/197/198, 326/327, 64/101,100/101/197, 101/327, 64/100/197/198/338, 306, 64/338,101/141/326/327, 64/101/197/338, or 101/198/306/327, wherein the amino acid positions are relative to the reference sequence corresponding to residues 12 to 346 of SEQ ID NO: 244, or relative to the reference sequence corresponding to SEQ ID NO: 244.

[0428] In some embodiments, the recombinant polynucleotide comprises a polynucleotide sequence encoding an engineered RNA ligase comprising an amino acid sequence having at least 70%, 75%, 80%, 81%, 82%, 83%, 84%, 85%, 86%, 87%, 88%, 89%, 90%, 91%, 92%, 93%, 94%, 95%, 96%, 97%, 98%, 99%, or more sequence identity to the reference sequence corresponding to residues 12 to 346 of SEQ ID NO: 648, or to the reference sequence corresponding to SEQ ID NO: 648, wherein the amino acid sequence comprises one or more substitutions relative to the reference sequence corresponding to residues 12 to 346 of SEQ ID NO: 648, or relative to the reference sequence corresponding to SEQ ID NO: 648.

[0429] In some embodiments, the recombinant polynucleotide comprises a polynucleotide sequence encoding an engineered RNA ligase comprising an amino acid sequence having at least 70%, 75%, 80%, 81%, 82%, 83%, 84%, 85%, 86%, 87%, 88%, 89%, 90%, 91%, 92%, 93%, 94%, 95%, 96%, 97%, 98%, 99%, or more sequence identity to the reference sequence corresponding to residues 12 to 346 of an even-numbered SEQ ID NO. of SEQ ID NOs: 822-954, or to the reference sequence corresponding to an even-numbered SEQ ID NO. of SEQ ID NOs: 822-954, wherein the amino acid sequence comprises one or more substitutions relative to the reference sequence corresponding to residues 12 to 346 of SEQ ID NO: 648, or relative to the reference sequence corresponding to SEQ ID NO: 648.

[0430] In some embodiments, the recombinant polynucleotide comprises a polynucleotide sequence encoding an engineered RNA ligase comprising an amino acid sequence comprising at least a substitution or substitution set at amino acid position(s) 194/330/331, 298, 331, 192/193/194/298, 330, 192/330/331, 192/193/194/331, 298/330/331, 194/298/330/331, 192/193/330/331, 192/298/331, 192/193, 194/330, 60/100/156, 193/296/331, 298/331, 193/194/330/331, 194, 194/298/331, 193/298, 193/330, 192, 192/193/194/298/331, 192/193/194/298/330, 192/193/298/331, 100/156, 62/100,298/330, 60/100, 192/193/298/330/331, 100, 193/194/298, 338, 62, 247, 18, 37, 254, 33, 261, 251, 260, 12, 117, 256, 255, 38, 29, 25, or 252, wherein the amino acid positions are relative to the reference sequence corresponding to residues 12 to 346 of SEQ ID NO: 648, or relative to the reference sequence corresponding to SEQ ID NO: 648.

[0431] In some embodiments, the recombinant polynucleotide comprises a polynucleotide sequence encoding an engineered RNA ligase comprising an amino acid sequence having at least 70%, 75%, 80%, 81%, 82%, 83%, 84%, 85%, 86%, 87%, 88%, 89%, 90%, 91%, 92%, 93%, 94%, 95%, 96%, 97%, 98%, 99%, or more sequence identity to the reference sequence corresponding to residues 12 to 346 of SEQ ID NO: 862, or to the reference sequence corresponding to SEQ ID NO: 862, wherein the amino acid sequence comprises one or more substitutions relative to the reference sequence corresponding to residues 12 to 346 of SEQ ID NO: 862, or relative to the reference sequence corresponding to SEQ ID NO: 862.

[0432] In some embodiments, the recombinant polynucleotide comprises a polynucleotide sequence encoding an engineered RNA ligase comprising an amino acid sequence having at least 70%, 75%, 80%, 81%, 82%, 83%, 84%, 85%, 86%, 87%, 88%, 89%, 90%, 91%, 92%, 93%, 94%, 95%, 96%, 97%, 98%, 99%, or more sequence identity to the reference sequence corresponding to residues 12 to 346 of an even-numbered SEQ ID NO. of SEQ ID NOs: 956-1078, or to the reference sequence corresponding to an even-numbered SEQ ID NO. of SEQ ID NOs: 956-1078, wherein the amino acid sequence comprises one or more substitutions relative to the reference sequence corresponding to residues 12 to 346 of SEQ ID NO: 862, or relative to the reference sequence corresponding to SEQ ID NO: 862.

[0433] In some embodiments, the recombinant polynucleotide comprises a polynucleotide sequence encoding an engineered RNA ligase comprising an amino acid sequence comprising at least a substitution or substitution set at amino acid position(s) 254, 18/254,247/317, 37/317/342, 33, 18/156/254, 18, 156, 254/338, 254/307, 33/37/317, 37, 37/156/317, 156/265/317, 265/317, 156/254, 33/156/317, 317, 156/317, 37/317, 18/338,338, 156/247/317, 33/317, 37/247/265/317, 33/37/156/317, 156/247/296/317, 18/307,156/296/317, 156/247, 37/247/317, 18/254/307, 307, 265, 33/37, 18/156, 33/156/296/317, 18/156/254/338, 37/265/317, 33/37/156/247/317, 296, 33/296/317, 156/296, 247/296/317, 37/296/317, 247/296, 33/37/156, 296/317, 156/254/307, 18/156/307, or 33/37/265, wherein the amino acid positions are relative to the reference sequence corresponding to residues 12 to 346 of SEQ ID NO: 862, or relative to the reference sequence corresponding to SEQ ID NO: 862.

[0434] In some embodiments, the recombinant polynucleotide comprises a polynucleotide sequence encoding an engineered RNA ligase comprising an amino acid sequence having at least 70%, 75%, 80%, 81%, 82%, 83%, 84%, 85%, 86%, 87%, 88%, 89%, 90%, 91%, 92%, 93%, 94%, 95%, 96%, 97%, 98%, 99%, or more sequence identity to the reference sequence corresponding to residues 12 to 346 of SEQ ID NO: 956, or to the reference sequence corresponding to SEQ ID NO: 956, wherein the amino acid sequence comprises one or more substitutions relative to the reference sequence corresponding to residues 12 to 346 of SEQ ID NO: 956, or relative to the reference sequence corresponding to SEQ ID NO: 956.

[0435] In some embodiments, the recombinant polynucleotide comprises a polynucleotide sequence encoding an engineered RNA ligase comprising an amino acid sequence having at least 70%, 75%, 80%, 81%, 82%, 83%, 84%, 85%, 86%, 87%, 88%, 89%, 90%, 91%, 92%, 93%, 94%, 95%, 96%, 97%, 98%, 99%, or more sequence identity to the reference sequence corresponding to residues 12 to 346 of an even-numbered SEQ ID NO. of SEQ ID NOs: 1080-1374, or to the reference sequence corresponding to an even-numbered SEQ ID NO. of SEQ ID NOs: 1080-1374, wherein the amino acid sequence comprises one or more substitutions relative to the reference sequence corresponding to residues 12 to 346 of SEQ ID NO: 956, or relative to the reference sequence corresponding to SEQ ID NO: 956.

[0436] In some embodiments, the recombinant polynucleotide comprises a polynucleotide sequence encoding an engineered RNA ligase comprising an amino acid sequence comprising at least a substitution or substitution set at amino acid position(s) 12/25/29/156, 12/255/256/257, 12/156/255, 247/252, 12/25, 12, 12/25/29/156/255, 256, 12/156, 12/25/156/255/256/257/261, 18/247/251, 25/255/256/257, 12/25/257, 255/257, 12/25/29/255/257, 256/257, 12/255/257, 12/156/255/256/257, 25, 18/38/251/252, 12/256/257/261, 12/29, 12/25/255/256/257/261, 38, 12/25/29/256/257, 29/257, 12/261,251, 249/251, 12/255, 12/29/156/256/257, 252, 255/257/261, 18, 29/255/257, 255/256/257, 12/25/29/156/256/257, 25/255/256/257/261, 29/255/256/257/261, 25/256, 18/38/247/252/327, 18/247, 25/29, 12/25/156/255/257, 18/156/251/252, 12/255/261, 25/255, 12/255/256/261, 156/255/257, 156/257, 12/156/256/257, 25/156/256/257, 12/25/29/156/257/261, 25/261, 12/156/255/256/261, 12/25/29/255/256/257, 38/252,255, 249/252, 12/156/255/256, 12/25/29/261, 257, 12/255/256, 12/29/255, 12/255/257/261, 12/156/257, 192/249/251/252, 12/25/29/255/261, 12/156/255/257, 12/29/255/257, 12/29/256/257, 18/252,249, 156/250, 38/251/252, 156/255/256/257, 25/257, 12/255/256/257/261, 25/156/261, 156/252, 12/25/255/256/257, 12/25/29/156/255/257, 29/156,251/252, 256/257/261, 25/156/255/256/257, 156/249/251/252, 25/29/255, 12/29/156, 255/256, 38/250/252, 247/249/252, 12/256/257, 60, 12/256, 12/156/256, 25/255/257/261, 12/25/29/255/256/261, 12/29/156/255/256, 12/25/156/255/256, 247/251/252, 256/261, 38/251, 12/25/29/156/261, 12/257,156/255/256/261, 12/25/156/255, 12/25/29/156/255/257/261, 12/29/256/261, 29/156/261, 25/29/156/257/261, 12/25/255/256/261, or 12/156/255/261, wherein the amino acid positions are relative to the reference sequence corresponding to residues 12 to 346 of SEQ ID NO: 956, or relative to the reference sequence corresponding to SEQ ID NO: 956.

[0437] In some embodiments, the recombinant polynucleotide comprises a polynucleotide sequence encoding an engineered RNA ligase comprising an amino acid sequence comprising at least a substitution at amino acid position 157, 183, 95, 185, 181, 213, 89, 28, 190, 214, or 143, or any combinations thereof, wherein the amino acid positions are relative to the reference sequence corresponding to residues 12 to 346 of SEQ ID NO: 956, or relative to the reference sequence corresponding to SEQ ID NO: 956.

[0438] In some embodiments, the recombinant polynucleotide comprises a polynucleotide sequence encoding an engineered RNA ligase comprising an amino acid sequence having at least 70%, 75%, 80%, 81%, 82%, 83%, 84%, 85%, 86%, 87%, 88%, 89%, 90%, 91%, 92%, 93%, 94%, 95%, 96%, 97%, 98%, 99%, or more sequence identity to the reference sequence corresponding to residues 12 to 346 of SEQ ID NO: 1088, or to the reference sequence corresponding to SEQ ID NO: 1088, wherein the amino acid sequence comprises one or more substitutions relative to the reference sequence corresponding to residues 12 to 346 of SEQ ID NO: 1088, or relative to the reference sequence corresponding to SEQ ID NO: 1088.

[0439] In some embodiments, the recombinant polynucleotide comprises a polynucleotide sequence encoding an engineered RNA ligase comprising an amino acid sequence having at least 70%, 75%, 80%, 81%, 82%, 83%, 84%, 85%, 86%, 87%, 88%, 89%, 90%, 91%, 92%, 93%, 94%, 95%, 96%, 97%, 98%, 99%, or more sequence identity to the reference sequence corresponding to residues 12 to 346 of an even-numbered SEQ ID NO. of SEQ ID NOs: 1376-1434, or to the reference sequence corresponding to an even-numbered SEQ ID NO. of SEQ ID NOs: 1376-1434, wherein the amino acid sequence comprises one or more substitutions relative to the reference sequence corresponding to residues 12 to 346 of SEQ ID NO: 1088, or relative to the reference sequence corresponding to SEQ ID NO: 1088.

[0440] In some embodiments, the recombinant polynucleotide comprises a polynucleotide sequence encoding an engineered RNA ligase comprising an amino acid sequence comprising at least a substitution or substitution set at amino acid position(s) 95/157, 95/183/185/214, 89/183, 28/89/143/183, 28/143/157, 181/183, 143/181/183/214, 143/181/183, 89/143/183, 28/143/181/183, 143/157, 95/181/183, 157, 143/183, 89/143/157/183, 89/95/157, 89/157, 89/95/143/181, 95/143, 89/157/183/214, 143/214, 143/181/183/185, 28/95/143, 143/183/214, 28/95/183/214, 89/143/157, 28/95, 95/143/183/185, or 95/143/157/183, wherein the amino acid positions are relative to the reference sequence corresponding to residues 12 to 346 of SEQ ID NO: 1088, or relative to the reference sequence corresponding to SEQ ID NO: 1088.

[0441] In some embodiments, the recombinant polynucleotide comprises a polynucleotide sequence encoding an engineered RNA ligase comprising an amino acid sequence having at least 70%, 75%, 80%, 81%, 82%, 83%, 84%, 85%, 86%, 87%, 88%, 89%, 90%, 91%, 92%, 93%, 94%, 95%, 96%, 97%, 98%, 99%, or more sequence identity to the reference sequence corresponding to residues 12 to 346 of SEQ ID NO: 1416, or to the reference sequence corresponding to SEQ ID NO: 1416, wherein the amino acid sequence comprises one or more substitutions relative to the reference sequence corresponding to residues 12 to 346 of SEQ ID NO: 1416, or relative to the reference sequence corresponding to SEQ ID NO: 1416.

[0442] In some embodiments, the recombinant polynucleotide comprises a polynucleotide sequence encoding an engineered RNA ligase comprising an amino acid sequence having at least 70%, 75%, 80%, 81%, 82%, 83%, 84%, 85%, 86%, 87%, 88%, 89%, 90%, 91%, 92%, 93%, 94%, 95%, 96%, 97%, 98%, 99%, or more sequence identity to the reference sequence corresponding to residues 12 to 346 of an even-numbered SEQ ID NO. of SEQ ID NOs: 1436-1470, 1478-1766, and 1908-1946, or to the reference sequence corresponding to an even-numbered SEQ ID NO. of SEQ ID NOs: 1436-1470, 1478-1766, and 1908-1946, wherein the amino acid sequence comprises one or more substitutions relative to the reference sequence corresponding to residues 12 to 346 of SEQ ID NO: 1416, or relative to the reference sequence corresponding to SEQ ID NO: 1416.

[0443] In some embodiments, the recombinant polynucleotide comprises a polynucleotide sequence encoding an engineered RNA ligase comprising an amino acid sequence comprising at least a substitution or substitution set at amino acid position(s) 83/137/150, 137/213, 137, 150/190, 143/150, 104/150, 60/143/150/190, 60/150/190/213, 104/137/154, 123/137, 137/150/154/190, 123/143/150, 60/104/143/150/213, 60/95/143/190, 123/137/190, 60/123,104/123, or 60/123/143, wherein the amino acid positions are relative to the reference sequence corresponding to residues 12 to 346 of SEQ ID NO: 1416, or relative to the reference sequence corresponding to SEQ ID NO: 1416.

[0444] In some embodiments, the recombinant polynucleotide comprises a polynucleotide sequence encoding an engineered RNA ligase comprising an amino acid sequence comprising at least a substitution or substitution set at amino acid position(s) 38, 249, 255, 23, 33, 25, 226, 29, 37, 10, 250, 75, 230, 77, 251, 228, 81, 224, 64, 254, 268, 65, 232, 332, 331, 330, 101, 307, 137, 223, 280, 289, 288, 342, 93, 296, 86, 241, 126, 277, 87, 247, 243, 84, 83, 192, 105, 25/29, 25/29/250, 25/29/75/77/250/255, 25/75/230, 25/77/226/255, 25/230,250/255, 29/75/226/230/255, 29/75/77, 29/75/77/226, 29/75/77/230/255, 29/226, 29/226/230, 29/230/255, 33/228, 33/249, 33/37/228, 33/37/38/228, 33/37/38/228/249, 33/38, 75/250/255, 75/226, 75/226/250/255, 75/226/230/250/255, 75/77, 75/77/255, 75/77/250/255, 75/77/226/255, 75/77/226/250/255, 75/77/230, 75/77/230/250, 75/230, 75/230/255, 75/230/250, 226/255, 226/250, 226/230, 226/230/255, 37/228, 37/228/249, 37/38, 37/38/228, 37/38/228/249, 37/38/249, 38/249/291, 10/228, 10/228/249, 10/33/249, 10/33/37, 10/33/37/38/249, 10/33/38/249, 10/33/38, 10/33/249/251, 10/33/37/228, 10/33/37/249, 10/33/37/38/228/249, 10/33/37/38, 10/249, 10/37, 10/37/228, 10/37/228/249, 10/37/249, 10/37/38/228, 10/37/38/228/249, 10/37/38, 10/38/249, 10/38, 10/38/228, 77/255, 77/250, 77/250/255, 77/226, 77/226/255, 77/230, 77/230/255, 230/255, 230/250, 230/250/255, 23/25/226/255, 23/25/226/230, or 23/25/230, wherein the amino acid positions are relative to the reference sequence corresponding to residues 12 to 346 of SEQ ID NO: 1416, or relative to the reference sequence corresponding to SEQ ID NO: 1416.

[0445] In some embodiments, the recombinant polynucleotide comprises a polynucleotide sequence encoding an engineered RNA ligase comprising an amino acid sequence comprising at least a substitution or substitution set at amino acid position(s) 86, 255, 306, 250, 75, 318, 335, 241, 248, 344, 38, 272, 83, 257, 258, or 323, wherein the amino acid positions are relative to the reference sequence corresponding to residues 12 to 346 of SEQ ID NO: 1416, or relative to the reference sequence corresponding to SEQ ID NO: 1416.

[0446] In some embodiments, the recombinant polynucleotide comprises a polynucleotide sequence encoding an engineered RNA ligase comprising an amino acid sequence having at least 70%, 75%, 80%, 81%, 82%, 83%, 84%, 85%, 86%, 87%, 88%, 89%, 90%, 91%, 92%, 93%, 94%, 95%, 96%, 97%, 98%, 99%, or more sequence identity to the reference sequence corresponding to residues 12 to 346 of SEQ ID NO: 1612, or to the reference sequence corresponding to SEQ ID NO: 1612, wherein the amino acid sequence comprises one or more substitutions relative to the reference sequence corresponding to residues 12 to 346 of SEQ ID NO: 1612, or relative to the reference sequence corresponding to SEQ ID NO: 1612.

[0447] In some embodiments, the recombinant polynucleotide comprises a polynucleotide sequence encoding an engineered RNA ligase comprising an amino acid sequence having at least 70%, 75%, 80%, 81%, 82%, 83%, 84%, 85%, 86%, 87%, 88%, 89%, 90%, 91%, 92%, 93%, 94%, 95%, 96%, 97%, 98%, 99%, or more sequence identity to the reference sequence corresponding to residues 12 to 346 of an even-numbered SEQ ID NO. of SEQ ID NOs: 1768-1840, or to the reference sequence corresponding to an even-numbered SEQ ID NO. of SEQ ID NOs: 768-1840, wherein the amino acid sequence comprises one or more substitutions relative to the reference sequence corresponding to residues 12 to 346 of SEQ ID NO: 1612, or relative to the reference sequence corresponding to SEQ ID NO: 1612.

[0448] In some embodiments, the recombinant polynucleotide comprises a polynucleotide sequence encoding an engineered RNA ligase comprising an amino acid sequence comprising at least a substitution or substitution set at amino acid position(s) 101, 291, 291/307, 331, 33/75, 33/75/249/291/331, 33/38, 33/93/249, 38/75/291/307, 38/75/249/250, 38/75/93/271, 38/93, 10/75, 10/38/75, 10/38/75/291, 10/38/75/249, 10/38/75/93, 64/224,224, 23/101/307, 23/268, 23/37/64/224/254, 23/64/81, 23/224/268, 23/224/254, 23, 23/64/224, 64, 75/249/307, 93, 33/38/75/249, 75/249, 25/38/75/93/291, 33/38/75, 75, or 23/254, wherein the amino acid positions are relative to the reference sequence corresponding to residues 12 to 346 of SEQ ID NO: 1612, or relative to the reference sequence corresponding to SEQ ID NO: 1612.

[0449] In some embodiments, the recombinant polynucleotide comprises a polynucleotide sequence encoding an engineered RNA ligase comprising an amino acid sequence having at least 70%, 75%, 80%, 81%, 82%, 83%, 84%, 85%, 86%, 87%, 88%, 89%, 90%, 91%, 92%, 93%, 94%, 95%, 96%, 97%, 98%, 99%, or more sequence identity to the reference sequence corresponding to residues 12 to 346 of SEQ ID NO: 1840, or to the reference sequence corresponding to SEQ ID NO: 1840, wherein the amino acid sequence comprises one or more substitutions relative to the reference sequence corresponding to residues 12 to 346 of SEQ ID NO: 1840, or relative to the reference sequence corresponding to SEQ ID NO: 1840.

[0450] In some embodiments, the recombinant polynucleotide comprises a polynucleotide sequence encoding an engineered RNA ligase comprising an amino acid sequence having at least 70%, 75%, 80%, 81%, 82%, 83%, 84%, 85%, 86%, 87%, 88%, 89%, 90%, 91%, 92%, 93%, 94%, 95%, 96%, 97%, 98%, 99%, or more sequence identity to the reference sequence corresponding to residues 12 to 346 of an even-numbered SEQ ID NO. of SEQ ID NOs: 1842-1906, or to the reference sequence corresponding to an even-numbered SEQ ID NO. of SEQ ID NOs: 1842-1906, wherein the amino acid sequence comprises one or more substitutions relative to the reference sequence corresponding to residues 12 to 346 of SEQ ID NO: 1840, or relative to the reference sequence corresponding to SEQ ID NO: 1840.

[0451] In some embodiments, the recombinant polynucleotide comprises a polynucleotide sequence encoding an engineered RNA ligase comprising an amino acid sequence comprising at least a substitution or substitution set at amino acid position(s) 38/65/192, 38/65, 38/65/224, 38/64, 93/307, 38, 38/224, 38/192/224, 65, 192/224, 75/307, 75/250/268/307, 250/268/307/342, 224, 65/192,268, 64/192,250/268/291/342, 75/93/249/307/342, 250/291, 38/64/192, 38/64/224, 93/249/307, 38/64/86/192/241, 38/342,248/250/307, 75/77/250/268/307/342, 93/268,192, 38/192, or 64, wherein the amino acid positions are relative to the reference sequence corresponding to residues 12 to 346 of SEQ ID NO: 1840, or relative to the reference sequence corresponding to SEQ ID NO: 1840.

[0452] In some embodiments, the recombinant polynucleotide comprises a polynucleotide sequence encoding an engineered RNA ligase comprising an amino acid sequence having at least 70%, 75%, 80%, 81%, 82%, 83%, 84%, 85%, 86%, 87%, 88%, 89%, 90%, 91%, 92%, 93%, 94%, 95%, 96%, 97%, 98%, 99%, or more sequence identity to the reference sequence corresponding to residues 12 to 346 of SEQ ID NO: 1866, or to the reference sequence corresponding to SEQ ID NO: 1866, wherein the amino acid sequence comprises one or more substitutions relative to the reference sequence corresponding to residues 12 to 346 of SEQ ID NO: 1866, or relative to the reference sequence corresponding to SEQ ID NO: 1866.

[0453] In some embodiments, the recombinant polynucleotide comprises a polynucleotide sequence encoding an engineered RNA ligase comprising an amino acid sequence having at least 70%, 75%, 80%, 81%, 82%, 83%, 84%, 85%, 86%, 87%, 88%, 89%, 90%, 91%, 92%, 93%, 94%, 95%, 96%, 97%, 98%, 99%, or more sequence identity to the reference sequence corresponding to residues 12 to 346 of an even-numbered SEQ ID NO. of SEQ ID NOs: 1948-2038 and 2130-2620, or to the reference sequence corresponding to an even-numbered SEQ ID NO. of SEQ ID NOs: 1948-2038 and 2130-2620, wherein the amino acid sequence comprises one or more substitutions relative to the reference sequence corresponding to residues 12 to 346 of SEQ ID NO: 1866, or relative to the reference sequence corresponding to SEQ ID NO: 1866.

[0454] In some embodiments, the recombinant polynucleotide comprises a polynucleotide sequence encoding an engineered RNA ligase comprising an amino acid sequence comprising at least a substitution or substitution set at amino acid position(s) 38/248/251, 38/248/250/251/277, 248/250/251, 38/93/192/248/251, 38/192/248/251, 250/251, 38/248/250/251, 248/251/344, 192/248/250/251, 38/248/250, 38/93/250/251/277, 38/255/280/318, 248, 38/86/241/255/280/318/335, 38/255, 38, 318, 38/101/255/280, 38/318/335, 38/255/318, 192/250/251/344, 38/335,318/335, 38/277, 38/93/251, 192/251, 255, 38/64/318, 38/64/241/255/318, 251, 64/101/255/280/318, 38/101/255/280/318/335, 38/255/280, 38/251/277, 64/318, 38/64/255/318, 241/255/280/318, 38/86/101/241/318, 38/241, 38/255/318/335, 38/64/101/318, 38/64/255/280/318, 241/255/318, or 38/241/335, wherein the amino acid positions are relative to the reference sequence corresponding to residues 12 to 346 of SEQ ID NO: 1866, or relative to the reference sequence corresponding to SEQ ID NO: 1866.

[0455] In some embodiments, the recombinant polynucleotide comprises a polynucleotide sequence encoding an engineered RNA ligase comprising an amino acid sequence comprising at least a substitution or substitution set at amino acid position(s) 89, 122, 181, 28, 125, 157, 238, 330, 212, 143, 208, 290, 161, 214, 84, 270, 91, 295, 316, 286, 301, 170, 264, 289, 190, 183, 128, 60, 310, 131, 302, 267, 288, 185, 291, 129, 280, 298, 158/215, 28/122,276, 274, 271, 215, 294, 106, 58, 135, 45, 299, 315, 204, 332, 169, 305, 154, 158, 297, 95, 337, 324, 150, 179, 283, 206, 236, 266, 213, 336, 178, 99, 184, 282, 57, 177, 109, 191, 107, 160, 144, 56, 159, 341, 325, or 91, wherein the amino acid positions are relative to the reference sequence corresponding to residues 12 to 346 of SEQ ID NO: 1866, or relative to the reference sequence corresponding to SEQ ID NO: 1866.

[0456] In some embodiments, the recombinant polynucleotide comprises a polynucleotide sequence encoding an engineered RNA ligase comprising an amino acid sequence having at least 70%, 75%, 80%, 81%, 82%, 83%, 84%, 85%, 86%, 87%, 88%, 89%, 90%, 91%, 92%, 93%, 94%, 95%, 96%, 97%, 98%, 99%, or more sequence identity to the reference sequence corresponding to residues 12 to 346 of SEQ ID NO: 1954, or to the reference sequence corresponding to SEQ ID NO: 1954, wherein the amino acid sequence comprises one or more substitutions relative to the reference sequence corresponding to residues 12 to 346 of SEQ ID NO: 1954, or relative to the reference sequence corresponding to SEQ ID NO: 1954.

[0457] In some embodiments, the recombinant polynucleotide comprises a polynucleotide sequence encoding an engineered RNA ligase comprising an amino acid sequence having at least 70%, 75%, 80%, 81%, 82%, 83%, 84%, 85%, 86%, 87%, 88%, 89%, 90%, 91%, 92%, 93%, 94%, 95%, 96%, 97%, 98%, 99%, or more sequence identity to the reference sequence corresponding to residues 12 to 346 of an even-numbered SEQ ID NO. of SEQ ID NOs: 2040-2128, or to the reference sequence corresponding to an even-numbered SEQ ID NO. of SEQ ID NOs: 2040-2128, wherein the amino acid sequence comprises one or more substitutions relative to the reference sequence corresponding to residues 12 to 346 of SEQ ID NO: 1954, or relative to the reference sequence corresponding to SEQ ID NO: 1954.

[0458] In some embodiments, the recombinant polynucleotide comprises a polynucleotide sequence encoding an engineered RNA ligase comprising an amino acid sequence comprising at least a substitution or substitution set at amino acid position(s) 93/232/291/306, 93/232/280/306, 93/241/257/306/335, 232/280, 93/291/306, 93/257, 93/306, 93/280,192/318, 93/280/291, 93/241/291/306, 192, 257/291, 241/257/306, 280/335, 93/291/306/335, 93/335, 93/232/335, 64/318, 93/241, 93/232/241/280, 64/192/318/323, 232/280/306, 93/232,291/335, 257/258, 93/232/241/257/258/280/335, 318/323, 93/241/291/335, 83/86/323, 257/258/291, 101/224/318, 83/192/255/296, 171/232/257/258/280, 83/224/255/318, 64/192/250/318, 101/296, 232/241/280, 64/255/318, 86/250/255, 83/86/101, 83/86, 93/241/258/335, 250/296/323, or 257/258/280, wherein the amino acid positions are relative to the reference sequence corresponding to residues 12 to 346 of SEQ ID NO: 1954, or relative to the reference sequence corresponding to SEQ ID NO: 1954.

[0459] In some embodiments, the recombinant polynucleotide comprises a polynucleotide sequence encoding an engineered RNA ligase comprising an amino acid sequence having at least 70%, 75%, 80%, 81%, 82%, 83%, 84%, 85%, 86%, 87%, 88%, 89%, 90%, 91%, 92%, 93%, 94%, 95%, 96%, 97%, 98%, 99%, or more sequence identity to the reference sequence corresponding to residues 12 to 346 of SEQ ID NO: 2062, or to the reference sequence corresponding to SEQ ID NO: 2062, wherein the amino acid sequence comprises one or more substitutions relative to the reference sequence corresponding to residues 12 to 346 of SEQ ID NO: 2062, or relative to the reference sequence corresponding to SEQ ID NO: 2062.

[0460] In some embodiments, the recombinant polynucleotide comprises a polynucleotide sequence encoding an engineered RNA ligase comprising an amino acid sequence having at least 70%, 75%, 80%, 81%, 82%, 83%, 84%, 85%, 86%, 87%, 88%, 89%, 90%, 91%, 92%, 93%, 94%, 95%, 96%, 97%, 98%, 99%, or more sequence identity to the reference sequence corresponding to residues 12 to 346 of an even-numbered SEQ ID NO. of SEQ ID NOs: 2622-2746, or to the reference sequence corresponding to an even-numbered SEQ ID NO. of SEQ ID NOs: 2622-2746, wherein the amino acid sequence comprises one or more substitutions relative to the reference sequence corresponding to residues 12 to 346 of SEQ ID NO: 2062, or relative to the reference sequence corresponding to SEQ ID NO: 2062.

[0461] In some embodiments, the recombinant polynucleotide comprises a polynucleotide sequence encoding an engineered RNA ligase comprising an amino acid sequence comprising at least a substitution or substitution set at amino acid position(s) 83/84/330, 91/270/290, 83/181,161/290/330, 181/330, 161/270/330, 270/290, 83/84/270/318/330, 64/83/84/161/192/290/318, 91/161/290/318/330, 161/330, 161/214/270/290/330, 192/270/318, 91/161/192/330, 161/270, 181/270/330, 91/181/192/290, 161/290, 83/161/270, 83/192/318, 214/330, 83/161/290/330, 64/83/161/290/330, 83/161/192/214/318, 122/143/212/295, 161/192/270/290, 181/290, 91/161/214/270/290/318, 91/192/214/270, 214/290, 64/83/161/270/318/330, 91/161/181/330, 161/318/330, 91/270/290/330, 64/181/290/318, 181/270/290/318, 64/83/161/192/270/290/318/330, 64/83/161/214/290/318, 122/192/212, 64/83/91/192/214/330, 83/91/161/181/290/318, 91/161/192/214/270/290, 91/161/181/290/330, 83/91/125/161/270, 28/212,122/212, 28/64/83/122/143/192/212/295/318, 122/295, 91/161/192/318, 28/122/143/212, 64/161/290, 64/122/208/318, 64/83/192/290/318, 64/83/161/290, 181/192/318, 83/161/192/318, 214/270, 83/122, or 192/212, 28/122, wherein the amino acid positions are relative to the reference sequence corresponding to residues 12 to 346 of SEQ ID NO: 2062, or relative to the reference sequence corresponding to SEQ ID NO: 2062.

[0462] In some embodiments, the recombinant polynucleotide comprises a polynucleotide sequence encoding an engineered RNA ligase comprising an amino acid sequence having at least 70%, 75%, 80%, 81%, 82%, 83%, 84%, 85%, 86%, 87%, 88%, 89%, 90%, 91%, 92%, 93%, 94%, 95%, 96%, 97%, 98%, 99%, or more sequence identity to the reference sequence corresponding to residues 12 to 346 of SEQ ID NO: 2674, or to the reference sequence corresponding to SEQ ID NO: 2674, wherein the amino acid sequence comprises one or more substitutions relative to the reference sequence corresponding to residues 12 to 346 of SEQ ID NO: 2674, or relative to the reference sequence corresponding to SEQ ID NO: 2674.

[0463] In some embodiments, the recombinant polynucleotide comprises a polynucleotide sequence encoding an engineered RNA ligase comprising an amino acid sequence having at least 70%, 75%, 80%, 81%, 82%, 83%, 84%, 85%, 86%, 87%, 88%, 89%, 90%, 91%, 92%, 93%, 94%, 95%, 96%, 97%, 98%, 99%, or more sequence identity to the reference sequence corresponding to residues 12 to 346 of an even-numbered SEQ ID NO. of SEQ ID NOs: 2748-2782, 2822-2914, and 2916-3012, or to the reference sequence corresponding to an even-numbered SEQ ID NO. of SEQ ID NOs: 2748-2782, 2822-2914, and 2916-3012, wherein the amino acid sequence comprises one or more substitutions relative to the reference sequence corresponding to residues 12 to 346 of SEQ ID NO: 2674, or relative to the reference sequence corresponding to SEQ ID NO: 2674.

[0464] In some embodiments, the recombinant polynucleotide comprises a polynucleotide sequence encoding an engineered RNA ligase comprising an amino acid sequence comprising at least a substitution or substitution set at amino acid position(s) 28/291/295/298/315, 28/95/291/295/298/315, 143/295/298/315, 291/295/298, 28/143/295/298, 28/291/295/298, 143/185/291/295/298, 28/143/185/291/298/336, 28/298, 280/295, 143/298/336, 143/291/295/298, 291/295/298/315/336, 143/295/298, 28/143/295/298/336, 95/143/295/298, 143/280/290, or 143/291/298, wherein the amino acid positions are relative to the reference sequence corresponding to residues 12 to 346 of SEQ ID NO: 2674, or relative to the reference sequence corresponding to SEQ ID NO: 2674.

[0465] In some embodiments, the recombinant polynucleotide comprises a polynucleotide sequence encoding an engineered RNA ligase comprising an amino acid sequence comprising at least a substitution or substitution set at amino acid position(s) 208, 25, 90, 141, 258, 248, 318, 117, 299, 33, 80, 253, 83, 254, 256, 30, 327, 73, 100, 97, 119, 265, 296, 32, 156, 40, 105, 107, 41/114, 41, or 64, wherein the amino acid positions are relative to the reference sequence corresponding to residues 12 to 346 of SEQ ID NO: 2674, or relative to the reference sequence corresponding to SEQ ID NO: 2674.

[0466] In some embodiments, the recombinant polynucleotide comprises a polynucleotide sequence encoding an engineered RNA ligase comprising an amino acid sequence comprising at least a substitution or substitution set at amino acid position(s) 162, 208, 25, 103, 346, 42, 74, 113, 13, 228, 318, 121, 299, 33, 342, 253, 127, 254, 292, 30, 67, 86, 165, 173, 300, 317, 326, 11, 229, 97, 71, 17, 210, 241, 271, 40, 56, or 95, wherein the amino acid positions are relative to the reference sequence corresponding to residues 12 to 346 of SEQ ID NO: 2674, or relative to the reference sequence corresponding to SEQ ID NO: 2674.

[0467] In some embodiments, the recombinant polynucleotide comprises a polynucleotide sequence encoding an engineered RNA ligase comprising an amino acid sequence having at least 70%, 75%, 80%, 81%, 82%, 83%, 84%, 85%, 86%, 87%, 88%, 89%, 90%, 91%, 92%, 93%, 94%, 95%, 96%, 97%, 98%, 99%, or more sequence identity to the reference sequence corresponding to residues 12 to 346 of SEQ ID NO: 2754, or to the reference sequence corresponding to SEQ ID NO: 2754, wherein the amino acid sequence comprises one or more substitutions relative to the reference sequence corresponding to residues 12 to 346 of SEQ ID NO: 2754, or relative to the reference sequence corresponding to SEQ ID NO: 2754.

[0468] In some embodiments, the recombinant polynucleotide comprises a polynucleotide sequence encoding an engineered RNA ligase comprising an amino acid sequence having at least 70%, 75%, 80%, 81%, 82%, 83%, 84%, 85%, 86%, 87%, 88%, 89%, 90%, 91%, 92%, 93%, 94%, 95%, 96%, 97%, 98%, 99%, or more sequence identity to the reference sequence corresponding to residues 12 to 346 of an even-numbered SEQ ID NO. of SEQ ID NOs: 2784-2820, or to the reference sequence corresponding to an even-numbered SEQ ID NO. of SEQ ID NOs: 2784-2820, wherein the amino acid sequence comprises one or more substitutions relative to the reference sequence corresponding to residues 12 to 346 of SEQ ID NO: 2754, or relative to the reference sequence corresponding to SEQ ID NO: 2754.

[0469] In some embodiments, the recombinant polynucleotide comprises a polynucleotide sequence encoding an engineered RNA ligase comprising an amino acid sequence comprising at least a substitution or substitution set at amino acid position(s) 106/264/280, 280/330, 28/106/264/291, 28/264/280/330, 57/60/135/264/291, 28/135/264/280, 106/264/280/291, 28/106/264/280, 280/299, 28/57/89/106/264/280/291, 264, 185/291, 28/106/299, 28/214/264/299, 264/330, 28/89/214/291, 28/185/271/310, 122/271, or 89/106/135/264/280/330, wherein the amino acid positions are relative to the reference sequence corresponding to residues 12 to 346 of SEQ ID NO: 2754, or relative to the reference sequence corresponding to SEQ ID NO: 2754.

[0470] In some embodiments, the recombinant polynucleotide comprises a polynucleotide sequence encoding an engineered RNA ligase comprising an amino acid sequence having at least 70%, 75%, 80%, 81%, 82%, 83%, 84%, 85%, 86%, 87%, 88%, 89%, 90%, 91%, 92%, 93%, 94%, 95%, 96%, 97%, 98%, 99%, or more sequence identity to the reference sequence corresponding to residues 12 to 346 of SEQ ID NO: 2786, or to the reference sequence corresponding to SEQ ID NO: 2786, wherein the amino acid sequence comprises one or more substitutions relative to the reference sequence corresponding to residues 12 to 346 of SEQ ID NO: 2786, or relative to the reference sequence corresponding to SEQ ID NO: 2786.

[0471] In some embodiments, the recombinant polynucleotide comprises a polynucleotide sequence encoding an engineered RNA ligase comprising an amino acid sequence having at least 70%, 75%, 80%, 81%, 82%, 83%, 84%, 85%, 86%, 87%, 88%, 89%, 90%, 91%, 92%, 93%, 94%, 95%, 96%, 97%, 98%, 99%, or more sequence identity to the reference sequence corresponding to residues 12 to 346 of an even-numbered SEQ ID NO. of SEQ ID NOs: 3014-3058, or to the reference sequence corresponding to an even-numbered SEQ ID NO. of SEQ ID NOs: 3014-3058, wherein the amino acid sequence comprises one or more substitutions relative to the reference sequence corresponding to residues 12 to 346 of SEQ ID NO: 2786, or relative to the reference sequence corresponding to SEQ ID NO: 2786.

[0472] In some embodiments, the recombinant polynucleotide comprises a polynucleotide sequence encoding an engineered RNA ligase comprising an amino acid sequence comprising at least a substitution or substitution set at amino acid position(s) 25/228/248/264, 32/113/228/248, 25/32/113/241/248/264/299, 25/113/248/264/318, 25/127/228/264/299/318, 25/113/228/248/327, 228/241/264, 264/299/318/327, 25/113/241/248/264/318, 25/127/248/299/318, 113/127/228/264/299, 25/127, 25/228/248/264/327, 25/113/264/299, 32/113/264/318, 25/32/241/264/327, 113/264/327, 25/127/228/248/318, 327, 32/113/254/264, 25/228/241/264, 25/113/228/241/318, or 113/327, wherein the amino acid positions are relative to the reference sequence corresponding to residues 12 to 346 of SEQ ID NO: 2786, or relative to the reference sequence corresponding to SEQ ID NO: 2786.

[0473] In some embodiments, the recombinant polynucleotide comprises a polynucleotide sequence encoding an engineered RNA ligase comprising an amino acid sequence comprising a substitution at an amino acid position provided in Tables 6.1, 6.2, 7.1, 8.1, 8.2, 9.1, 10.1, 11.1, 12.1, 13.1, 14.1, 15.1, 16.1, 17.1, 18.1, 19.1, 20.1, 21.1, 22.1, 23.1, 24.1, 25.1, and 26.1, wherein the amino acid positions are relative to the reference sequence corresponding to residues 12 to 346 of SEQ ID NO: 54, 244, 648, 862, 956, 1088, 1416, 1612, 1840, 1866, 1954, 2062, 2674, 2754, or 2786, or relative to the reference sequence corresponding to SEQ ID NO: 54, 244, 648, 862, 956, 1088, 1416, 1612, 1840, 1866, 1954, 2062, 2674, 2754, or 2786.

[0474] In some embodiments, the recombinant polynucleotide comprises a polynucleotide sequence encoding an engineered RNA ligase comprising an amino acid sequence comprising at least one substitution provided in Tables 6.1, 6.2, 7.1, 8.1, 8.2, 9.1, 10.1, 11.1, 12.1, 13.1, 14.1, 15.1, 16.1, 17.1, 18.1, 19.1, 20.1, 21.1, 22.1, 23.1, 24.1, 25.1, and 26.1, wherein the amino acid positions are relative to the reference sequence corresponding to residues 12 to 346 of SEQ ID NO: 54, 244, 648, 862, 956, 1088, 1416, 1612, 1840, 1866, 1954, 2062, 2674, 2754, or 2786, or relative to the reference sequence corresponding to SEQ ID NO: 54, 244, 648, 862, 956, 1088, 1416, 1612, 1840, 1866, 1954, 2062, 2674, 2754, or 2786.

[0475] In some embodiments, the recombinant polynucleotide comprises a polynucleotide sequence encoding an engineered RNA ligase comprising at least a substitution or substitution set at amino acid position(s) provided in Tables 6.1, 6.2, 7.1, 8.1, 8.2, 9.1, 10.1, 11.1, 12.1, 13.1, 14.1, 15.1, 16.1, 17.1, 18.1, 19.1, 20.1, 21.1, 22.1, 23.1, 24.1, 25.1, and 26.1, wherein the amino acid positions are relative to the reference sequence corresponding to residues 12 to 346 of SEQ ID NO: 54, 244, 648, 862, 956, 1088, 1416, 1612, 1840, 1866, 1954, 2062, 2674, 2754, or 2786, or relative to the reference sequence corresponding to SEQ ID NO: 54, 244, 648, 862, 956, 1088, 1416, 1612, 1840, 1866, 1954, 2062, 2674, 2754, or 2786.

[0476] In some embodiments, the recombinant polynucleotide comprises a polynucleotide sequence encoding an engineered RNA ligase comprising at least a substitution or substitution set of an RNA ligase variant provided in Tables 6.1, 6.2, 7.1, 8.1, 8.2, 9.1, 10.1, 11.1, 12.1, 13.1, 14.1, 15.1, 16.1, 17.1, 18.1, 19.1, 20.1, 21.1, 22.1, 23.1, 24.1, 25.1, and 26.1, wherein the amino acid positions are relative to the reference sequence corresponding to residues 12 to 346 of SEQ ID NO: 54, 244, 648, 862, 956, 1088, 1416, 1612, 1840, 1866, 1954, 2062, 2674, 2754, or 2786, or relative to the reference sequence corresponding to SEQ ID NO: 54, 244, 648, 862, 956, 1088, 1416, 1612, 1840, 1866, 1954, 2062, 2674, 2754, or 2786.

[0477] In some embodiments, the recombinant polynucleotide comprises a polynucleotide sequence encoding an engineered RNA ligase comprising an amino acid sequence having least 70%, 75%, 80%, 81%, 82%, 83%, 84%, 85%, 86%, 87%, 88%, 89%, 90%, 91%, 92%, 93%, 94%, 95%, 96%, 97%, 98%, 99%, or more sequence identity to a reference sequence comprising a substitution or substitution set provided in Tables 6.1, 6.2, 7.1, 8.1, 8.2, 9.1, 10.1, 11.1, 12.1, 13.1, 14.1, 15.1, 16.1, 17.1, 18.1, 19.1, 20.1, 21.1, 22.1, 23.1, 24.1, 25.1, and 26.1, wherein the amino acid positions are relative to the reference sequence corresponding to residues 12 to 346 of SEQ ID NO: 54, 244, 648, 862, 956, 1088, 1416, 1612, 1840, 1866, 1954, 2062, 2674, 2754, or 2786, or relative to the reference sequence corresponding to SEQ ID NO: 54, 244, 648, 862, 956, 1088, 1416, 1612, 1840, 1866, 1954, 2062, 2674, 2754, or 2786.

[0478] In some embodiments, the recombinant polynucleotide comprises a polynucleotide sequence encoding an engineered RNA ligase comprising an amino acid sequence having least 70%, 75%, 80%, 81%, 82%, 83%, 84%, 85%, 86%, 87%, 88%, 89%, 90%, 91%, 92%, 93%, 94%, 95%, 96%, 97%, 98%, 99% or more sequence identity to the sequence comprising residues 12 to 346 of an engineered RNA ligase set forth in Tables 6.1, 6.2, 7.1, 8.1, 8.2, 9.1, 10.1, 11.1, 12.1, 13.1, 14.1, 15.1, 16.1, 17.1, 18.1, 19.1, 20.1, 21.1, 22.1, 23.1, 24.1, 25.1, and 26.1, or to the sequence of an engineered RNA ligase set forth in Tables 6.1, 6.2, 7.1, 8.1, 8.2, 9.1, 10.1, 11.1, 12.1, 13.1, 14.1, 15.1, 16.1, 17.1, 18.1, 19.1, 20.1, 21.1, 22.1, 23.1, 24.1, 25.1, and 26.1.

[0479] In some embodiments, the recombinant polynucleotide comprises a polynucleotide sequence encoding an engineered RNA ligase comprising residues 12 to 346 of an even numbered SEQ ID NO. of SEQ ID NOs: 4-1470 and 1478-3058, or an amino acid sequence comprising an even numbered SEQ ID NO. of SEQ ID NOs: 4-1470 and 1478-3058, optionally wherein the amino acid sequence has 1, 2, 3, 4, 5, 6, 7, 8, 9, or up to 10 substitutions.

[0480] In some embodiments, the recombinant polynucleotide comprises a polynucleotide sequence encoding an engineered RNA ligase comprising residues 12 to 346 of SEQ ID NO: 54, 244, 648, 862, 956, 1088, 1416, 1612, 1840, 1866, 1954, 2062, 2674, 2754, or 2786, or an amino acid sequence comprising SEQ ID NO: 54, 244, 648, 862, 956, 1088, 1416, 1612, 1840, 1866, 1954, 2062, 2674, 2754, or 2786, optionally wherein the amino acid sequence has 1, 2, 3, 4, 5, 6, 7, 8, 9, or up to 10 substitutions.

[0481] In some embodiments, the recombinant polynucleotide comprises a polynucleotide sequence having at least 70%, 75%, 80%, 81%, 82%, 83%, 84%, 85%, 90%, 91%, 92%, 93%, 94%, 95%, 96%, 97%, 98%, 99%, or more sequence identity to a reference polynucleotide sequence corresponding to nucleotide residues 34 to 1038 of an odd numbered SEQ ID NO. of SEQ ID NOs: 3-1469 and 1477-3057, or to a reference polynucleotide sequence corresponding an odd numbered SEQ ID NO. of SEQ ID NOs: 3-1469 and 1477-3057, wherein the recombinant polynucleotide encodes an RNA ligase.

[0482] In some embodiments, the recombinant polynucleotide comprises a polynucleotide sequence having at least 70%, 75%, 75%, 80%, 81%, 82%, 83%, 84%, 85%, 90%, 91%, 92%, 93%, 94%, 95%, 96%, 97%, 98%, 99%, or more sequence identity to a reference polynucleotide sequence corresponding to nucleotide residues 34 to 1038 of SEQ ID NO: 53, 243, 647, 861, 955, 1087, 1415, 1611, 1839, 1865, 1953, 2061, 2673, 2753, or 2785, or to a reference polynucleotide sequence corresponding to SEQ ID NO: 53, 243, 647, 861, 955, 1087, 1415, 1611, 1839, 1865, 1953, 2061, 2673, 2753, or 2785, wherein the recombinant polynucleotide encodes an RNA ligase.

[0483] In some embodiments, the recombinant polynucleotide comprises a polynucleotide sequence having at least 70%, 75%, 80%, 81%, 82%, 83%, 84%, 85%, 86%, 87%, 88%, 89%, 90%, 91%, 92%, 93%, 94%, 95%, 96%, 97%, 98%, 99%, or more sequence identity to the reference sequence corresponding to nucleotide residues 34 to 1038 of SEQ ID NO: 3, 5, 7, 9, 11, 13, 15, 17, 19, 21, 23, 25, 27, 29, 31, 33, 35, 37, 39, 41, 43, 45, 47, 49, 51, 53, 55, 57, 59, 61, 63, 65, 67, 69, 71, 73, 75, 77, 79, 81, 83, 85, 87, 89, 91, 93, 95, 97, 99, 101, 103, 105, 107, 109, 111, 113, 115, 117, 119, 121, 123, 125, 127, 129, 131, 133, 135, 137, 139, 141, 143, 145, 147, 149, 151, 153, 155, 157, 159, 161, 163, 165, 167, 169, 171, 173, 175, 177, 179, 181, 183, 185, 187, 189, 191, 193, 195, 197, 199, 201, 203, 205, 207, 209, 211, 213, 215, 217, 219, 221, 223, 225, 227, 229, 231, 233, 235, 237, 239, 241, 243, 245, 247, 249, 251, 253, 255, 257, 259, 261, 263, 265, 267, 269, 271, 273, 275, 277, 279, 281, 283, 285, 287, 289, 291, 293, 295, 297, 299, 301, 303, 305, 307, 309, 311, 313, 315, 317, 319, 321, 323, 325, 327, 329, 331, 333, 335, 337, 339, 341, 343, 345, 347, 349, 351, 353, 355, 357, 359, 361, 363, 365, 367, 369, 371, 373, 375, 377, 379, 381, 383, 385, 387, 389, 391, 393, 395, 397, 399, 401, 403, 405, 407, 409, 411, 413, 415, 417, 419, 421, 423, 425, 427, 429, 431, 433, 435, 437, 439, 441, 443, 445, 447, 449, 451, 453, 455, 457, 459, 461, 463, 465, 467, 469, 471, 473, 475, 477, 479, 481, 483, 485, 487, 489, 491, 493, 495, 497, 499, 501, 503, 505, 507, 509, 511, 513, 515, 517, 519, 521, 523, 525, 527, 529, 531, 533, 535, 537, 539, 541, 543, 545, 547, 549, 551, 553, 555, 557, 559, 561, 563, 565, 567, 569, 571, 573, 575, 577, 579, 581, 583, 585, 587, 589, 591, 593, 595, 597, 599, 601, 603, 605, 607, 609, 611, 613, 615, 617, 619, 621, 623, 625, 627, 629, 631, 633, 635, 637, 639, 641, 643, 645, 647, 649, 651, 653, 655, 657, 659, 661, 663, 665, 667, 669, 671, 673, 675, 677, 679, 681, 683, 685, 687, 689, 691, 693, 695, 697, 699, 701, 703, 705, 707, 709, 711, 713, 715, 717, 719, 721, 723, 725, 727, 729, 731, 733, 735, 737, 739, 741, 743, 745, 747, 749, 751, 753, 755, 757, 759, 761, 763, 765, 767, 769, 771, 773, 775, 777, 779, 781, 783, 785, 787, 789, 791, 793, 795, 797, 799, 801, 803, 805, 807, 809, 811, 813, 815, 817, 819, 821, 823, 825, 827, 829, 831, 833, 835, 837, 839, 841, 843, 845, 847, 849, 851, 853, 855, 857, 859, 861, 863, 865, 867, 869, 871, 873, 875, 877, 879, 881, 883, 885, 887, 889, 891, 893, 895, 897, 899, 901, 903, 905, 907, 909, 911, 913, 915, 917, 919, 921, 923, 925, 927, 929, 931, 933, 935, 937, 939, 941, 943, 945, 947, 949, 951, 953, 955, 957, 959, 961, 963, 965, 967, 969, 971, 973, 975, 977, 979, 981, 983, 985, 987, 989, 991, 993, 995, 997, 999, 1001, 1003, 1005, 1007, 1009, 1011, 1013, 1015, 1017, 1019, 1021, 1023, 1025, 1027, 1029, 1031, 1033, 1035, 1037, 1039, 1041, 1043, 1045, 1047, 1049, 1051, 1053, 1055, 1057, 1059, 1061, 1063, 1065, 1067, 1069, 1071, 1073, 1075, 1077, 1079, 1081, 1083, 1085, 1087, 1089, 1091, 1093, 1095, 1097, 1099, 1101, 1103, 1105, 1107, 1109, 1111, 1113, 1115, 1117, 1119, 1121, 1123, 1125, 1127, 1129, 1131, 1133, 1135, 1137, 1139, 1141, 1143, 1145, 1147, 1149, 1151, 1153, 1155, 1157, 1159, 1161, 1163, 1165, 1167, 1169, 1171, 1173, 1175, 1177, 1179, 1181, 1183, 1185, 1187, 1189, 1191, 1193, 1195, 1197, 1199, 1201, 1203, 1205, 1207, 1209, 1211, 1213, 1215, 1217, 1219, 1221, 1223, 1225, 1227, 1229, 1231, 1233, 1235, 1237, 1239, 1241, 1243, 1245, 1247, 1249, 1251, 1253, 1255, 1257, 1259, 1261, 1263, 1265, 1267, 1269, 1271, 1273, 1275, 1277, 1279, 1281, 1283, 1285, 1287, 1289, 1291, 1293, 1295, 1297, 1299, 1301, 1303, 1305, 1307, 1309, 1311, 1313, 1315, 1317, 1319, 1321, 1323, 1325, 1327, 1329, 1331, 1333, 1335, 1337, 1339, 1341, 1343, 1345, 1347, 1349, 1351, 1353, 1355, 1357, 1359, 1361, 1363, 1365, 1367, 1369, 1371, 1373, 1375, 1377, 1379, 1381, 1383, 1385, 1387, 1389, 1391, 1393, 1395, 1397, 1399, 1401, 1403, 1405, 1407, 1409, 1411, 1413, 1415, 1417, 1419, 1421, 1423, 1425, 1427, 1429, 1431, 1433, 1435, 1437, 1439, 1441, 1443, 1445, 1447, 1449, 1451, 1453, 1455, 1457, 1459, 1461, 1463, 1465, 1467, 1469, 1477, 1479, 1481, 1483, 1485, 1487, 1489, 1491, 1493, 1495, 1497, 1499, 1501, 1503, 1505, 1507, 1509, 1511, 1513, 1515, 1517, 1519, 1521, 1523, 1525, 1527, 1529, 1531, 1533, 1535, 1537, 1539, 1541, 1543, 1545, 1547, 1549, 1551, 1553, 1555, 1557, 1559, 1561, 1563, 1565, 1567, 1569, 1571, 1573, 1575, 1577, 1579, 1581, 1583, 1585, 1587, 1589, 1591, 1593, 1595, 1597, 1599, 1601, 1603, 1605, 1607, 1609, 1611, 1613, 1615, 1617, 1619, 1621, 1623, 1625, 1627, 1629, 1631, 1633, 1635, 1637, 1639, 1641, 1643, 1645, 1647, 1649, 1651, 1653, 1655, 1657, 1659, 1661, 1663, 1665, 1667, 1669, 1671, 1673, 1675, 1677, 1679, 1681, 1683, 1685, 1687, 1689, 1691, 1693, 1695, 1697, 1699, 1701, 1703, 1705, 1707, 1709, 1711, 1713, 1715, 1717, 1719, 1721, 1723, 1725, 1727, 1729, 1731, 1733, 1735, 1737, 1739, 1741, 1743, 1745, 1747, 1749, 1751, 1753, 1755, 1757, 1759, 1761, 1763, 1765, 1767, 1769, 1771, 1773, 1775, 1777, 1779, 1781, 1783, 1785, 1787, 1789, 1791, 1793, 1795, 1797, 1799, 1801, 1803, 1805. 1807, 1809, 1811, 1812, 1813, 1815, 1817, 1819, 1821, 1823, 1825, 1827, 1829, 1831, 1833, 1835, 1837, 1839, 1841, 1843, 1845, 1847, 1849, 1851, 1853, 1855, 1857, 1859, 1861, 1863, 1865, 1867, 1869, 1871, 1873, 1875, 1877, 1879, 1881, 1883, 1885, 1887, 1889, 1891, 1893, 1895, 1897, 1899, 1901, 1903, 1905, 1907, 1909, 1911, 1913, 1915, 1917, 1919, 1921, 1923, 1925, 1927, 1929, 1931, 1933, 1935, 1937, 1939, 1941, 1943, 1945, 1947, 1949, 1951, 1953, 1955, 1957, 1959, 1961, 1963, 1965, 1967, 1969, 1971, 1973, 1975, 1977, 1979, 1981, 1983, 1985, 1987, 1989, 1991, 1993, 1995, 1997, 1999, 2001, 2003, 2005, 2007, 2009, 2011, 2013, 2015, 2017, 2019, 2021, 2023, 2025, 2027, 2029, 2031,2033, 2035, 2037, 2039, 2041, 2043, 2045, 2047, 2049, 2051, 2053, 2055, 2057, 2059, 2061, 2063, 2065, 2067, 2069, 2071, 2073, 2075, 2077, 2079, 2081, 2083, 2085, 2087, 2089, 2091, 2093, 2095, 2097, 2099, 2101, 2103, 2105, 2107, 2109, 2111, 2113, 2115, 2117, 2119, 2121, 2123, 2125, 2127, 2129, 2131, 2133, 2135, 2137, 2139, 2141, 2143, 2145, 2147, 2149, 2151, 2153, 2155, 2157, 2159, 2161, 2163, 2165, 2167, 2169, 2171, 2173, 2175, 2177, 2179, 2181, 2183, 2185, 2187, 2189, 2191, 2193, 2195, 2197, 2199, 2201, 2203, 2205, 2207, 2209, 2211, 2213, 2215, 2217, 2219, 2221, 2223, 2225, 2227, 2229, 2231, 2233, 2235, 2237, 2239, 2241, 2243, 2245, 2247, 2249, 2251, 2253, 2255, 2257, 2259, 2261, 2263, 2265, 2267, 2269, 2271, 2273, 2275, 2277, 2279, 2281, 2283, 2285, 2287, 2289, 2291, 2293, 2295, 2297, 2299, 2301, 2303, 2305, 2307, 2309, 2311, 2313, 2315, 2317, 2319, 2321, 2323, 2325, 2327, 2329, 2331, 2333, 2335, 2337, 2339, 2341, 2343, 2345, 2347, 2349, 2351, 2353, 2355, 2357, 2359, 2361, 2363, 2365, 2367, 2369, 2371, 2373, 2375, 2377, 2379, 2381, 2383, 2385, 2387, 2389, 2391, 2393, 2395, 2397, 2399, 2401, 2403, 2405, 2407, 2409, 2411, 2413, 2415, 2417, 2419, 2421, 2423, 2425, 2427, 2429, 2431, 2433, 2435, 2437, 2439, 2441, 2443, 2445, 2447, 2449, 2451, 2453, 2455, 2457, 2459, 2461, 2463, 2465, 2467, 2469, 2471, 2473, 2475, 2477, 2479, 2481, 2483, 2485, 2487, 2489, 2491, 2493, 2495, 2497, 2499, 2501, 2503, 2505, 2507, 2509, 2511, 2513, 2515, 2517, 2519, 2521, 2523, 2525, 2527, 2529, 2531, 2533, 2535, 2537, 2539, 2541, 2543, 2545, 2547, 2549, 2551, 2553, 2555, 2557, 2559, 2561, 2563, 2565, 2567, 2569, 2571, 2573, 2575, 2577, 2579, 2581, 2583, 2585, 2587, 2589, 2591, 2593, 2595, 2597, 2599, 2601, 2603, 2605, 2607, 2609, 2611, 2613, 2615, 2617, 2619, 2621, 2623, 2625, 2627, 2629, 2631, 2633, 2635, 2637, 2639, 2641, 2643, 2645, 2647, 2649, 2651, 2653, 2655, 2657, 2659, 2661, 2663, 2665, 2667, 2669, 2671, 2673, 2675, 2677, 2679, 2681, 2683, 2685, 2687, 2689, 2691, 2693, 2695, 2697, 2699, 2701, 2703, 2705, 2707, 2709, 2711, 2713, 2715, 2717, 2719, 2721, 2723, 2725, 2727, 2729, 2731, 2733, 2735, 2737, 2739, 2741, 2743, 2745, 2747, 2749, 2751, 2753, 2755, 2757, 2759, 2761, 2763, 2765, 2767, 2769, 2771, 2773, 2775, 2777, 2779, 2781, 2783, 2785, 2787, 2789, 2791, 2793, 2795, 2797, 2799, 2801, 2803, 2805, 2807, 2809, 2811, 2813, 2815, 2817, 2819, 2821, 2823, 2825, 2827, 2829, 2831, 2833, 2835, 2837, 2839, 2841, 2843, 2845, 2847, 2849, 2851, 2853, 2855, 2857, 2859, 2861, 2863, 2867, 2869, 2871, 2873, 2875, 2877, 2879, 2881, 2883, 2885, 2887, 2889, 2891, 2893, 2895, 2897, 2899, 2901, 2903, 2905, 2907, 2909, 2911, 2913, 2915, 2917, 2919, 2921, 2923, 2925, 2927, 2929, 2931, 2933, 2935, 2937, 2939, 2941, 2943, 2945, 2947, 2949, 2951, 2953, 2955, 2957, 2959, 2961, 2963, 2965, 2967, 2969, 2971, 2973, 2975, 2977, 2979, 2981, 2983, 2985, 2987, 2989, 2991, 2993, 2995, 2997, 2999, 3001, 3003, 3005, 3007, 3009, 3011, 3013, 3015, 3017, 3019, 3021, 3023, 3025, 3027, 3029, 3031, 3033, 3035, 3037, 3039, 3041, 3043, 3045, 3047, 3049, 3051, 3053, 3055, or 3057, wherein the recombinant polynucleotide encodes an RNA ligase.

[0484] In some embodiments, the recombinant polynucleotide comprises a polynucleotide sequence having at least 70%, 75%, 80%, 81%, 82%, 83%, 84%, 85%, 86%, 87%, 88%, 89%, 90%, 91%, 92%, 93%, 94%, 95%, 96%, 97%, 98%, 99% or more sequence identity to the reference sequence corresponding to SEQ ID NO: 3, 5, 7, 9, 11, 13, 15, 17, 19, 21, 23, 25, 27, 29, 31, 33, 35, 37, 39, 41, 43, 45, 47, 49, 51, 53, 55, 57, 59, 61, 63, 65, 67, 69, 71, 73, 75, 77, 79, 81, 83, 85, 87, 89, 91, 93, 95, 97, 99, 101, 103, 105, 107, 109, 111, 113, 115, 117, 119, 121, 123, 125, 127, 129, 131, 133, 135, 137, 139, 141, 143, 145, 147, 149, 151, 153, 155, 157, 159, 161, 163, 165, 167, 169, 171, 173, 175, 177, 179, 181, 183, 185, 187, 189, 191, 193, 195, 197, 199, 201, 203, 205, 207, 209, 211, 213, 215, 217, 219, 221, 223, 225, 227, 229, 231, 233, 235, 237, 239, 241, 243, 245, 247, 249, 251, 253, 255, 257, 259, 261, 263, 265, 267, 269, 271, 273, 275, 277, 279, 281, 283, 285, 287, 289, 291, 293, 295, 297, 299, 301, 303, 305, 307, 309, 311, 313, 315, 317, 319, 321, 323, 325, 327, 329, 331, 333, 335, 337, 339, 341, 343, 345, 347, 349, 351, 353, 355, 357, 359, 361, 363, 365, 367, 369, 371, 373, 375, 377, 379, 381, 383, 385, 387, 389, 391, 393, 395, 397, 399, 401, 403, 405, 407, 409, 411, 413, 415, 417, 419, 421, 423, 425, 427, 429, 431, 433, 435, 437, 439, 441, 443, 445, 447, 449, 451, 453, 455, 457, 459, 461, 463, 465, 467, 469, 471, 473, 475, 477, 479, 481, 483, 485, 487, 489, 491, 493, 495, 497, 499, 501, 503, 505, 507, 509, 511, 513, 515, 517, 519, 521, 523, 525, 527, 529, 531, 533, 535, 537, 539, 541, 543, 545, 547, 549, 551, 553, 555, 557, 559, 561, 563, 565, 567, 569, 571, 573, 575, 577, 579, 581, 583, 585, 587, 589, 591, 593, 595, 597, 599, 601, 603, 605, 607, 609, 611, 613, 615, 617, 619, 621, 623, 625, 627, 629, 631, 633, 635, 637, 639, 641, 643, 645, 647, 649, 651, 653, 655, 657, 659, 661, 663, 665, 667, 669, 671, 673, 675, 677, 679, 681, 683, 685, 687, 689, 691, 693, 695, 697, 699, 701, 703, 705, 707, 709, 711, 713, 715, 717, 719, 721, 723, 725, 727, 729, 731, 733, 735, 737, 739, 741, 743, 745, 747, 749, 751, 753, 755, 757, 759, 761, 763, 765, 767, 769, 771, 773, 775, 777, 779, 781, 783, 785, 787, 789, 791, 793, 795, 797, 799, 801, 803, 805, 807, 809, 811, 813, 815, 817, 819, 821, 823, 825, 827, 829, 831, 833, 835, 837, 839, 841, 843, 845, 847, 849, 851, 853, 855, 857, 859, 861, 863, 865, 867, 869, 871, 873, 875, 877, 879, 881, 883, 885, 887, 889, 891, 893, 895, 897, 899, 901, 903, 905, 907, 909, 911, 913, 915, 917, 919, 921, 923, 925, 927, 929, 931, 933, 935, 937, 939, 941, 943, 945, 947, 949, 951, 953, 955, 957, 959, 961, 963, 965, 967, 969, 971, 973, 975, 977, 979, 981, 983, 985, 987, 989, 991, 993, 995, 997, 999, 1001, 1003, 1005, 1007, 1009, 1011, 1013, 1015, 1017, 1019, 1021, 1023, 1025, 1027, 1029, 1031, 1033, 1035, 1037, 1039, 1041, 1043, 1045, 1047, 1049, 1051, 1053, 1055, 1057, 1059, 1061, 1063, 1065, 1067, 1069, 1071, 1073, 1075, 1077, 1079, 1081, 1083, 1085, 1087, 1089, 1091, 1093, 1095, 1097, 1099, 1101, 1103, 1105, 1107, 1109, 1111, 1113, 1115, 1117, 1119, 1121, 1123, 1125, 1127, 1129, 1131, 1133, 1135, 1137, 1139, 1141, 1143, 1145, 1147, 1149, 1151, 1153, 1155, 1157, 1159, 1161, 1163, 1165, 1167, 1169, 1171, 1173, 1175, 1177, 1179, 1181, 1183, 1185, 1187, 1189, 1191, 1193, 1195, 1197, 1199, 1201, 1203, 1205, 1207, 1209, 1211, 1213, 1215, 1217, 1219, 1221, 1223, 1225, 1227, 1229, 1231, 1233, 1235, 1237, 1239, 1241, 1243, 1245, 1247, 1249, 1251, 1253, 1255, 1257, 1259, 1261, 1263, 1265, 1267, 1269, 1271, 1273, 1275, 1277, 1279, 1281, 1283, 1285, 1287, 1289, 1291, 1293, 1295, 1297, 1299, 1301, 1303, 1305, 1307, 1309, 1311, 1313, 1315, 1317, 1319, 1321, 1323, 1325, 1327, 1329, 1331, 1333, 1335, 1337, 1339, 1341, 1343, 1345, 1347, 1349, 1351, 1353, 1355, 1357, 1359, 1361, 1363, 1365, 1367, 1369, 1371, 1373, 1375, 1377, 1379, 1381, 1383, 1385, 1387, 1389, 1391, 1393, 1395, 1397, 1399, 1401, 1403, 1405, 1407, 1409, 1411, 1413, 1415, 1417, 1419, 1421, 1423, 1425, 1427, 1429, 1431, 1433, 1435, 1437, 1439, 1441, 1443, 1445, 1447, 1449, 1451, 1453, 1455, 1457, 1459, 1461, 1463, 1465, 1467, 1469, 1477, 1479, 1481, 1483, 1485, 1487, 1489, 1491, 1493, 1495, 1497, 1499, 1501, 1503, 1505, 1507, 1509, 1511, 1513, 1515, 1517, 1519, 1521, 1523, 1525, 1527, 1529, 1531, 1533, 1535, 1537, 1539, 1541, 1543, 1545, 1547, 1549, 1551, 1553, 1555, 1557, 1559, 1561, 1563, 1565, 1567, 1569, 1571, 1573, 1575, 1577, 1579, 1581, 1583, 1585, 1587, 1589, 1591, 1593, 1595, 1597, 1599, 1601, 1603, 1605, 1607, 1609, 1611, 1613, 1615, 1617, 1619, 1621, 1623, 1625, 1627, 1629, 1631, 1633, 1635, 1637, 1639, 1641, 1643, 1645, 1647, 1649, 1651, 1653, 1655, 1657, 1659, 1661, 1663, 1665, 1667, 1669, 1671, 1673, 1675, 1677, 1679, 1681, 1683, 1685, 1687, 1689, 1691, 1693, 1695, 1697, 1699, 1701, 1703, 1705, 1707, 1709, 1711, 1713, 1715, 1717, 1719, 1721, 1723, 1725, 1727, 1729, 1731, 1733, 1735, 1737, 1739, 1741, 1743, 1745, 1747, 1749, 1751, 1753, 1755, 1757, 1759, 1761, 1763, 1765, 1767, 1769, 1771, 1773, 1775, 1777, 1779, 1781, 1783, 1785, 1787, 1789, 1791, 1793, 1795, 1797, 1799, 1801, 1803, 1805. 1807, 1809, 1811, 1812, 1813, 1815, 1817, 1819, 1821, 1823, 1825, 1827, 1829, 1831, 1833, 1835, 1837, 1839, 1841, 1843, 1845, 1847, 1849, 1851, 1853, 1855, 1857, 1859, 1861, 1863, 1865, 1867, 1869, 1871, 1873, 1875, 1877, 1879, 1881, 1883, 1885, 1887, 1889, 1891, 1893, 1895, 1897, 1899, 1901, 1903, 1905, 1907, 1909, 1911, 1913, 1915, 1917, 1919, 1921, 1923, 1925, 1927, 1929, 1931, 1933, 1935, 1937, 1939, 1941, 1943, 1945, 1947, 1949, 1951, 1953, 1955, 1957, 1959, 1961, 1963, 1965, 1967, 1969, 1971, 1973, 1975, 1977, 1979, 1981, 1983, 1985, 1987, 1989, 1991, 1993, 1995, 1997, 1999, 2001, 2003, 2005, 2007, 2009, 2011, 2013, 2015, 2017, 2019, 2021, 2023, 2025, 2027, 2029, 2031,2033, 2035, 2037, 2039, 2041, 2043, 2045, 2047, 2049, 2051, 2053, 2055, 2057, 2059, 2061, 2063, 2065, 2067, 2069, 2071, 2073, 2075, 2077, 2079, 2081, 2083, 2085, 2087, 2089, 2091, 2093, 2095, 2097, 2099, 2101, 2103, 2105, 2107, 2109, 2111, 2113, 2115, 2117, 2119, 2121, 2123, 2125, 2127, 2129, 2131, 2133, 2135, 2137, 2139, 2141, 2143, 2145, 2147, 2149, 2151, 2153, 2155, 2157, 2159, 2161, 2163, 2165, 2167, 2169, 2171, 2173, 2175, 2177, 2179, 2181, 2183, 2185, 2187, 2189, 2191, 2193, 2195, 2197, 2199, 2201, 2203, 2205, 2207, 2209, 2211, 2213, 2215, 2217, 2219, 2221, 2223, 2225, 2227, 2229, 2231, 2233, 2235, 2237, 2239, 2241, 2243, 2245, 2247, 2249, 2251, 2253, 2255, 2257, 2259, 2261, 2263, 2265, 2267, 2269, 2271, 2273, 2275, 2277, 2279, 2281, 2283, 2285, 2287, 2289, 2291, 2293, 2295, 2297, 2299, 2301, 2303, 2305, 2307, 2309, 2311, 2313, 2315, 2317, 2319, 2321, 2323, 2325, 2327, 2329, 2331, 2333, 2335, 2337, 2339, 2341, 2343, 2345, 2347, 2349, 2351, 2353, 2355, 2357, 2359, 2361, 2363, 2365, 2367, 2369, 2371, 2373, 2375, 2377, 2379, 2381, 2383, 2385, 2387, 2389, 2391, 2393, 2395, 2397, 2399, 2401, 2403, 2405, 2407, 2409, 2411, 2413, 2415, 2417, 2419, 2421, 2423, 2425, 2427, 2429, 2431, 2433, 2435, 2437, 2439, 2441, 2443, 2445, 2447, 2449, 2451, 2453, 2455, 2457, 2459, 2461, 2463, 2465, 2467, 2469, 2471, 2473, 2475, 2477, 2479, 2481, 2483, 2485, 2487, 2489, 2491, 2493, 2495, 2497, 2499, 2501, 2503, 2505, 2507, 2509, 2511, 2513, 2515, 2517, 2519, 2521, 2523, 2525, 2527, 2529, 2531, 2533, 2535, 2537, 2539, 2541, 2543, 2545, 2547, 2549, 2551, 2553, 2555, 2557, 2559, 2561, 2563, 2565, 2567, 2569, 2571, 2573, 2575, 2577, 2579, 2581, 2583, 2585, 2587, 2589, 2591, 2593, 2595, 2597, 2599, 2601, 2603, 2605, 2607, 2609, 2611, 2613, 2615, 2617, 2619, 2621, 2623, 2625, 2627, 2629, 2631, 2633, 2635, 2637, 2639, 2641, 2643, 2645, 2647, 2649, 2651, 2653, 2655, 2657, 2659, 2661, 2663, 2665, 2667, 2669, 2671, 2673, 2675, 2677, 2679, 2681, 2683, 2685, 2687, 2689, 2691, 2693, 2695, 2697, 2699, 2701, 2703, 2705, 2707, 2709, 2711, 2713, 2715, 2717, 2719, 2721, 2723, 2725, 2727, 2729, 2731, 2733, 2735, 2737, 2739, 2741, 2743, 2745, 2747, 2749, 2751, 2753, 2755, 2757, 2759, 2761, 2763, 2765, 2767, 2769, 2771, 2773, 2775, 2777, 2779, 2781, 2783, 2785, 2787, 2789, 2791, 2793, 2795, 2797, 2799, 2801, 2803, 2805, 2807, 2809, 2811, 2813, 2815, 2817, 2819, 2821, 2823, 2825, 2827, 2829, 2831, 2833, 2835, 2837, 2839, 2841, 2843, 2845, 2847, 2849, 2851, 2853, 2855, 2857, 2859, 2861, 2863, 2867, 2869, 2871, 2873, 2875, 2877, 2879, 2881, 2883, 2885, 2887, 2889, 2891, 2893, 2895, 2897, 2899, 2901, 2903, 2905, 2907, 2909, 2911, 2913, 2915, 2917, 2919, 2921, 2923, 2925, 2927, 2929, 2931, 2933, 2935, 2937, 2939, 2941, 2943, 2945, 2947, 2949, 2951, 2953, 2955, 2957, 2959, 2961, 2963, 2965, 2967, 2969, 2971, 2973, 2975, 2977, 2979, 2981, 2983, 2985, 2987, 2989, 2991, 2993, 2995, 2997, 2999, 3001, 3003, 3005, 3007, 3009, 3011, 3013, 3015, 3017, 3019, 3021, 3023, 3025, 3027, 3029, 3031, 3033, 3035, 3037, 3039, 3041, 3043, 3045, 3047, 3049, 3051, 3053, 3055, or 3057, wherein the recombinant polynucleotide encodes an RNA ligase.

[0485] In some embodiments, the recombinant polynucleotide comprises a polynucleotide sequence comprising nucleotide residues 34 to 1038 of an odd numbered SEQ ID NO. of SEQ ID NOs: 3-1469, or a polynucleotide sequence comprising an odd numbered SEQ ID NO. of SEQ ID NOs: 3-1469.

[0486] In some embodiments, the recombinant polynucleotide comprises a polynucleotide sequence comprising nucleotide residues 34 to 1038 of SEQ ID NO: 3, 5, 7, 9, 11, 13, 15, 17, 19, 21, 23, 25, 27, 29, 31, 33, 35, 37, 39, 41, 43, 45, 47, 49, 51, 53, 55, 57, 59, 61, 63, 65, 67, 69, 71, 73, 75, 77, 79, 81, 83, 85, 87, 89, 91, 93, 95, 97, 99, 101, 103, 105, 107, 109, 111, 113, 115, 117, 119, 121, 123, 125, 127, 129, 131, 133, 135, 137, 139, 141, 143, 145, 147, 149, 151, 153, 155, 157, 159, 161, 163, 165, 167, 169, 171, 173, 175, 177, 179, 181, 183, 185, 187, 189, 191, 193, 195, 197, 199, 201, 203, 205, 207, 209, 211, 213, 215, 217, 219, 221, 223, 225, 227, 229, 231, 233, 235, 237, 239, 241, 243, 245, 247, 249, 251, 253, 255, 257, 259, 261, 263, 265, 267, 269, 271, 273, 275, 277, 279, 281, 283, 285, 287, 289, 291, 293, 295, 297, 299, 301, 303, 305, 307, 309, 311, 313, 315, 317, 319, 321, 323, 325, 327, 329, 331, 333, 335, 337, 339, 341, 343, 345, 347, 349, 351, 353, 355, 357, 359, 361, 363, 365, 367, 369, 371, 373, 375, 377, 379, 381, 383, 385, 387, 389, 391, 393, 395, 397, 399, 401, 403, 405, 407, 409, 411, 413, 415, 417, 419, 421, 423, 425, 427, 429, 431, 433, 435, 437, 439, 441, 443, 445, 447, 449, 451, 453, 455, 457, 459, 461, 463, 465, 467, 469, 471, 473, 475, 477, 479, 481, 483, 485, 487, 489, 491, 493, 495, 497, 499, 501, 503, 505, 507, 509, 511, 513, 515, 517, 519, 521, 523, 525, 527, 529, 531, 533, 535, 537, 539, 541, 543, 545, 547, 549, 551, 553, 555, 557, 559, 561, 563, 565, 567, 569, 571, 573, 575, 577, 579, 581, 583, 585, 587, 589, 591, 593, 595, 597, 599, 601, 603, 605, 607, 609, 611, 613, 615, 617, 619, 621, 623, 625, 627, 629, 631, 633, 635, 637, 639, 641, 643, 645, 647, 649, 651, 653, 655, 657, 659, 661, 663, 665, 667, 669, 671, 673, 675, 677, 679, 681, 683, 685, 687, 689, 691, 693, 695, 697, 699, 701, 703, 705, 707, 709, 711, 713, 715, 717, 719, 721, 723, 725, 727, 729, 731, 733, 735, 737, 739, 741, 743, 745, 747, 749, 751, 753, 755, 757, 759, 761, 763, 765, 767, 769, 771, 773, 775, 777, 779, 781, 783, 785, 787, 789, 791, 793, 795, 797, 799, 801, 803, 805, 807, 809, 811, 813, 815, 817, 819, 821, 823, 825, 827, 829, 831, 833, 835, 837, 839, 841, 843, 845, 847, 849, 851, 853, 855, 857, 859, 861, 863, 865, 867, 869, 871, 873, 875, 877, 879, 881, 883, 885, 887, 889, 891, 893, 895, 897, 899, 901, 903, 905, 907, 909, 911, 913, 915, 917, 919, 921, 923, 925, 927, 929, 931, 933, 935, 937, 939, 941, 943, 945, 947, 949, 951, 953, 955, 957, 959, 961, 963, 965, 967, 969, 971, 973, 975, 977, 979, 981, 983, 985, 987, 989, 991, 993, 995, 997, 999, 1001, 1003, 1005, 1007, 1009, 1011, 1013, 1015, 1017, 1019, 1021, 1023, 1025, 1027, 1029, 1031, 1033, 1035, 1037, 1039, 1041, 1043, 1045, 1047, 1049, 1051, 1053, 1055, 1057, 1059, 1061, 1063, 1065, 1067, 1069, 1071, 1073, 1075, 1077, 1079, 1081, 1083, 1085, 1087, 1089, 1091, 1093, 1095, 1097, 1099, 1101, 1103, 1105, 1107, 1109, 1111, 1113, 1115, 1117, 1119, 1121, 1123, 1125, 1127, 1129, 1131, 1133, 1135, 1137, 1139, 1141, 1143, 1145, 1147, 1149, 1151, 1153, 1155, 1157, 1159, 1161, 1163, 1165, 1167, 1169, 1171, 1173, 1175, 1177, 1179, 1181, 1183, 1185, 1187, 1189, 1191, 1193, 1195, 1197, 1199, 1201, 1203, 1205, 1207, 1209, 1211, 1213, 1215, 1217, 1219, 1221, 1223, 1225, 1227, 1229, 1231, 1233, 1235, 1237, 1239, 1241, 1243, 1245, 1247, 1249, 1251, 1253, 1255, 1257, 1259, 1261, 1263, 1265, 1267, 1269, 1271, 1273, 1275, 1277, 1279, 1281, 1283, 1285, 1287, 1289, 1291, 1293, 1295, 1297, 1299, 1301, 1303, 1305, 1307, 1309, 1311, 1313, 1315, 1317, 1319, 1321, 1323, 1325, 1327, 1329, 1331, 1333, 1335, 1337, 1339, 1341, 1343, 1345, 1347, 1349, 1351, 1353, 1355, 1357, 1359, 1361, 1363, 1365, 1367, 1369, 1371, 1373, 1375, 1377, 1379, 1381, 1383, 1385, 1387, 1389, 1391, 1393, 1395, 1397, 1399, 1401, 1403, 1405, 1407, 1409, 1411, 1413, 1415, 1417, 1419, 1421, 1423, 1425, 1427, 1429, 1431, 1433, 1435, 1437, 1439, 1441, 1443, 1445, 1447, 1449, 1451, 1453, 1455, 1457, 1459, 1461, 1463, 1465, 1467, 1469, 1477, 1479, 1481, 1483, 1485, 1487, 1489, 1491, 1493, 1495, 1497, 1499, 1501, 1503, 1505, 1507, 1509, 1511, 1513, 1515, 1517, 1519, 1521, 1523, 1525, 1527, 1529, 1531, 1533, 1535, 1537, 1539, 1541, 1543, 1545, 1547, 1549, 1551, 1553, 1555, 1557, 1559, 1561, 1563, 1565, 1567, 1569, 1571, 1573, 1575, 1577, 1579, 1581, 1583, 1585, 1587, 1589, 1591, 1593, 1595, 1597, 1599, 1601, 1603, 1605, 1607, 1609, 1611, 1613, 1615, 1617, 1619, 1621, 1623, 1625, 1627, 1629, 1631, 1633, 1635, 1637, 1639, 1641, 1643, 1645, 1647, 1649, 1651, 1653, 1655, 1657, 1659, 1661, 1663, 1665, 1667, 1669, 1671, 1673, 1675, 1677, 1679, 1681, 1683, 1685, 1687, 1689, 1691, 1693, 1695, 1697, 1699, 1701, 1703, 1705, 1707, 1709, 1711, 1713, 1715, 1717, 1719, 1721, 1723, 1725, 1727, 1729, 1731, 1733, 1735, 1737, 1739, 1741, 1743, 1745, 1747, 1749, 1751, 1753, 1755, 1757, 1759, 1761, 1763, 1765, 1767, 1769, 1771, 1773, 1775, 1777, 1779, 1781, 1783, 1785, 1787, 1789, 1791, 1793, 1795, 1797, 1799, 1801, 1803, 1805. 1807, 1809, 1811, 1812, 1813, 1815, 1817, 1819, 1821, 1823, 1825, 1827, 1829, 1831, 1833, 1835, 1837, 1839, 1841, 1843, 1845, 1847, 1849, 1851, 1853, 1855, 1857, 1859, 1861, 1863, 1865, 1867, 1869, 1871, 1873, 1875, 1877, 1879, 1881, 1883, 1885, 1887, 1889, 1891, 1893, 1895, 1897, 1899, 1901, 1903, 1905, 1907, 1909, 1911, 1913, 1915, 1917, 1919, 1921, 1923, 1925, 1927, 1929, 1931, 1933, 1935, 1937, 1939, 1941, 1943, 1945, 1947, 1949, 1951, 1953, 1955, 1957, 1959, 1961, 1963, 1965, 1967, 1969, 1971, 1973, 1975, 1977, 1979, 1981, 1983, 1985, 1987, 1989, 1991, 1993, 1995, 1997, 1999, 2001, 2003, 2005, 2007, 2009, 2011, 2013, 2015, 2017, 2019, 2021, 2023, 2025, 2027, 2029, 2031,2033, 2035, 2037, 2039, 2041, 2043, 2045, 2047, 2049, 2051, 2053, 2055, 2057, 2059, 2061, 2063, 2065, 2067, 2069, 2071, 2073, 2075, 2077, 2079, 2081, 2083, 2085, 2087, 2089, 2091, 2093, 2095, 2097, 2099, 2101, 2103, 2105, 2107, 2109, 2111, 2113, 2115, 2117, 2119, 2121, 2123, 2125, 2127, 2129, 2131, 2133, 2135, 2137, 2139, 2141, 2143, 2145, 2147, 2149, 2151, 2153, 2155, 2157, 2159, 2161, 2163, 2165, 2167, 2169, 2171, 2173, 2175, 2177, 2179, 2181, 2183, 2185, 2187, 2189, 2191, 2193, 2195, 2197, 2199, 2201, 2203, 2205, 2207, 2209, 2211, 2213, 2215, 2217, 2219, 2221, 2223, 2225, 2227, 2229, 2231, 2233, 2235, 2237, 2239, 2241, 2243, 2245, 2247, 2249, 2251, 2253, 2255, 2257, 2259, 2261, 2263, 2265, 2267, 2269, 2271, 2273, 2275, 2277, 2279, 2281, 2283, 2285, 2287, 2289, 2291, 2293, 2295, 2297, 2299, 2301, 2303, 2305, 2307, 2309, 2311, 2313, 2315, 2317, 2319, 2321, 2323, 2325, 2327, 2329, 2331, 2333, 2335, 2337, 2339, 2341, 2343, 2345, 2347, 2349, 2351, 2353, 2355, 2357, 2359, 2361, 2363, 2365, 2367, 2369, 2371, 2373, 2375, 2377, 2379, 2381, 2383, 2385, 2387, 2389, 2391, 2393, 2395, 2397, 2399, 2401, 2403, 2405, 2407, 2409, 2411, 2413, 2415, 2417, 2419, 2421, 2423, 2425, 2427, 2429, 2431, 2433, 2435, 2437, 2439, 2441, 2443, 2445, 2447, 2449, 2451, 2453, 2455, 2457, 2459, 2461, 2463, 2465, 2467, 2469, 2471, 2473, 2475, 2477, 2479, 2481, 2483, 2485, 2487, 2489, 2491, 2493, 2495, 2497, 2499, 2501, 2503, 2505, 2507, 2509, 2511, 2513, 2515, 2517, 2519, 2521, 2523, 2525, 2527, 2529, 2531, 2533, 2535, 2537, 2539, 2541, 2543, 2545, 2547, 2549, 2551, 2553, 2555, 2557, 2559, 2561, 2563, 2565, 2567, 2569, 2571, 2573, 2575, 2577, 2579, 2581, 2583, 2585, 2587, 2589, 2591, 2593, 2595, 2597, 2599, 2601, 2603, 2605, 2607, 2609, 2611, 2613, 2615, 2617, 2619, 2621, 2623, 2625, 2627, 2629, 2631, 2633, 2635, 2637, 2639, 2641, 2643, 2645, 2647, 2649, 2651, 2653, 2655, 2657, 2659, 2661, 2663, 2665, 2667, 2669, 2671, 2673, 2675, 2677, 2679, 2681, 2683, 2685, 2687, 2689, 2691, 2693, 2695, 2697, 2699, 2701, 2703, 2705, 2707, 2709, 2711, 2713, 2715, 2717, 2719, 2721, 2723, 2725, 2727, 2729, 2731, 2733, 2735, 2737, 2739, 2741, 2743, 2745, 2747, 2749, 2751, 2753, 2755, 2757, 2759, 2761, 2763, 2765, 2767, 2769, 2771, 2773, 2775, 2777, 2779, 2781, 2783, 2785, 2787, 2789, 2791, 2793, 2795, 2797, 2799, 2801, 2803, 2805, 2807, 2809, 2811, 2813, 2815, 2817, 2819, 2821, 2823, 2825, 2827, 2829, 2831, 2833, 2835, 2837, 2839, 2841, 2843, 2845, 2847, 2849, 2851, 2853, 2855, 2857, 2859, 2861, 2863, 2867, 2869, 2871, 2873, 2875, 2877, 2879, 2881, 2883, 2885, 2887, 2889, 2891, 2893, 2895, 2897, 2899, 2901, 2903, 2905, 2907, 2909, 2911, 2913, 2915, 2917, 2919, 2921, 2923, 2925, 2927, 2929, 2931, 2933, 2935, 2937, 2939, 2941, 2943, 2945, 2947, 2949, 2951, 2953, 2955, 2957, 2959, 2961, 2963, 2965, 2967, 2969, 2971, 2973, 2975, 2977, 2979, 2981, 2983, 2985, 2987, 2989, 2991, 2993, 2995, 2997, 2999, 3001, 3003, 3005, 3007, 3009, 3011, 3013, 3015, 3017, 3019, 3021, 3023, 3025, 3027, 3029, 3031, 3033, 3035, 3037, 3039, 3041, 3043, 3045, 3047, 3049, 3051, 3053, 3055, or 3057.

[0487] In some embodiments, the recombinant polynucleotide comprises a polynucleotide sequence comprising SEQ ID NO: 3, 5, 7, 9, 11, 13, 15, 17, 19, 21, 23, 25, 27, 29, 31, 33, 35, 37, 39, 41, 43, 45, 47, 49, 51, 53, 55, 57, 59, 61, 63, 65, 67, 69, 71, 73, 75, 77, 79, 81, 83, 85, 87, 89, 91, 93, 95, 97, 99, 101, 103, 105, 107, 109, 111, 113, 115, 117, 119, 121, 123, 125, 127, 129, 131, 133, 135, 137, 139, 141, 143, 145, 147, 149, 151, 153, 155, 157, 159, 161, 163, 165, 167, 169, 171, 173, 175, 177, 179, 181, 183, 185, 187, 189, 191, 193, 195, 197, 199, 201, 203, 205, 207, 209, 211, 213, 215, 217, 219, 221, 223, 225, 227, 229, 231, 233, 235, 237, 239, 241, 243, 245, 247, 249, 251, 253, 255, 257, 259, 261, 263, 265, 267, 269, 271, 273, 275, 277, 279, 281, 283, 285, 287, 289, 291, 293, 295, 297, 299, 301, 303, 305, 307, 309, 311, 313, 315, 317, 319, 321, 323, 325, 327, 329, 331, 333, 335, 337, 339, 341, 343, 345, 347, 349, 351, 353, 355, 357, 359, 361, 363, 365, 367, 369, 371, 373, 375, 377, 379, 381, 383, 385, 387, 389, 391, 393, 395, 397, 399, 401, 403, 405, 407, 409, 411, 413, 415, 417, 419, 421, 423, 425, 427, 429, 431, 433, 435, 437, 439, 441, 443, 445, 447, 449, 451, 453, 455, 457, 459, 461, 463, 465, 467, 469, 471, 473, 475, 477, 479, 481, 483, 485, 487, 489, 491, 493, 495, 497, 499, 501, 503, 505, 507, 509, 511, 513, 515, 517, 519, 521, 523, 525, 527, 529, 531, 533, 535, 537, 539, 541, 543, 545, 547, 549, 551, 553, 555, 557, 559, 561, 563, 565, 567, 569, 571, 573, 575, 577, 579, 581, 583, 585, 587, 589, 591, 593, 595, 597, 599, 601, 603, 605, 607, 609, 611, 613, 615, 617, 619, 621, 623, 625, 627, 629, 631, 633, 635, 637, 639, 641, 643, 645, 647, 649, 651, 653, 655, 657, 659, 661, 663, 665, 667, 669, 671, 673, 675, 677, 679, 681, 683, 685, 687, 689, 691, 693, 695, 697, 699, 701, 703, 705, 707, 709, 711, 713, 715, 717, 719, 721, 723, 725, 727, 729, 731, 733, 735, 737, 739, 741, 743, 745, 747, 749, 751, 753, 755, 757, 759, 761, 763, 765, 767, 769, 771, 773, 775, 777, 779, 781, 783, 785, 787, 789, 791, 793, 795, 797, 799, 801, 803, 805, 807, 809, 811, 813, 815, 817, 819, 821, 823, 825, 827, 829, 831, 833, 835, 837, 839, 841, 843, 845, 847, 849, 851, 853, 855, 857, 859, 861, 863, 865, 867, 869, 871, 873, 875, 877, 879, 881, 883, 885, 887, 889, 891, 893, 895, 897, 899, 901, 903, 905, 907, 909, 911, 913, 915, 917, 919, 921, 923, 925, 927, 929, 931, 933, 935, 937, 939, 941, 943, 945, 947, 949, 951, 953, 955, 957, 959, 961, 963, 965, 967, 969, 971, 973, 975, 977, 979, 981, 983, 985, 987, 989, 991, 993, 995, 997, 999, 1001, 1003, 1005, 1007, 1009, 1011, 1013, 1015, 1017, 1019, 1021, 1023, 1025, 1027, 1029, 1031, 1033, 1035, 1037, 1039, 1041, 1043, 1045, 1047, 1049, 1051, 1053, 1055, 1057, 1059, 1061, 1063, 1065, 1067, 1069, 1071, 1073, 1075, 1077, 1079, 1081, 1083, 1085, 1087, 1089, 1091, 1093, 1095, 1097, 1099, 1101, 1103, 1105, 1107, 1109, 1111, 1113, 1115, 1117, 1119, 1121, 1123, 1125, 1127, 1129, 1131, 1133, 1135, 1137, 1139, 1141, 1143, 1145, 1147, 1149, 1151, 1153, 1155, 1157, 1159, 1161, 1163, 1165, 1167, 1169, 1171, 1173, 1175, 1177, 1179, 1181, 1183, 1185, 1187, 1189, 1191, 1193, 1195, 1197, 1199, 1201, 1203, 1205, 1207, 1209, 1211, 1213, 1215, 1217, 1219, 1221, 1223, 1225, 1227, 1229, 1231, 1233, 1235, 1237, 1239, 1241, 1243, 1245, 1247, 1249, 1251, 1253, 1255, 1257, 1259, 1261, 1263, 1265, 1267, 1269, 1271, 1273, 1275, 1277, 1279, 1281, 1283, 1285, 1287, 1289, 1291, 1293, 1295, 1297, 1299, 1301, 1303, 1305, 1307, 1309, 1311, 1313, 1315, 1317, 1319, 1321, 1323, 1325, 1327, 1329, 1331, 1333, 1335, 1337, 1339, 1341, 1343, 1345, 1347, 1349, 1351, 1353, 1355, 1357, 1359, 1361, 1363, 1365, 1367, 1369, 1371, 1373, 1375, 1377, 1379, 1381, 1383, 1385, 1387, 1389, 1391, 1393, 1395, 1397, 1399, 1401, 1403, 1405, 1407, 1409, 1411, 1413, 1415, 1417, 1419, 1421, 1423, 1425, 1427, 1429, 1431, 1433, 1435, 1437, 1439, 1441, 1443, 1445, 1447, 1449, 1451, 1453, 1455, 1457, 1459, 1461, 1463, 1465, 1467, 1469, 1477, 1479, 1481, 1483, 1485, 1487, 1489, 1491, 1493, 1495, 1497, 1499, 1501, 1503, 1505, 1507, 1509, 1511, 1513, 1515, 1517, 1519, 1521, 1523, 1525, 1527, 1529, 1531, 1533, 1535, 1537, 1539, 1541, 1543, 1545, 1547, 1549, 1551, 1553, 1555, 1557, 1559, 1561, 1563, 1565, 1567, 1569, 1571, 1573, 1575, 1577, 1579, 1581, 1583, 1585, 1587, 1589, 1591, 1593, 1595, 1597, 1599, 1601, 1603, 1605, 1607, 1609, 1611, 1613, 1615, 1617, 1619, 1621, 1623, 1625, 1627, 1629, 1631, 1633, 1635, 1637, 1639, 1641, 1643, 1645, 1647, 1649, 1651, 1653, 1655, 1657, 1659, 1661, 1663, 1665, 1667, 1669, 1671, 1673, 1675, 1677, 1679, 1681, 1683, 1685, 1687, 1689, 1691, 1693, 1695, 1697, 1699, 1701, 1703, 1705, 1707, 1709, 1711, 1713, 1715, 1717, 1719, 1721, 1723, 1725, 1727, 1729, 1731, 1733, 1735, 1737, 1739, 1741, 1743, 1745, 1747, 1749, 1751, 1753, 1755, 1757, 1759, 1761, 1763, 1765, 1767, 1769, 1771, 1773, 1775, 1777, 1779, 1781, 1783, 1785, 1787, 1789, 1791, 1793, 1795, 1797, 1799, 1801, 1803, 1805. 1807, 1809, 1811, 1812, 1813, 1815, 1817, 1819, 1821, 1823, 1825, 1827, 1829, 1831, 1833, 1835, 1837, 1839, 1841, 1843, 1845, 1847, 1849, 1851, 1853, 1855, 1857, 1859, 1861, 1863, 1865, 1867, 1869, 1871, 1873, 1875, 1877, 1879, 1881, 1883, 1885, 1887, 1889, 1891, 1893, 1895, 1897, 1899, 1901, 1903, 1905, 1907, 1909, 1911, 1913, 1915, 1917, 1919, 1921, 1923, 1925, 1927, 1929, 1931, 1933, 1935, 1937, 1939, 1941, 1943, 1945, 1947, 1949, 1951, 1953, 1955, 1957, 1959, 1961, 1963, 1965, 1967, 1969, 1971, 1973, 1975, 1977, 1979, 1981, 1983, 1985, 1987, 1989, 1991, 1993, 1995, 1997, 1999, 2001, 2003, 2005, 2007, 2009, 2011, 2013, 2015, 2017, 2019, 2021, 2023, 2025, 2027, 2029, 2031,2033, 2035, 2037, 2039, 2041, 2043, 2045, 2047, 2049, 2051, 2053, 2055, 2057, 2059, 2061, 2063, 2065, 2067, 2069, 2071, 2073, 2075, 2077, 2079, 2081, 2083, 2085, 2087, 2089, 2091, 2093, 2095, 2097, 2099, 2101, 2103, 2105, 2107, 2109, 2111, 2113, 2115, 2117, 2119, 2121, 2123, 2125, 2127, 2129, 2131, 2133, 2135, 2137, 2139, 2141, 2143, 2145, 2147, 2149, 2151, 2153, 2155, 2157, 2159, 2161, 2163, 2165, 2167, 2169, 2171, 2173, 2175, 2177, 2179, 2181, 2183, 2185, 2187, 2189, 2191, 2193, 2195, 2197, 2199, 2201, 2203, 2205, 2207, 2209, 2211, 2213, 2215, 2217, 2219, 2221, 2223, 2225, 2227, 2229, 2231, 2233, 2235, 2237, 2239, 2241, 2243, 2245, 2247, 2249, 2251, 2253, 2255, 2257, 2259, 2261, 2263, 2265, 2267, 2269, 2271, 2273, 2275, 2277, 2279, 2281, 2283, 2285, 2287, 2289, 2291, 2293, 2295, 2297, 2299, 2301, 2303, 2305, 2307, 2309, 2311, 2313, 2315, 2317, 2319, 2321, 2323, 2325, 2327, 2329, 2331, 2333, 2335, 2337, 2339, 2341, 2343, 2345, 2347, 2349, 2351, 2353, 2355, 2357, 2359, 2361, 2363, 2365, 2367, 2369, 2371, 2373, 2375, 2377, 2379, 2381, 2383, 2385, 2387, 2389, 2391, 2393, 2395, 2397, 2399, 2401, 2403, 2405, 2407, 2409, 2411, 2413, 2415, 2417, 2419, 2421, 2423, 2425, 2427, 2429, 2431, 2433, 2435, 2437, 2439, 2441, 2443, 2445, 2447, 2449, 2451, 2453, 2455, 2457, 2459, 2461, 2463, 2465, 2467, 2469, 2471, 2473, 2475, 2477, 2479, 2481, 2483, 2485, 2487, 2489, 2491, 2493, 2495, 2497, 2499, 2501, 2503, 2505, 2507, 2509, 2511, 2513, 2515, 2517, 2519, 2521, 2523, 2525, 2527, 2529, 2531, 2533, 2535, 2537, 2539, 2541, 2543, 2545, 2547, 2549, 2551, 2553, 2555, 2557, 2559, 2561, 2563, 2565, 2567, 2569, 2571, 2573, 2575, 2577, 2579, 2581, 2583, 2585, 2587, 2589, 2591, 2593, 2595, 2597, 2599, 2601, 2603, 2605, 2607, 2609, 2611, 2613, 2615, 2617, 2619, 2621, 2623, 2625, 2627, 2629, 2631, 2633, 2635, 2637, 2639, 2641, 2643, 2645, 2647, 2649, 2651, 2653, 2655, 2657, 2659, 2661, 2663, 2665, 2667, 2669, 2671, 2673, 2675, 2677, 2679, 2681, 2683, 2685, 2687, 2689, 2691, 2693, 2695, 2697, 2699, 2701, 2703, 2705, 2707, 2709, 2711, 2713, 2715, 2717, 2719, 2721, 2723, 2725, 2727, 2729, 2731, 2733, 2735, 2737, 2739, 2741, 2743, 2745, 2747, 2749, 2751, 2753, 2755, 2757, 2759, 2761, 2763, 2765, 2767, 2769, 2771, 2773, 2775, 2777, 2779, 2781, 2783, 2785, 2787, 2789, 2791, 2793, 2795, 2797, 2799, 2801, 2803, 2805, 2807, 2809, 2811, 2813, 2815, 2817, 2819, 2821, 2823, 2825, 2827, 2829, 2831, 2833, 2835, 2837, 2839, 2841, 2843, 2845, 2847, 2849, 2851, 2853, 2855, 2857, 2859, 2861, 2863, 2867, 2869, 2871, 2873, 2875, 2877, 2879, 2881, 2883, 2885, 2887, 2889, 2891, 2893, 2895, 2897, 2899, 2901, 2903, 2905, 2907, 2909, 2911, 2913, 2915, 2917, 2919, 2921, 2923, 2925, 2927, 2929, 2931, 2933, 2935, 2937, 2939, 2941, 2943, 2945, 2947, 2949, 2951, 2953, 2955, 2957, 2959, 2961, 2963, 2965, 2967, 2969, 2971, 2973, 2975, 2977, 2979, 2981, 2983, 2985, 2987, 2989, 2991, 2993, 2995, 2997, 2999, 3001, 3003, 3005, 3007, 3009, 3011, 3013, 3015, 3017, 3019, 3021, 3023, 3025, 3027, 3029, 3031, 3033, 3035, 3037, 3039, 3041, 3043, 3045, 3047, 3049, 3051, 3053, 3055, or 3057.

[0488] In some embodiments, the recombinant polynucleotide comprises a polynucleotide sequence encoding an engineered RNA ligase comprising an amino acid sequence comprising
[0489] (a) one or more amino acid differences in the N-terminal domain at amino acid positions 12, 13, 15, 17, 18, 21, 23, 25, 26, 28, 29, 30, 32, 33, 37, 38, 39, 40, 41, 42, 45, 52, 54, 56, 57, 58, 60, 61, 62, 64, 65, 67, 71, 73, 74, 75, 77, 80, 81, 83, 84, 86, 87, 89, 90, 91, 93, 95, 97, 99, 100, 101, 102, 103, 104, 105, 106, 107, 109, 113, 114, 116, 117, 119, 121, 122, 123, 125, 126, 127, 128, 129, 131, 135, 137, 140, 141, 143, 144, 148, 150, 154, 156, 157, 158, 159, 160, 161, 162, 165, 169, 170, 171, 173, 175, 177, 178, 179, 181, 183, 184, 185, 190, 191, 192, 193, 194, 197, 198, 204, 206, 208, 210, 212, 213, 214, 215, 218, 223, 224, 226, 228, 229, 230, 232, 236, 238, 241, and 243, or at equivalent positions thereof;
[0490] (b) one or more amino acid differences in the C-terminal domain at amino acid positions 256, 257, 258, 260, 261, 264, 265, 266, 267, 268, 270, 271, 272, 274, 276, 277, 280, 282, 283, 286, 288, 289, 290, 291, 292, 294, 295, 296, 297, 298, 299, 300, 301, 302, 305, 306, 307, 310, 311, 315, 316, 317, 318, 323, 324, 325, 326, 327, 330, 331, 332, 334, 335, 336, 337, 338, 341, 342, 344, 345, and 346, or at equivalent positions thereof; and/or
[0491] (c) one or more amino acid differences in the linker region connecting the N-terminal and C-terminal domains at one or more amino acid positions 247, 248, 249, 250, 251, 252, 253, 254, and 255, or at equivalent positions thereof,
[0492] wherein the amino acid positions are relative to the reference sequence corresponding to residues 12-346 of SEQ ID NO: 3060.

[0493] In some embodiments, the recombinant polynucleotide comprises a polynucleotide sequence encoding an engineered RNA ligase comprising an amino acid sequence comprising
[0494] (a) in the N-terminal domain one or more amino acid residues 12A/F/L/M/P/R/T/V, 13W, 15M, 17P, 18A/H, 21S, 23K/T, 25A/D/F/G/L/M/S/T, 26L, 28A/L/M/V, 29D/S, 30A/L/T/V/W, 32E, 33A/I/L/T/V, 37A/F/K/L/M/R, 38A/E/L/R/S/T/V, 39P, 40D/I/P/S, 41E/I, 42T, 45S, 52C, 54L, 56I/L, 57V, 58M, 60A/C/D/R/S/V, 61A, 62A/V, 64A/Q/W, 65C, 67R, 71T, 73Q/W, 74D, 75A/D, 77M, 80E, 81Y, 83A/E/G/L/T/V,84V, 86D/G/L, 87E, 89C/D/E/G/L/M/N/Q/R/S/T/V/W/Y,90E/F,91A/E/V, 93K/V, 95A/C/G/I, 97A/E, 991, 100A/G/H/L/R/S/T/V, 101P/V/W, 102T, 103G/V, 104T, 105K/L/R, 106G/L/M/Q/R/V/W, 107M/S, 109F/L, 113L/M, 114E, 116L, 117A/Q, 119L, 121N, 122C/F/G/L/Q/T/W, 123K/R, 125K/T, 126M, 127P, 128E, 129L/W, 131T, 135A/H/M/Q/V, 137N/R, 140I, 141D/G, 143A/C/E/F/H/M/S/T/V, 144L, 148F, 150D/L, 154S/V, 156G/H/Q/S, 157F/L/Q/V, 158R/S, 159F, 160R, 161M/V, 162C, 165M, 169G/N, 170H/Y, 171S, 173M, 175A, 177K, 178V, 179E, 181E/N/P/R/S, 183L/V, 184L, 185C/F/G/K/M/P/S/T/V, 190I/M, 191C, 192D/E/F/L/N, 193K/Q, 194A/G/V, 197W, 198M, 204W, 206L, 208H/I/K/L/P/T, 210G/V, 212E/G/I/K/L, 213D/N/R/T, 214A/C/H/K/L/Q/Y, 215G/T, 218F, 223C, 224A/Q/R, 226R, 228D/L, 229W, 230T/V, 232G/M/N/R/S, 236L/V, 238K/S/V, 241E/G/Q/R, and 243H, or at equivalent positions thereof;
[0495] (b) in the C-terminal domain one or more amino acid residues 256A/E/G/M/S/W, 257D/E/G, 258D/M/P/V, 260G, 261D/P/T, 264A/E/G/S/V, 265A/F, 266C/I/L, 267I/M, 268F/G/M, 270L/M/V, 271A/E/G/T, 272M/S, 274A, 276A/G/M/V, 277A, 280L/N/W, 282A/M, 283C/V, 286D/E/F/M/V, 288E/L/R/W, 289A/D/E/I/P/T, 290D/H/N/P, 291H/L/Q/R/S/T/W, 292N/S, 294A/S/V/Y, 295C/F/G/K/L/M/P/Q/R/S/T/V/Y, 296E/G/L/Q/W, 297A/I/L, 298C/I/K/R/S/V, 299E/I/K/Q/R/T/V, 300A, 301A/F/I/L/M/V, 302A/C/I/L/S, 305V, 306G/L/T, 307K/R, 310H/L/M/N/Q/R/S/T, 311C, 315E/S, 316I/L/Y, 317E/F/G/Q/V/W, 318A/E/G/S, 323E/G, 324D/G/M, 325L, 326C/L, 327E/G/M/S, 330A/D/E/G/K/R, 331D/G/R/S/W, 332E/H/W, 334E/R, 335H/Q, 336I/L/M, 337A/V, 338G/L/M, 341A, 342R/S/T, 344K, 345Q/S, and 346S; or at equivalent positions thereof; and/or
[0496] (c) in the linker region connecting the N-terminal and C-terminal domains one or more amino acid residues 247I/L/R/S, 248F/G/I/K/T, 249K/L/R/S, 250E/I/S, 251C/E/F/G/L/R/S/T/Y, 252A/Q, 253L/W, 254E/K/L/N/Q/S/V, and 255N/S/V/Y, or at equivalent positions thereof,
[0497] wherein the amino acid positions are relative to the reference sequence corresponding to residues 12-346 of SEQ ID NO: 3060.

[0498] In some embodiments, the recombinant polynucleotide comprises a polynucleotide sequence encoding an engineered RNA ligase comprising in the amino acid sequence of the N-terminal domain one or more amino acid residues 12A/F/L/P/R/T/V, 23K/T, 25A/D/F/G/L/M/S/T, 29D/S, 37A/F/K/L/M/R, 38A/E/L/R/S/T/V, 75A/D, 86D/L, 89C/D/E/L/N/Q/R/S/T/V/Y,93K, 101P/V/W, 122C/F/G/L/Q/T/W, 143A/C/E/F/H/M/T/V, 157F/Q/V, 183L/V, 192E/F/L/N, 194A/G/V, 198M, 212E/G/I/K/L, 214A/C/H/K/L/Q/Y, 230T/V, and 241E/G/Q/R. or at equivalent positions thereof, wherein the amino acid positions are relative to the reference sequence corresponding to residues 12-346 of SEQ ID NO: 3060.

[0499] In some embodiments, the recombinant polynucleotide comprises a polynucleotide sequence encoding an engineered RNA ligase comprising in the amino acid sequence of the N-terminal domain one or more amino acid residues 12T, 23T, 25A, 29S, 37L, 38A/S, 75D, 86D, 89M, 93K, 101P, 122F, 157V, 183L, 192E, 194V, 198M, 212E, 214L, 226R, 230T/V, and 241G, or at equivalent positions thereof, wherein the amino acid positions are relative to the reference sequence corresponding to residues 12-346 of SEQ ID NO: 3060.

[0500] In some embodiments, the recombinant polynucleotide comprises a polynucleotide sequence encoding an engineered RNA ligase comprising in the amino acid sequence of the C-terminal domain one or more amino acid residues 266C/I/L, 268F/G/M, 280L/N/W, 291H/L/Q/R/S/T/W, 295C/F/K/L/M/P/Q/R/S/T/V/Y, 298C/I/K/R/S/V, 307K/R, 316I/L/Y, 318A/E/G/S, 326C/L, 330A/D/E/G/K/R, and 331D/G/R/S/W, or at equivalent positions thereof, wherein the amino acid positions are relative to the reference sequence corresponding to residues 12-346 of SEQ ID NO: 3060.

[0501] In some embodiments, the recombinant polynucleotide comprises a polynucleotide sequence encoding an engineered RNA ligase comprising in the amino acid sequence of the C-terminal domain one or more amino acid residues 266L, 268G, 280L, 291Q, 295V, 298S/V, 307R, 316L, 318S, 326L, 330A, and 331G, or at equivalent positions thereof, wherein the amino acid positions are relative to the reference sequence corresponding to residues 12-346 of SEQ ID NO: 3060.

[0502] In some embodiments, the recombinant polynucleotide comprises a polynucleotide sequence encoding an engineered RNA ligase comprising in the amino acid sequence of the linker region connecting the N-terminal and C-terminal domains one or more amino acid residues 248G/I/K/T, 249K/L/R/S, 250E/I/S, 251C/E/F/G/L/R/S/T/Y, and 254E/K/L/N/Q/S/V, or at equivalent positions thereof, wherein the amino acid positions are relative to the reference sequence corresponding to residues 12-346 of SEQ ID NO: 3060.

[0503] In some embodiments, the recombinant polynucleotide comprises a polynucleotide sequence encoding an engineered RNA ligase comprising in the amino acid sequence of the linker region connecting the N-terminal and C-terminal domains one or more amino acid residues 249L, 2501, 251E/S, and 254S, or at equivalent positions thereof, wherein the amino acid positions are relative to the reference sequence corresponding to residues 12-346 of SEQ ID NO: 3060.

[0504] In some embodiments, the recombinant polynucleotide comprises a polynucleotide sequence encoding an engineered RNA ligase comprising an amino acid sequence having at least 70%, 75%, 80%, 81%, 82%, 83%, 84%, 85%, 86%, 87%, 88%, 89%, 90%, 91%, 92%, 93%, 94%, 95%, 96%, 97%, 98%, 99% or more sequence identity to the N-terminal domain corresponding to amino acid residues 12-246 of SEQ ID NO: 3060, wherein the amino acid sequence of the RNA ligase comprises one or more amino acid differences or amino acid residues in the N-terminal domain, as provided in the foregoing.

[0505] In some embodiments, the recombinant polynucleotide comprises a polynucleotide sequence encoding an engineered RNA ligase comprising an amino acid sequence having at least 70%, 75%, 80%, 81%, 82%, 83%, 84%, 85%, 86%, 87%, 88%, 89%, 90%, 91%, 92%, 93%, 94%, 95%, 96%, 97%, 98%, 99% or more sequence identity to the C-terminal domain corresponding to amino acid residues 256-346 of SEQ ID NO: 3060, wherein the amino acid sequence of the RNA ligase comprises one or more amino acid differences or amino acid residues in the C-terminal domain, as provided in the foregoing.

[0506] In some embodiments, the recombinant polynucleotide comprises a polynucleotide sequence encoding an engineered RNA ligase comprising an amino acid sequence having at least 70%, 75%, 80%, 81%, 82%, 83%, 84%, 85%, 86%, 87%, 88%, 89%, 90%, 91%, 92%, 93%, 94%, 95%, 96%, 97%, 98%, 99% or more sequence identity to the linker region corresponding to amino acid residues 247-255 of the reference sequence of SEQ ID NO: 3060, wherein the amino acid sequence of the RNA ligase comprises one or more amino acid differences or amino acid residues in the linker region, as provided in the foregoing.

[0507] In some embodiments, the present disclosure provides a recombinant polynucleotide capable of hybridizing under highly stringent conditions to a reference polynucleotide encoding an engineered RNA ligase polypeptide described herein, e.g., a recombinant polynucleotide provided in 5.1, 6.1, 6.2, 7.1, 8.1, 8.2, 9.1, 10.1, 11.1, 12.1, 13.1, 14.1, 15.1, 16.1, 17.1, 18.1, 19.1, 20.1, 21.1, 22.1, 23.1, 24.1, 25.1, and 26.1, or a reverse complement thereof. In some embodiments, the recombinant polynucleotide hybridizes under highly stringent conditions to a reference polynucleotide corresponding to nucleotide residues 34 to 1038 of SEQ ID NO: 53, 243, 647, 861, 955, 1087, 1415, 1611, 1839, 1865, 1953, 2061, 2673, 2753, or 2785, or to a reference polynucleotide sequence corresponding to SEQ ID NO: 53, 243, 647, 861, 955, 1087, 1415, 1611, 1839, 1865, 1953, 2061, 2673, 2753, or 2785, or a reverse complement thereof. In some embodiments, the recombinant polynucleotide hybridizes under highly stringent conditions to a polynucleotide sequence corresponding to nucleotide residues 34 to 1038 of an odd numbered SEQ ID NO. of SEQ ID NOs: 3-1469 and 1477-3057, or a polynucleotide sequence comprising an odd numbered SEQ ID NO. of SEQ ID NOs: 3-1469 and 1477-3057, or a reverse complement thereof.

[0508] In some embodiments, the present disclosure provides a recombinant polynucleotide capable of hybridizing under highly stringent conditions to a reverse complement of a reference polynucleotide encoding an engineered RNA ligase polypeptide described herein, wherein the recombinant polynucleotide hybridizing under stringent conditions encodes an RNA ligase polypeptide comprising an amino acid sequence having one or more amino acid differences as compared to SEQ ID NO: 2, 100, 244, 648, 862, 956, 1088, 1416, 1612, 1840, 1866, 1954, 2062, 2674, 2754, or 2786 at residue positions selected from any positions as set forth in Tables 5.1, 6.1, 6.2, 7.1, 8.1, 8.2, 9.1, 10.1, 11.1, 12.1, 13.1, 14.1, 15.1, 16.1, 17.1, 18.1, 19.1, 20.1, 21.1, 22.1, 23.1, 24.1, 25.1, and 26.1. In some embodiments, the recombinant polynucleotide that hybridizes under highly stringent conditions to a reverse complement of a reference polynucleotide encoding an engineered RNA ligase polypeptide described herein encodes an RNA ligase polypeptide having one or more amino acid differences present in an engineered RNA ligase having an amino acid sequence corresponding to residues 12 to 346 of an even numbered SEQ ID NO. of SEQ ID NOs: 4-1470 and 1478-3058, or an amino acid sequence comprising an even numbered SEQ ID NO. of SEQ ID NOs: 4-1470 and 1478-3058, wherein the amino acid differences are relative to SEQ ID NO: 2, 100, 244, 648, 862, 956, 1088, 1416, 1612, 1840, 1866, 1954, 2062, 2674, 2754, or 2786.

[0509] In some embodiments, the recombinant polynucleotide that hybridizes under highly stringent conditions comprises a polynucleotide sequence having at least 70%, 75%, 80%, 81%, 82%, 83%, 84%, 85%, 86%, 87%, 88%, 89%, 90%, 91%, 92%, 93%, 94%, 95%, 96%, 97%, 98%, 99% or more sequence identity to a reference polynucleotide sequence corresponding to nucleotide residues 34 to 1038 of SEQ ID NO: 53, 243, 647, 861, 955, 1087, 1415, 1611, 1839, 1865, 1953, 2061, 2673, 2753, or 2785, or to a reference polynucleotide sequence corresponding to SEQ ID NO: 53, 243, 647, 861, 955, 1087, 1415, 1611, 1839, 1865, 1953, 2061, 2673, 2753, or 2785, or to a reference polynucleotide sequence corresponding to SEQ ID NO: 53, 243, 647, 861, 955, 1087, 1415, 1611, 1839, 1865, 1953, 2061, 2673, 2753, or 2785, or to a reference polynucleotide sequence corresponding to SEQ ID NO: 53, 243, 647, 861, 955, 1087, 1415, 1611, 1839, 1865, 1953, 2061, 2673, 2753, or 2785, or a reverse complement thereof. In some embodiments, the recombinant polynucleotide that hybridizes under highly stringent conditions comprises a polynucleotide sequence having at least 70%, 75%, 80%, 81%, 82%, 83%, 84%, 85%, 86%, 87%, 88%, 89%, 90%, 91%, 92%, 93%, 94%, 95%, 96%, 97%, 98%, 99% or more sequence identity to a reference polynucleotide sequence corresponding to nucleotide residues 34 to 1038 of an odd-numbered SEQ ID NO. of SEQ ID NOs: 3-1469 and 1477-3057, or an odd-numbered SEQ ID NO. of SEQ ID NOs: 3-1469 and 1477-3057, or a reverse complement thereof.

[0510] In some additional embodiments, the polynucleotide hybridizing under highly stringent conditions comprises a polynucleotide sequence having at least 75%, 80%, 81%, 82%, 83%, 84%, 85%, 86%, 87%, 88%, 89%, 90%, 91%, 92%, 93%, 94%, 95%, 96%, 97%, 98%, 99% or more sequence identity to a reverse complement of a polynucleotide reference sequence corresponding to nucleotide residues 34 to 1038 of SEQ ID NO: 53, 243, 647, 861, 955, 1087, 1415, 1611, 1839, 1865, 1953, 2061, 2673, 2753, or 2785, or to a reference polynucleotide sequence corresponding to SEQ ID NO: 53, 243, 647, 861, 955, 1087, 1415, 1611, 1839, 1865, 1953, 2061, 2673, 2753, or 2785 encodes an engineered RNA ligase polypeptide. In some embodiments, the polynucleotide hybridizing under highly stringent conditions comprises a polynucleotide sequence having at least 75%, 80%, 81%, 82%, 83%, 84%, 85%, 86%, 87%, 88%, 89%, 90%, 91%, 92%, 93%, 94%, 95%, 96%, 97%, 98%, 99% or more sequence identity to a reverse complement of a polynucleotide reference sequence corresponding to nucleotide residues 34 to 1038 of an odd-numbered SEQ ID NO. of SEQ ID NOs: 3-1469 and 1477-3057, or an odd-numbered SEQ ID NO. of SEQ ID NOs: 3-1469 and 1477-3057 encodes an engineered RNA ligase polypeptide.

[0511] In some embodiments, a recombinant polynucleotide encoding any of the RNA ligases herein is manipulated in a variety of ways to facilitate expression of the RNA ligase polypeptide. In some embodiments, the recombinant polynucleotide encoding the RNA ligase comprises expression vectors where one or more control sequences is present to regulate the expression of the RNA ligase polynucleotides and/or polypeptides. Manipulation of the isolated polynucleotide prior to its insertion into a vector may be desirable or necessary depending on the expression vector utilized. Techniques for modifying polynucleotides and nucleic acid sequences utilizing recombinant DNA methods are well known in the art. In some embodiments, the control sequences include among others, promoters, leader sequences, polyadenylation sequences, propeptide sequences, signal peptide sequences, and transcription terminators.

[0512] In some embodiments, suitable promoters are selected based on the host cell selection. For bacterial host cells, suitable promoters for directing transcription of the nucleic acid constructs of the present disclosure, include, but are not limited to promoters obtained from the E. coli lac operon, Streptomyces coelicolor agarase gene (dagA), Bacillus subtilis levansucrase gene (sacB), Bacillus licheniformis alpha-amylase gene (amyL), Bacillus stearothermophilus maltogenic amylase gene (amyM), Bacillus amyloliquefaciens alpha-amylase gene (amyQ), Bacillus licheniformis penicillinase gene (penP), Bacillus subtilis xylA and xylB genes, and prokaryotic beta-lactamase gene (see, e.g., Villa-Kamaroff et al., Proc. Natl Acad. Sci. USA, 1978, 75:3727-3731), as well as the tac promoter (see, e.g., DeBoer et al., Proc. Natl Acad. Sci. USA, 1983, 80:21-25). Exemplary promoters for filamentous fungal host cells, include, but are not limited to promoters obtained from the genes for Aspergillus oryzae TAKA amylase, Rhizomucor miehei aspartic proteinase, Aspergillus niger neutral alpha-amylase, Aspergillus niger acid stable alpha-amylase, Aspergillus niger or Aspergillus awamori glucoamylase (glaA), Rhizomucor miehei lipase, Aspergillus oryzae alkaline protease, Aspergillus oryzae triose phosphate isomerase, Aspergillus nidulans acetamidase, and Fusarium oxysporum trypsin-like protease (see, e.g., WO 96/00787), as well as the NA2-tpi promoter (a hybrid of the promoters from the genes for Aspergillus niger neutral alpha-amylase and Aspergillus oryzae triose phosphate isomerase), and mutant, truncated, and hybrid promoters thereof. Exemplary yeast cell promoters can be from the genes for Saccharomyces cerevisiae enolase (ENO-1), Saccharomyces cerevisiae galactokinase (GAL1), Saccharomyces cerevisiae alcohol dehydrogenase/glyceraldehyde-3-phosphate dehydrogenase (ADH2/GAP), and Saccharomyces cerevisiae 3-phosphoglycerate kinase. Other useful promoters for yeast host cells are known in the art (see, e.g., Romanos et al., Yeast, 1992, 8:423-488). Exemplary promoters for use in insect cells include, but are not limited to, polyhedrin, p10, ELT, OpIE2, and hr5/ie1 promoters. Exemplary promoters for use in mammalian cells include, but are not limited to, those from cytomegalovirus (CMV), chicken β-actin promoter fused with the CMV enhancer, Simian vacuolating virus 40 (SV40), from Homo sapiens phosphoglycerate kinase, beta actin, elongation factor-la or glyceraldehyde-3-phosphate dehydrogenase, and from Gallus β-actin.

[0513] In some embodiments, the control sequence is a suitable transcription terminator sequence (i.e., a sequence recognized by a host cell to terminate transcription). In some embodiments, the terminator sequence is operably linked to the 3′ terminus of the nucleic acid sequence encoding the RNA ligase polypeptide. Any suitable terminator which is functional in the host cell of choice finds use in the present invention. For bacterial expression, the transcription terminators can be a Rho-dependent terminators that rely on a Rho transcription factor, or a Rho-independent, or intrinsic terminators, which do not require a transcription factor. Exemplary bacterial transcription terminators are described in Peters et al., J Mol Biol., 2011, 412 (5): 793-813. Exemplary transcription terminators for filamentous fungal host cells can be obtained from the genes for Aspergillus oryzae TAKA amylase, Aspergillus niger glucoamylase, Aspergillus nidulans anthranilate synthase, Aspergillus niger alpha-glucosidase, and Fusarium oxysporum trypsin-like protease. Exemplary terminators for yeast host cells can be obtained from the genes for Saccharomyces cerevisiae enolase, Saccharomyces cerevisiae cytochrome C (CYC1), and Saccharomyces cerevisiae glyceraldehyde-3-phosphate dehydrogenase. Other useful terminators for yeast host cells are known in the art (see, e.g., Romanos et al., Yeast, 1992, 8 (6): 423-88). Exemplary terminators for insect cells and mammalian cells include, but are not limited to, those from cytomegalovirus (CMV), Simian virus 40 (SV40), from Homo sapiens growth hormone hGH, from bovine growth hormone BGH, and from human or rabbit beta globulin.

[0514] In some embodiments, the control sequence is a suitable leader sequence, a non-translated region of an mRNA that is used for translation by the host cell. In some embodiments, the leader sequence is operably linked to the 5′ terminus of the nucleic acid sequence encoding the RNA ligase polypeptide. Any suitable leader sequence that is functional in the host cell of choice find use in the present invention. Exemplary leaders for filamentous fungal host cells are obtained from the genes for Aspergillus oryzae TAKA amylase, and Aspergillus nidulans triose phosphate isomerase. Suitable leaders for yeast host cells are obtained from the genes for Saccharomyces cerevisiae enolase (ENO-1), Saccharomyces cerevisiae 3-phosphoglycerate kinase, Saccharomyces cerevisiae alpha-factor, and Saccharomyces cerevisiae alcohol dehydrogenase/glyceraldehyde-3-phosphate dehydrogenase (ADH2/GAP). Suitable leaders for mammalian host cells include but are not limited to the 5′-UTR element present in orthopoxvirus mRNA.

[0515] In some embodiments, the control sequence is a polyadenylation sequence (i.e., a sequence operably linked to the 3′ terminus of the nucleic acid sequence and which, when transcribed, is recognized by the host cell as a signal to add polyadenosine residues to transcribed mRNA). Any suitable polyadenylation sequence which is functional in the host cell of choice finds use in the present invention. Exemplary polyadenylation sequences for filamentous fungal host cells include, but are not limited to the genes for Aspergillus oryzae TAKA amylase, Aspergillus niger glucoamylase, Aspergillus nidulans anthranilate synthase, Fusarium oxysporum trypsin-like protease, and Aspergillus niger alpha-glucosidase. Useful polyadenylation sequences for yeast host cells are known (see, e.g., Guo and Sherman, Mol. Cell. Biol., 1995, 15:5983-5990). Useful polyadenylation and 3′ UTR sequences for insect and mammalian host cells include, but are not limited to, OpIE2 polyA sequence, D. melanogaster metallothionein (Mt) polyA signal sequence, D. melanogaster alcohol dehydrogenase (adh), SV40 polyA signal sequence, and the 3′-UTRs of α- and β-globin mRNAs harboring sequence elements that increase the stability and translation of mRNA.

[0516] In some embodiments, the control sequence is also a signal peptide (i.e., a coding region that codes for an amino acid sequence linked to the amino terminus of a polypeptide and directs the encoded polypeptide into the cell's secretory pathway). In some embodiments, the 5′ end of the coding sequence of the nucleic acid sequence inherently contains a signal peptide coding region naturally linked in translation reading frame with the segment of the coding region that encodes the secreted polypeptide. Alternatively, in some embodiments, the 5′ end of the coding sequence contains a signal peptide coding region that is foreign to the coding sequence. Any suitable signal peptide coding region which directs the expressed polypeptide into the secretory pathway of a host cell of choice finds use for expression of the engineered polypeptide(s). Effective signal peptide coding regions for bacterial host cells are the signal peptide coding regions include, but are not limited to those obtained from the genes for Bacillus NCIB 11837 maltogenic amylase, Bacillus stearothermophilus alpha-amylase, Bacillus licheniformis subtilisin, Bacillus licheniformis beta-lactamase, Bacillus stearothermophilus neutral proteases (nprT, nprS, nprM), and Bacillus subtilis prsA. Further signal peptides are known in the art (see, e.g., Simonen and Palva, Microbiol. Rev., 1993, 57:109-137). In some embodiments, effective signal peptide coding regions for filamentous fungal host cells include, but are not limited to the signal peptide coding regions obtained from the genes for Aspergillus oryzae TAKA amylase, Aspergillus niger neutral amylase, Aspergillus niger glucoamylase, Rhizomucor miehei aspartic proteinase, Humicola insolens cellulase, and Humicola lanuginosa lipase. Useful signal peptides for yeast host cells include, but are not limited to those from the genes for Saccharomyces cerevisiae alpha-factor and Saccharomyces cerevisiae invertase. Useful signal peptides for insect and mammalian host cells include but are not limited to, those from the genes for immunoglobulin gamma (IgG) and the signal peptide in a human secreted protein, such as human beta-galactosidase polypeptide.

[0517] In some embodiments, the control sequence is a propeptide coding region that codes for an amino acid sequence positioned at the amino terminus of a polypeptide. The resultant polypeptide is referred to as a “proenzyme,” “propolypeptide,” or “zymogen.” A propolypeptide can be converted to a mature active polypeptide by catalytic or autocatalytic cleavage of the propeptide from the propolypeptide. The propeptide coding region may be obtained from any suitable source, including, but not limited to the genes for Bacillus subtilis alkaline protease (aprE), Bacillus subtilis neutral protease (nprT), Saccharomyces cerevisiae alpha-factor, Rhizomucor miehei aspartic proteinase, and Myceliophthora thermophila lactase (see, e.g., WO 95/33836). Where both signal peptide and propeptide regions are present at the amino terminus of a polypeptide, the propeptide region is positioned next to the amino terminus of a polypeptide and the signal peptide region is positioned next to the amino terminus of the propeptide region.

[0518] In some embodiments, regulatory sequences are also utilized. These sequences facilitate the regulation of the expression of the polypeptide relative to the growth of the host cell. Examples of regulatory systems are those that cause the expression of the gene to be turned on or off in response to a chemical or physical stimulus, including the presence of a regulatory compound. In prokaryotic host cells, suitable regulatory sequences include, but are not limited to the lac, tac, and trp operator systems. In yeast host cells, suitable regulatory systems include, but are not limited to the ADH2 system or GAL1 system. In filamentous fungi, suitable regulatory sequences include, but are not limited to the TAKA alpha-amylase promoter, Aspergillus niger glucoamylase promoter, and Aspergillus oryzae glucoamylase promoter. Exemplary inducible promoters regulated by exogenous agents include the zinc-inducible sheep metallothionine (MT) promoter, dexamethasone (Dex)-inducible promoter, mouse mammary tumor virus (MMTV) promoter; ecdysone insect promoter, tetracycline-inducible promoter system, RU486-inducible promoter system, and the rapamycin-inducible promoter system.

[0519] In another aspect, the present disclosure provides a recombinant expression vector comprising a recombinant polynucleotide encoding an engineered RNA ligase polypeptide, and one or more expression regulating regions such as a promoter and a terminator, a replication origin, etc., depending on the type of hosts into which they are to be introduced. In some embodiments, the various nucleic acid and control sequences described herein are joined together (i.e., operably linked) to produce recombinant expression vectors capable of expressing the encoded engineered RNA ligase polypeptide.

[0520] The recombinant expression vector may be any suitable vector (e.g., a plasmid or virus), that can be conveniently subjected to recombinant DNA procedures and bring about the expression of the RNA ligase polynucleotide. The choice of the vector typically depends on the compatibility of the vector with the host cell into which the vector is to be introduced. The vectors may be linear or closed circular plasmids.

[0521] In some embodiments, the expression vector is an autonomously replicating vector (i.e., a vector that exists as an extra-chromosomal entity, the replication of which is independent of chromosomal replication, such as a plasmid, an extra-chromosomal element, a minichromosome, or an artificial chromosome). The vector may contain any means for assuring self-replication. In some alternative embodiments, the vector is one in which, when introduced into the host cell, it is integrated into the genome and replicated together with the chromosome(s) into which it has been integrated. Furthermore, in some embodiments, a single vector or plasmid, or two or more vectors or plasmids which together contain the total DNA to be introduced into the genome of the host cell, and/or a transposon is utilized.

[0522] In some embodiment, the recombinant polynucleotides may be provided on a non-replicating expression vector or plasmid. In some embodiments, the non-replicating expression vector or plasmid can be based on viral vectors defective in replication (see, e.g., Travieso et al., npj Vaccines, 2022, Vol. 7, Article 75).

[0523] In some embodiments, the expression vector contains one or more selectable markers, which permit selection of transformed cells. A “selectable marker” is a gene, the product of which provides for biocide or viral resistance, resistance to heavy metals, prototrophy to auxotrophs, and the like. Examples of bacterial selectable markers include, but are not limited to the dal genes from Bacillus subtilis or Bacillus licheniformis, or markers, which confer antibiotic resistance such as ampicillin, kanamycin, chloramphenicol or tetracycline resistance. Suitable markers for yeast host cells include, but are not limited to ADE2, HIS3, LEU2, LYS2, MET3, TRP1, and URA3. Selectable markers for use in filamentous fungal host cells include, but are not limited to, amdS (acetamidase; e.g., from A. nidulans or A. orzyae), argB (ornithine carbamoyltransferases), bar (phosphinothricin acetyltransferase; e.g., from S. hygroscopicus), hph (hygromycin phosphotransferase), niaD (nitrate reductase), pyrG (orotidine-5′-phosphate decarboxylase; e.g., from A. nidulans or A. orzyae), sC (sulfate adenyltransferase), and trpC (anthranilate synthase), as well as equivalents thereof.

[0524] In another aspect, the present disclosure provides a host cell comprising a recombinant polynucleotide encoding an engineered RNA ligase polypeptide described herein, the polynucleotide(s) being operably linked to one or more control sequences for expression of the engineered RNA ligase enzyme(s) in the host cell. Host cells suitable for use in expressing the polypeptides encoded by the expression vectors of the present invention are known in the art and include but are not limited to, bacterial cells, such as E. coli, B. subtilis, Vibrio fluvialis, Streptomyces and Salmonella typhimurium cells; fungal cells, such as yeast cells (e.g., Saccharomyces cerevisiae or Pichia pastoris (ATCC Accession No. 201178)); insect cells such as Drosophila S2 and Spodoptera Sf9 cells; animal cells such as CHO, COS, BHK, 293, and Bowes melanoma cells; and plant cells. Exemplary host cells also include various Escherichia coli strains (e.g., W3110 (AfhuA) and BL21).

[0525] In another aspect, the present disclosure provides a method of producing the engineered RNA ligase polypeptides, the method comprising culturing a host cell capable of expressing a polynucleotide encoding the engineered RNA ligase polypeptide under conditions suitable for expression of the polypeptide such that the engineered RNA ligase is produced. In some embodiments, the method further comprises isolating the RNA ligase polypeptides from the culture and/or host cells. In some embodiments, the method further comprises purifying the expressed RNA ligase polypeptide, as described herein.

[0526] In some embodiments, the RNA ligase polypeptide expressed in a host cell is recovered from the cells and/or the culture medium using any one or more of the known techniques for protein purification, including, among others, lysozyme or detergent treatment, sonication, filtration, salting-out, ultra-centrifugation, and chromatography, such as described herein.

[0527] Chromatographic techniques for isolation/purification of the RNA ligase polypeptides include, among others, reverse phase chromatography, high-performance liquid chromatography, ion-exchange chromatography, hydrophobic-interaction chromatography, size-exclusion chromatography, gel electrophoresis, and affinity chromatography. Conditions for purifying the RNA ligase depends, in part, on factors such as net charge, hydrophobicity, hydrophilicity, molecular weight, molecular shape, etc., and will be apparent to those having skill in the art. In some embodiments, affinity techniques may be used to isolate the RNA ligase. For affinity chromatography purification, an antibody that specifically binds RNA ligase polypeptide may be used. In some embodiments, an affinity tag, e.g., His-tag, can be introduced into the RNA ligase polypeptide for purposes of isolation/purification.

[0528] It is contemplated that any suitable method for introducing polynucleotides for expression of the RNA ligase polypeptides into cells will find use in the present invention. Suitable techniques include, but are not limited to electroporation, biolistic particle bombardment, liposome mediated transfection, calcium chloride transfection, and protoplast fusion. In addition, the host cells are cultured using appropriate culture media and growth conditions known in the art for different host cell types.

[0529] In some embodiments, recombinant polypeptides (e.g., RNA ligase enzyme variants) can be produced using any suitable methods known the art. For example, there is a wide variety of different mutagenesis techniques known to those skilled in the art. In addition, mutagenesis kits are also available from many commercial molecular biology suppliers. Methods are available to make specific substitutions at defined amino acids (site-directed), specific or random mutations in a localized region of the gene (region-specific), or random mutagenesis over the entire gene (e.g., saturation mutagenesis). Numerous suitable methods are known to those in the art to generate enzyme variants, including but not limited to site-directed mutagenesis of single-stranded DNA or double-stranded DNA using PCR, cassette mutagenesis, gene synthesis, error-prone PCR, shuffling, and chemical saturation mutagenesis, or any other suitable method known in the art. Non-limiting examples of methods used for DNA and protein engineering are provided in the following patents: U.S. Pat. Nos. 6,117,679; 6,420,175; 6,376,246; 6,586,182; 7,747,391; 7,747,393; 7,783,428; and 8,383,346. After the variants are produced, they can be screened for any desired property (e.g., high or increased activity, or low or reduced activity, increased thermal activity, increased stability, increased substrate range, increased inhibitor resistance or tolerance, increased salt tolerance, and/or pH stability, etc.). Exemplary methods are provided in the Examples.

[0530] In some embodiments, the engineered RNA ligase polypeptides with the properties disclosed herein can be obtained by subjecting the polynucleotide encoding the naturally occurring or engineered RNA ligase polypeptide to a suitable mutagenesis and/or directed evolution methods known in the art, for example, as described herein. An exemplary directed evolution technique is mutagenesis and/or DNA shuffling (see, e.g., Stemmer, Proc. Natl. Acad. Sci. USA, 1994, 91:10747-10751; WO 95/22625; WO 97/0078; WO 97/35966; WO 98/27230; WO 00/42651; WO 01/75767 and U.S. Pat. No. 6,537,746). Other directed evolution procedures that can be used include, among others, staggered extension process (StEP), in vitro recombination (see, e.g., Zhao et al., Nat. Biotechnol., 1998, 16:258-261), mutagenic PCR (see, e.g., Caldwell et al., PCR Methods Appl., 1994, 3: S136-S140), and cassette mutagenesis (see, e.g., Black et al., Proc. Natl. Acad. Sci. USA, 1996, 93:3525-3529).

[0531] Mutagenesis and directed evolution methods can be applied to RNA ligase-encoding polynucleotides to generate variant libraries that can be expressed, screened, and assayed. Any suitable mutagenesis and directed evolution methods find use in the present disclosure and are known in the art (see, e.g., U.S. Pat. Nos. 5,605,793, 5,811,238, 5,830,721, 5,834,252, 5,837,458, 5,928,905, 6,096,548, 6,117,679, 6,132,970, 6,165,793, 6,180,406, 6,251,674, 6,265,201, 6,277,638, 6,287,861, 6,287,862, 6,291,242, 6,297,053, 6,303,344, 6,309,883, 6,319,713, 6,319,714, 6,323,030, 6,326,204, 6,335,160, 6,335,198, 6,344,356, 6,352,859, 6,355,484, 6,358,740, 6,358,742, 6,365,377, 6,365,408, 6,368,861, 6,372,497, 6,337,186, 6,376,246, 6,379,964, 6,387,702, 6,391,552, 6,391,640, 6,395,547, 6,406,855, 6,406,910, 6,413,745, 6,413,774, 6,420,175, 6,423,542, 6,426,224, 6,436,675, 6,444,468, 6,455,253, 6,479,652, 6,482,647, 6,483,011, 6,484,105, 6,489,146, 6,500,617, 6,500,639, 6,506,602, 6,506,603, 6,518,065, 6,519,065, 6,521,453, 6,528,311, 6,537,746, 6,573,098, 6,576,467, 6,579,678, 6,586,182, 6,602,986, 6,605,430, 6,613,514, 6,653,072, 6,686,515, 6,703,240, 6,716,631, 6,825,001, 6,902,922, 6,917,882, 6,946,296, 6,961,664, 6,995,017, 7,024,312, 7,058,515, 7,105,297, 7,148,054, 7,220,566, 7,288,375, 7,384,387, 7,421,347, 7,430,477, 7,462,469, 7,534,564, 7,620,500, 7,620,502, 7,629,170, 7,702,464, 7,747,391, 7,747,393, 7,751,986, 7,776,598, 7,783,428, 7,795,030, 7,853,410, 7,868,138, 7,783,428, 7,873,477, 7,873,499, 7,904,249, 7,957,912, 7,981,614, 8,014,961, 8,029,988, 8,048,674, 8,058,001, 8,076,138, 8,108,150, 8,170,806, 8,224,580, 8,377,681, 8,383,346, 8,457,903, 8,504,498, 8,589,085, 8,762,066, 8,768,871, 9,593,326, 9,665,694, 9,684,771, and all related PCT and non-US counterparts; Ling et al., Anal. Biochem., 1997, 254 (2): 157-78; Dale et al., Meth. Mol. Biol., 1996, 57:369-74; Smith, Ann. Rev. Genet., 1985, 19:423-462; Botstein et al., Science, 1985, 229:1193-1201; Carter, Biochem. J., 1986, 237:1-7; Kramer et al., Cell, 1984, 38:879-887; Wells et al., Gene, 1985, 34:315-323; Minshull et al., Curr. Op. Chem. Biol., 1999, 3:284-290; Christians et al., Nat. Biotechnol., 1999, 17:259-264; Crameri et al., Nature, 1998, 391:288-291; Crameri, et al., Nat. Biotechnol., 1997, 15:436-438; Zhang et al., Proc. Nat. Acad. Sci. U.S.A., 1997, 94:4504-4509; Crameri et al., Nat. Biotechnol., 1996, 14:315-319; Stemmer, Nature, 1994, 366:389-391; Stemmer, Proc. Nat. Acad. Sci. USA, 1994, 91:10747-10751; EP 3 049 973; WO 95/22625; WO 97/0078; WO 97/35966; WO 98/27230; WO 00/42651; WO 01/75767; WO 2009/152336; and WO 2015/048573, all of which are incorporated herein by reference).

[0532] In some embodiments, the clones obtained following mutagenesis treatment are screened by subjecting the enzyme preparations to a defined treatment conditions or assay conditions (e.g., temperature, pH, type of ligase substrate, input substrate concentration, nucleotide cofactors, etc.) and measuring enzyme activity after the treatments or other suitable assay conditions. Clones containing a polynucleotide encoding the polypeptide of interest are then isolated from the gene, sequenced to identify the nucleotide sequence changes (if any), and used to express the enzyme in a host cell. Measuring enzyme activity from the expression libraries can be performed using any suitable method known in the art and as described in the Examples.

[0533] In some embodiments, for engineered polypeptides of known sequence, the polynucleotides encoding the enzyme can be prepared by standard solid-phase methods, according to known synthetic methods. In some embodiments, fragments of up to about 100 bases can be individually synthesized, then joined (e.g., by enzymatic or chemical ligation methods, or polymerase mediated methods) to form any desired continuous sequence (see, e.g., Hughes et al., Cold Spring Harb Perspect Biol. 2017 January; 9 (1): a023812). For example, polynucleotides and oligonucleotides disclosed herein can be prepared by chemical synthesis using the classical phosphoramidite method (see, e.g., Beaucage et al., Tet. Lett., 1981, 22:1859-69; and Matthes et al., EMBO J., 1984, 3:801-05), as it is typically practiced in automated synthetic methods. According to the phosphoramidite method, oligonucleotides are synthesized (e.g., in an automatic DNA synthesizer), purified, annealed, ligated and cloned in appropriate vectors.

[0534] In some embodiments, a method for preparing the engineered RNA ligase polypeptide can comprise: (a) synthesizing a polynucleotide encoding a polypeptide comprising an amino acid sequence selected from the amino acid sequence of any variant as described herein, and (b) expressing the RNA ligase polypeptide encoded by the polynucleotide. In some embodiments of the method, the amino acid sequence encoded by the polynucleotide can optionally have one or several (e.g., up to 3, 4, 5, or up to 10) amino acid residue deletions, insertions and/or substitutions. In some embodiments, the amino acid sequence has optionally 1-2, 1-3, 1-4, 1-5, 1-6, 1-7, 1-8, 1-9, 1-10, 1-15, 1-20, 1-21, 1-22, 1-23, 1-24, 1-25, 1-30, 1-35, 1-40, 1-45, or 1-50 amino acid residue deletions, insertions and/or substitutions. In some embodiments, the amino acid sequence has optionally 1, 2, 3, 4, 5, 6, 7, 8, 9, 10, 11, 12, 13, 14, 15, 16, 17, 18, 19, 20, 21, 22, 23, 24, 25, 30, 30, 35, 40, 45, or 50 amino acid residue deletions, insertions and/or substitutions. In some embodiments, the amino acid sequence has optionally 1, 2, 3, 4, 5, 6, 7, 8, 9, 10, 11, 12, 13, 14, 15, 16, 18, 20, 21, 22, 23, 24, or 25 amino acid residue deletions, insertions and/or substitutions. In some embodiments, the substitutions are conservative or non-conservative substitutions.

### Composition of RNA Ligases

[0535] In a further aspect, the present disclosure provides compositions of the RNA ligases disclosed herein. In some embodiments, the composition comprises an engineered RNA ligase polypeptide described herein. In some embodiments, the engineered RNA ligase polypeptide in the compositions is isolated or purified. In some embodiments, the RNA ligase is combined with other components and compounds to provide compositions and formulations comprising the engineered RNA ligase polypeptide as appropriate for different applications and uses.

[0536] In some embodiments, the composition comprises at least one engineered RNA ligase described herein, e.g., an engineered RNA ligase provided in Tables 5.1, 6.1, 6.2, 7.1, 8.1, 8.2, 9.1, 10.1, 11.1, 12.1, 13.1, 14.1, 15.1, 16.1, 17.1, 18.1, 19.1, 20.1, 21.1, 22.1, 23.1, 24.1, 25.1, and 26.1, or in the Sequence Listing. In some embodiments, the composition comprises an engineered RNA ligase comprising an amino acid sequence comprising residues 12 to 346 of an even-numbered SEQ ID NO. of SEQ ID NOs: 4-1470 and 1478-3058, or an amino acid sequence comprising an even-numbered SEQ ID NO. of SEQ ID NOs: 4-1470 and 1478-3058.

[0537] In some embodiments, the composition further comprises one or more of a buffer, a nucleotide substrate (e.g., ATP or dATP), and/or at least one or more polynucleotide substrates, for example a polynucleotide substrate with modified nucleotides. In some embodiments, the composition comprises one or more of EDTA, DTT, and glycerol, such as for storage of the engineered RNA ligase.

[0538] In some embodiments, the composition further comprises an additive or ligation enhancing agent, including, among others, one or more of DMSO, betaine, polyethylene glycol (e.g., PEG 6000, PEG 8000, etc.), bovine serum albumin, Ficoll, and dextran (e.g., Dextran 6000). In some embodiments, the composition comprises 1% to 40% v/v of DMSO. In some embodiments, the composition comprises 0.1 M to 3 M betaine. In some embodiments, the composition comprises 0.5% to 20% w/v of PEG (e.g., PEG6000 or PEG8000).

[0539] In some embodiments, the composition further comprises an RNase inhibitor, including, among others, porcine RNase inhibitor, human placental RNase inhibitor, human liver RNase inhibitor, mouse RNase inhibitor, rat RNase inhibitor, and recombinantly expressed RNase inhibitors thereof.

[0540] In some embodiments, an engineered RNA ligase described herein is provided in solution, as a lyophilizate, or is immobilized on a substrate. In some embodiments, the substrate is a solid substrate, porous substrate, membrane, or particles. The enzyme can be entrapped in matrixes or membranes. In some embodiments, matrices include polymeric materials such as calcium-alginate, agar, k-carrageenin, polyacrylamide, agarose or derivatives thereof (e.g., cross-linked agarose), and collagen, or solid matrices, such as activated carbon, porous ceramic, and diatomaceous earth. In some embodiments, the matrix is a particle, a membrane, or a fiber. Types of membranes include, among others, nylon, cellulose, polysulfone, or polyacrylate.

[0541] In some embodiments, the enzyme is immobilized on the surface of a support material. In some embodiments, the enzyme is adsorbed on the support material. In some embodiments, the enzyme is immobilized on the support material by covalent attachment. Support materials include, among others, inorganic materials, such as alumina, silica, porous glass, ceramics, diatomaceous earth, clay, and bentonite, or organic materials, such as cellulose (CMC, DEAE-cellulose), starch, activated carbon, polyacrylate, polyacrylamide, polystyrene, and ion-exchange resins, such as Amberlite, Sephadex, and Dowex.

### Uses of Engineered RNA Ligase Polypeptides and Kits

[0542] In another aspect, the present disclosure provides uses of the engineered RNA ligases for polynucleotide synthesis, RNA repair, or other molecular biological uses.

[0543] In some embodiments, the engineered RNA ligase is used for ligating polynucleotides, including oligonucleotides. In some embodiments, the engineered RNA ligase is used for synthesizing polynucleotides from shorter oligonucleotides. In some embodiments, a method of ligating at least a first polynucleotide strand and a second polynucleotide strand comprises contacting a first polynucleotide strand and a second polynucleotide strand with an engineered RNA ligase described herein in presence of a nucleotide substrate under conditions suitable for ligation of the first polynucleotide strand to the second polynucleotide strand, wherein the first polynucleotide strand comprises a ligatable 5′-end and the second polynucleotide strand comprises a 3′-end ligatable to the 5′-end of the first polynucleotide strand.

[0544] In some embodiments, the second polynucleotide strand comprising a ligatable 3′-end has at least 2, 3, 4, 5 or 6 ribonucleotides at the 3′ terminal end. In some embodiments of the method, the 3′-end of the second polynucleotide strand is a 3′-OH. In some embodiments of the method, the 5′-end of the first polynucleotide strand is a 5′-phosphate. In some embodiments of the method, the internucleoside linkage contained in the first polynucleotide strand and/or second polynucleotide strand comprises a phosphate linkage.

[0545] In some embodiments, the first polynucleotide strand has at least a 5′-terminal nucleotide with a 2′-modified sugar moiety. In some embodiments, at least 2, 3, 4, or more of nucleotides at the 5′-terminal region of the first polynucleotide strand has 2′-modified sugar moiety. In some embodiments, the first polynucleotide strand has at least a 5′-terminal nucleotide with a non-natural internucleoside linkage to the adjacent 3′-nucleotide. In some embodiments, at least 2, 3, 4 or more nucleotides at the 5′-terminal region of the first polynucleotide strand has a non-natural internucleoside linkage. In some embodiments, the non-natural linkage is a phosphorothioate internucleoside linkage.

[0546] In some embodiments, the second polynucleotide strand has at least the 3′-terminal nucleotide with a 2′-modified sugar moiety. In some embodiments, at least 2, 3, 4, or more of nucleotides at the 3′-terminal region of the second polynucleotide strand have a 2′-modified sugar moiety. In some embodiments, the second polynucleotide strand has at least a 3′-terminal nucleotide with a non-natural internucleoside linkage to the adjacent 5′-nucleotide. In some embodiments, at least 2, 3, 4 or more nucleotides at the 3′-terminal region of the second polynucleotide strand has a non-natural internucleoside linkage. In some embodiments, the non-natural linkage is a phosphorothioate internucleoside linkage.

[0547] In some embodiments, the first polynucleotide strand has at least a 5′-terminal nucleotide with a 2′-modified sugar moiety, and the second polynucleotide strand has at least a 3′-terminal nucleotide with a 2′-modified sugar moiety. In some embodiments, at least 2, 3, 4, or more of nucleotides at the 5′-terminal region of the first polynucleotide strand have 2′-modified sugar moieties, and at least 2, 3, 4, or more of nucleotides at the 3′-terminal region of the second polynucleotide strand have 2′-modified sugar moieties. As further discussed below, in some embodiments, the 2′-modified sugar moiety is a 2′-O-methyl, 2′-O-ethyl, or 2′-fluoro. In some embodiments, the first polynucleotide strand has at least a 5′-terminal nucleotide with a non-natural internucleoside linkage to the adjacent 3′-nucleotide, and the second polynucleotide strand has at least a 3′-terminal nucleotide with a non-natural internucleoside linkage to the adjacent 5′-nucleotide. In some embodiments, at least 2, 3, 4 or more nucleotides at the 5′-terminal region of the first polynucleotide strand and at least 2, 3, 4 or more nucleotides at the 3′-terminal region of the second polynucleotide strand have a non-natural internucleoside linkage. In some embodiments, the non-natural internucleoside linkage is a phosphorothioate internucleoside linkage.

[0548] In some embodiments, the method further comprises a third polynucleotide strand, wherein the first polynucleotide strand and second polynucleotide strand hybridize adjacent to one another on the third polynucleotide strand to position the 5′-end of the first polynucleotide strand adjacent to the 3′-end of the second polynucleotide strand, e.g., to form a nick. In some embodiments of the method, the third polynucleotide strand is continuous with the first polynucleotide strand or second polynucleotide strand. In some embodiments of the method, the third polynucleotide strand is continuous with the first polynucleotide strand and second polynucleotide strand to form a single continuous polynucleotide ligase substrate. In some embodiments, the third polynucleotide strand is RNA, DNA, or a mixture of RNA and DNA.

[0549] In some embodiments of the method, the third polynucleotide comprises a splint or bridging polynucleotide, wherein the 5′-terminal sequence of the first polynucleotide strand and the 3′-terminal sequence of the second polynucleotide strand hybridize adjacent to one another on the splint or bridging polynucleotide to position the 5′-end of the first polynucleotide strand adjacent to the 3′-end of the second polynucleotide strand. In some embodiments, the splint or bridging polynucleotide is RNA, DNA, or a mixture of RNA and DNA.

[0550] In some embodiments, one or more additional polynucleotide strands can be hybridized to the third polynucleotide strand, where an additional polynucleotide strand hybridizes adjacent to the 3′-end of the first polynucleotide strand, or adjacent to the 5′-end of the second polynucleotide strand, or two additional polynucleotide strands hybridize adjacent to the 3′-end of the first polynucleotide strand and adjacent to the 5′-end of the second polynucleotide strand to form nick(s) that can be ligated with an engineered RNA ligase. Additional polynucleotide strands can be hybridized in like manner and ligated to prepare longer polynucleotide strands.

[0551] In some embodiments, the first polynucleotide strand and/or second polynucleotide strand can have a single strand region (e.g., overhang or unpaired regions) when hybridized to the third polynucleotide strand, and a fourth polynucleotide strand added that hybridizes to the single stranded region of the first polynucleotide strand or second polynucleotide stranded, where the fourth polynucleotide strand hybridizes adjacent to the 5′-end or 3′-end of the third polynucleotide strand to form a nick, which can be then ligated with an engineered RNA ligase. In some embodiments, the fourth polynucleotide strand can have a single stranded region (e.g., overhang or unpaired regions) when hybridized to the first polynucleotide strand or second polynucleotide strand on the third polynucleotide strand, and a fifth polynucleotide strand added that hybridizes to the single stranded region of the fourth polynucleotide strand, where the fifth polynucleotide strand hybridizes adjacent to the 3′-end of the first polynucleotide strand or the 5′-end of the second polynucleotide strand to form a nick, which can be ligated with an engineered RNA ligase. Such successive additions of polynucleotide strands can be used to generate longer polynucleotide products (see, e.g., Paul et al., ACS Chem. Biol. 2023, 18, 2183-2187, incorporated by reference herein).

[0552] In some embodiments, the first polynucleotide strand is hybridized to the third polynucleotide strand to form a first double stranded fragment, and the second polynucleotide strand is hybridized to a sixth polynucleotide strand or another polynucleotide strand to form a second double stranded fragment, where the first and second double stranded fragments can base pair to form a substrate for the engineered RNA ligase. In some embodiments, the first double stranded fragment and the second double stranded fragment have complementary overhangs or complementary single stranded ends, also referred to as cohesive or sticky ends, that can base pair and form double stranded nick(s) between the first and second double stranded fragments and serve as substrate(s) for the engineered RNA ligase.

[0553] In some embodiments, the complementary ends (e.g., sticky or cohesive ends) are of sufficient length for the double stranded fragments to base pair and form suitable substrates for the engineered RNA ligase. In some embodiments, the complementary single stranded end comprises at least 1-50, 2-40, 3-35, 4-30, 5-25, 6-20, or 8-15 or more nucleotides in length. In some embodiments, the complementary single stranded end is from 1-10, 2-8, or 4-6 nucleotides in length. In some embodiments, the complementary single stranded end is 1, 2, 3, 4, 5, 6, 8, 10, 12, 14, 16, 18, 20, or more nucleotides in length.

[0554] In some embodiments, the double stranded region or complementary portion of each of the double stranded fragment is from 4-50, 6-45, 8-40, 10-35, 12-30, or 14-25 nucleotides in length. In some embodiments, the double stranded region is at least 4, 5, 6, 7, 8, 9, 10, 12, 14, 16, 18, 20, 22, 24, 26, 28, 30, 35, 40, 45, or 50 nucleotides in length.

[0555] In some embodiments of the method, the ligase substrates comprise at least 2, 3, 4, 5, or 6 or more double stranded fragments, where each double stranded fragment has a complementary end that can base pair with at least one other double stranded fragment with a complementary end to form substrates for the RNA ligase. In some embodiments, the double stranded fragments have complementary or cohesive ends, e.g., at the 5′ and 3′ ends, such that the double stranded fragments can be ligated to form concatemers. In some embodiments, where the number of double stranded fragments is 3, at least one of the double stranded fragments has complementary ends at the 5′ and 3′ ends of the fragment, where double stranded fragment base pairs with two other different double stranded fragments to form a substrate that can be ligated to a product containing the three double stranded fragments. It is to be understood that where 3 or more double stranded fragments are ligated, the complementary ends of the double stranded fragments can be designed for ligation of all of the different double stranded fragments.

[0556] In some embodiments of the method, the first polynucleotide strand, second polynucleotide strand, third polynucleotide strand, fourth polynucleotide strand, fifth polynucleotide strand, sixth polynucleotide strand and/or another polynucleotide strand comprise one or more modified nucleotides or nucleotide analogs, wherein the modified nucleotide or nucleotide analog comprises a nucleobase analog or modified nucleobase, modified nucleoside sugar residue, modified internucleoside linkage, modified 5′-end phosphate group, and/or modified 3′-end hydroxyl group.

[0557] In some embodiments, the polynucleotide substrate comprises a modified 5′-end phosphate group, wherein the modified phosphate group is a phosphate analog. In some embodiments of the method, the first polynucleotide comprises a 5′-phosphate analog. In some embodiments, the 5′-phosphate analog is a phosphorothioate, phosphoramidate, monomethylphosphate, methylphosphonate, vinyl phosphonate, or phosphonocarboxylate.

[0558] In some embodiments of the method, the polynucleotide substrate comprises one or more modified nucleoside sugar residues. In some embodiments of the method, the first polynucleotide and/or second polynucleotide comprises one or more modified nucleoside sugar residues. In some embodiments, the modified nucleoside sugar residue is a 2′-O-alkyl, a 2′-halo, a B-D-ribo LNA, or a a-L-ribo-LNA (e.g., locked nucleic acids). In some embodiments, the modified nucleoside sugar residue is, among others, a 2′-O-methyl, 2′-O-ethyl, 2′-O-propyl group, or 2′-O-methoxyethyl. In some embodiments, the modified nucleoside sugar residue is 2′-fluoro, 2′-bromo, or 2′-chloro, preferably 2′-fluoro. In some embodiments, the sugar residue is modified with a conjugate, such as a targeting moiety, for example, GalNAc or lipid moieties.

[0559] In some embodiments of the method, the polynucleotide substrate comprises one or more modified nucleotide residues having a modified nucleobase or nucleobase analog. In some embodiments of the method, the first polynucleotide and/or second polynucleotide comprises one or more modified nucleotide residues having a modified nucleobase or nucleobase analog. In some embodiments, the nucleobase analog is, among others, xanthine, hypoxanthine, inosine, 6-methyladenine, 7-methylguanine, 2,6-diaminopurine, 5-methylcytosine, 5-hydroxycytosine, 5-bromocytosine, 5-iodocytosine, 2-thiothymine, 5-fluorouracil, 5-bromouracil, 8-bromoguanine, 8-aminoguanine, or 8-aza-7-deazaguanine. In some embodiments, the nucleobase is modified with a conjugate, such as a targeting moiety, for example, GalNAc and lipid moieties.

[0560] In some embodiments of the method, the polynucleotide substrate comprises one or more modified or non-standard internucleoside linkages, i.e., internucleoside linkages other than phosphate linkages. In some embodiments, the first polynucleotide and/or second polynucleotide comprises one or more modified or non-standard internucleoside linkages. In some embodiments, the internucleoside linkage is a phosphorothioate, phosphorodithioate, phosphoacetate, phosphoramidate, methylphosphonate, or phosphonocarboxylate. In some embodiments, at least 1%, 2%, 5%, 10%, or more of the internucleoside linkages are non-standard internucleoside linkages. In some embodiments, the non-standard internucleoside linkages are present 1, 2, 3, 4 or 5 nucleotides of the 5′ and/or 3′-terminus of the polynucleotide substrates.

[0561] In some embodiments of the method, the polynucleotide substrate comprises modified 3′-hydroxyl group. In some embodiments, 3′-end of a polynucleotide substrate is attached to a matrix or surface, such as a solid matrix. In such instances, the polynucleotide substrate attached to a matrix has a ligatable 5′-end. In some embodiments, the 3′-end of a polynucleotide substrate is modified with an amine, halo, phosphate, phosphate analog, —O-alkyl, lipid moiety, or a detectable label.

[0562] In some embodiments, the polynucleotide substrate comprises C-4′ modifications, including among others, 4′-thiol-C2′ modifications, 4′/5′ aminoalkyl/C2′ modifications, C4′-Guanidino-C2′-modifications, and C4′—O-Me/C2′-modifications (see, e.g., Gangopadhyay et al., RNA Biology, 2022, 19:1, 452-467.

[0563] In some embodiments, the polynucleotide substrate comprises a 2′-modified sugar moiety on the 3′-terminal nucleotide and/or 5′-terminal nucleotide, where the 3′-terminal nucleotide on the polynucleotide acceptor strand is being ligated to the 5′-terminal nucleotide of the polynucleotide donor strand substrates.

[0564] In some embodiments, the polynucleotide substrate comprises a modified nucleoside at the 3′-terminal nucleoside of the polynucleotide acceptor strand. In some embodiments, the polynucleotide acceptor strand comprises a modified 3′-terminal nucleoside of 2′-fluoro-adenosine, 2′-fluoro-guanosine, 2′-fluoro-cytidine, 2′-fluoro-uridine, 2′-fluoro-thymidine, 2′-O-methyl-adenosine, 2′-O-methyl-guanosine, 2′-O-methyl-cytidine, 2′-O-methyl-uridine, or 2′-O-methyl-thymidine.

[0565] In some embodiments, the polynucleotides substrate comprises a modified nucleoside at the 5′-terminal nucleoside of the polynucleotide donor strand. In some embodiments, a polynucleotide donor strand comprises a modified 5′-terminal nucleoside of 2′-fluoro-adenosine, 2′-fluoro-guanosine, 2′-fluoro-cytidine, 2′-fluoro-uridine, 2′-fluoro-thymidine, 2′-O-methyl-adenosine, 2′-O-methyl-guanosine, 2′-O-methyl-cytidine, 2′-O-methyl-uridine, or 2′-O-methyl-thymidine.

[0566] In some embodiments, the polynucleotide substrate comprises a polynucleotide acceptor strand having a modified 3′-terminal nucleoside of 2′-fluoro-adenosine, 2′-fluoro-guanosine, 2′-fluoro-cytidine, 2′-fluoro-uridine, 2′-fluoro-thymidine, 2′-O-methyl-adenosine, 2′-O-methyl-guanosine, 2′-O-methyl-cytidine, 2′-O-methyl-uridine, or 2′-O-methyl-thymidine, and a polynucleotide donor strand having a modified 5′-terminal nucleoside of 2′-fluoro-adenosine, 2′-fluoro-guanosine, 2′-fluoro-cytidine, 2′-fluoro-uridine, 2′-fluoro-thymidine, 2′-O-methyl-adenosine, 2′-O-methyl-guanosine, 2′-O-methyl-cytidine, 2′-O-methyl-uridine, or 2′-O-methyl-thymidine.

[0567] In some embodiments, the polynucleotide substrate comprises a polynucleotide acceptor strand having a modified 3′-terminal nucleoside of 2′-fluoro-adenosine, 2′-fluoro-guanosine, 2′-fluoro-cytidine, 2′-fluoro-uridine, 2′-fluoro-thymidine, 2′-O-methyl-adenosine, 2′-O-methyl-guanosine, 2′-O-methyl-cytidine, 2′-O-methyl-uridine, or 2′-O-methyl-thymidine; a polynucleotide donor strand having a modified 5′-terminal nucleoside of 2′-fluoro-adenosine, 2′-fluoro-guanosine, 2′-fluoro-cytidine, 2′-fluoro-uridine, 2′-fluoro-thymidine, 2′-O-methyl-adenosine, 2′-O-methyl-guanosine, 2′-O-methyl-cytidine, 2′-O-methyl-uridine, or 2′-O-methyl-thymidine; and a polynucleotide complementary to the polynucleotide acceptor strand and polynucleotide donor strand, wherein the polynucleotide complementary to the polynucleotide acceptor strand and polynucleotide donor strand comprises a complementary 2′-fluoro or 2′-O-methyl nucleoside at the position complementary to the 3′-terminal nucleoside of the polynucleotide acceptor strand, and/or a complementary 2-fluoro or 2-O-methyl nucleoside at the position complementary to the 5′-terminal nucleoside of the polynucleotide donor strand.

[0568] In some embodiments, the method includes a nucleotide cofactor or substrate used by the RNA ligase to catalyze the joining reaction. In some embodiments, the nucleotide cofactor or substrate is ATP and/or dATP. Preferably, the nucleotide cofactor or substrate is ATP. In some embodiments, the reaction conditions for the ligation include additional components, such as Mg+2, buffer, and/or salts.

[0569] In some embodiments, the nucleotide cofactor or substrate (e.g., ATP) is present at a concentration of about 0.05-25 mM, 1-20 mM, 2-18 mM, or 5-15 mM. In some embodiments, the nucleotide cofactor or substrate is present at a concentration of about 0.5 mM, 1 mM, 2 mM, 3 mM 4 mM, 5 mM, 6 mM, 7 mM, 8 mM, 9 mM, 10 mM, 12 mM, 15 mM, 20 mM, or 25 mM.

[0570] In some embodiments, the reaction conditions also include a ligation enhancing reagent, including, among others, DMSO, betaine, polyethylene glycol (e.g., PEG 6000, PEG 8000, etc.), bovine serum albumin, Ficoll, and dextran (e.g., Dextran 6000).

[0571] In some embodiments, ligation reaction is carried out at a suitable temperature and reaction time period. In some embodiments, the ligation reaction temperature is from about 2° C. to about 60° C. In some embodiments, the ligation reaction temperature is from 4° C. to 55° C., 4° C. to 50° C., 4° C. to 45° C., or 10° C. to 40° C. In some embodiments, the ligation reaction temperature is 2° C., 5° C., 10° C., 15° C., 20° C., 25° C., 30° C., 37° C., 40° C., 45° C., 50° C., 55° C., or 60° C. In some embodiments, the ligation reaction temperature can use different temperatures, for example a temperature at which stable hybrids are formed between polynucleotide substrate(s) followed by a higher temperature to promote completion of ligation reaction.

[0572] In some embodiments, the ligation reaction time can be a sufficient time for ligation of polynucleotide substrate(s). In some embodiments, the ligation reaction time is from 0.5-72 hr or longer. In some embodiments, the ligation reaction time is 1-72 hr, 2-48 hr, or 2-24 hr. In some embodiments, the ligation reaction time is 0.5, 1, 2, 4, 5, 12, 24, 48, or 72 hr or longer.

[0573] In some embodiments, the ligase reaction is carried out at a suitable pH. In some embodiments, the pH of the ligase reaction is about pH 5-9, about pH 5.5-8.5, about pH 6-8, or about pH 6.5-7.5. In some embodiments, the pH of the ligase reaction is about pH 5, about pH 5.5, about pH 6, about pH 6.5, about pH 7, about pH 7.5, about pH 8, about pH 8.5 or about pH 9.

[0574] In some embodiments, the RNA ligase substrate concentration is at about 0.01-1 mM, 0.05-0.9 mM, 0.1-0.8 mM, 0.2-0.7 mM, or 0.3 mM-0.6 mM. In some embodiments, the RNA ligase substrate is at about 0.01 mM, 0.05 mM, 0.1 mM, 0.2 mM, 0.3 mM, 0.4 mM, 0.5 mM, 0.6 mM, 0.7 mM, 0.8 mM, 0.9 mM or 1 mM. In some embodiments, the RNA ligase substrate concentration is at about 1-10 mM, 2-8 mM, or 4-6 mM. In some embodiments, the engineered RNA ligase exhibits increased product yield at about 1 mM, 2 mM, 3 mM, 4 mM, 5 mM, 6 mM, 7 mM, 8 mM, 9 mM, or 10 mM.

[0575] In some embodiments, the polynucleotide substrate is bound to a support, and the ligation reaction carried out with the engineered RNA ligase to ligate a polynucleotide substrate to the support bound polynucleotide, or ligate one or more polynucleotide substrates hybridized to the support-bound polynucleotide substrate.

[0576] In some embodiments, the ligation reaction is carried out with an engineered RNA ligase bound to a support. In some embodiments, the polynucleotide substrates in solution can be contacted with the support-bound RNA ligase to ligate the polynucleotide substrates. In some embodiments, the polynucleotide substrates in solution are passed through a bed of support-bound engineered RNA ligase until sufficient ligated product has formed.

[0577] In some embodiments, the ligase reaction further includes a nucleotide substrate regeneration system to regenerate co-factor substrate ATP (or dATP). In some embodiments, the ATP recycling or regeneration system includes a nucleoside monophosphate kinase for converting AMP to ADP in presence of a phosphate donor. Various nucleoside monophosphate kinase can be used for the conversion of AMP to ADP, including homologs of nucleoside monophosphate kinases. In some embodiments, more than one nucleoside monophosphate kinase can be used in the regeneration system. In some embodiments, the nucleoside monophosphate kinase is an adenosine monophosphate kinase (e.g., adenylate kinase), cytidine monophosphate (CMP) kinase, uridine monophosphate (UMP) kinase, or guanylate-monophosphate (GMP) kinase.

[0578] In some embodiments, a nucleoside monophosphate kinase useful in the enzymatic reactions is a cytidine monophosphate kinases. Various suitable cytidine monophosphate kinases are known in the art. These include homologs of cytidine monophosphate kinases. In some embodiments, a cytidine monophosphate kinase useful in the enzymatic reactions includes, among others, the cytidine monophosphate kinase of Thermus thermophilus (Q5SL35), Pyrococcus furiosus (Q8U2L4), Pseudomonas putida (AFO48857.1), Escherichia coli K-12 MG1655 (POA610), Clostridium acetobutylicum (Q97108), Halobacterium salinarum (Q9HPA5) Bacillus acidicola (WP_066270173), Acetobacter aceti (WP_010667744), Acidithiobacillus thiooxidans (WP_024892761.1), Acidithiobacillus ferrooxidans (WP_064220349.1), Metallosphaera sedula (WP_011921264.1), Amphibacillus xylanus (WP_015009966.1) Thioalkalivibrio denitrificans (WP_077278466.1), Vibrio psychroerythus (Q482G4), Pseudoalteromonas haloplanktis (Q3ILA1), Psychrobacter arcticus (Q4FRL5), Psychromonas ingrahamii (A1SZ01), Pseudomonas syringae (xQ4ZQ97) and Halobacterium salinarum (Q9HPA5).

[0579] In some embodiments, a nucleoside monophosphate kinase useful in the enzymatic reactions is a uridine monophosphate kinase. Various suitable uridine monophosphate kinases are known in the art. These include homologs of uridine monophosphate kinases. In some embodiments, a uridine monophosphate kinase useful in the enzymatic reactions includes, among others, the uridine monophosphate kinase of Pyrococcus furiosus (Q8U122), Thermus thermophilus (P43891), Pseudomonas putida (I7BW46), Escherichia coli K-12 MG1655 (POATE9), Aspergillus niger (A2R195), Saccharomyces cerevisiae (P15700), Clostridium acetobutylicum (Q97164) ATCC 824 PyrH Halobacterium salinarum (Q9HNN8), Picrophilus torridus (WP_048059653), Metallosphaera sedula (WP_012021705), Thermoplasma acidophilum (WP_010900913), Sulfolobus solfataricus (WP_009992427), Acetobacter aceti (WP_042788648), Thioalkalivibrio sp. HK1 (WP_081759172.1), Amphibacillus xylanus (WP_015010200.1), Vibrio psychroerythus (Q485G8), Pseudoalteromonas haloplanktis (Q3IIX6), Psychrobacter arcticus (Q4FRH5), Psychromonas ingrahamii (ABM04676.1), Pseudomonas syringae (Q4ZWS6), and Halobacterium salinarum (Q9HNN8).

[0580] In some embodiments, the nucleoside monophosphate kinase useful in the enzymatic reactions is a guanosine monophosphate kinase (guanylate kinase). Various suitable guanylate kinases are known in the art. These include homologs of guanylate kinases. In some embodiments, a guanylate kinase useful in the enzymatic reactions includes, among others, the guanylate kinase of Thermotoga maritima (Q9X215), Thermus thermophilus (Q5SI18), Pseudomonas putida (I7C087), Escherichia coli K-12 (P60546), Aspergillus niger (A2QPV2), Saccharomyces cerevisiae (P15454), Clostridium acetobutylicum (Q97IDO), Acidithiobacillus ferrooxidans (WP_064219869.1), Acidithiobacillus thiooxidans (WP_010637919.1), Bacillus acidicola (WP_066264774.1), Acetobacter aceti (WP_018308252.1), Amphibacillus xylanus (WP_015010280.1), Thioalkalivibrio sulfidiphilus (WP_018953989.1), Vibrio psychroerythus (Q47UB3), Pseudoalteromonas haloplanktis (Q3IJH8), Psychrobacter arcticus (Q4FQY7), Psychromonas ingrahamii (A1TOP1), and Pseudomonas syringae (Q4ZZY8).

[0581] In some embodiments, the nucleoside monophosphate kinase useful in the enzymatic reactions is an adenosine monophosphate kinase (adenylate kinase). Various suitable adenylate kinases are known in the art. These include homologs of adenylate kinases. In some embodiments, the adenylate kinase is a bacterial, fungal, plant, or animal adenylate kinase. In some embodiments, an adenylate kinase useful in the enzymatic reactions includes, among others, adenylate kinases of Thermus thermophilus (Q72125), Pyrococcus furiosus (Q8U207), Pseudomonas putida (17CAA9), Escherichia coli K-12 W3110 (P69441), Aspergillus niger CBS 513.88 (A2QPN9), Saccharomyces cerevisiae (P07170), Clostridium acetobutylicum (Q97E39), Halobacterium salinarum (Q9HPAT), Acidithiobacillus thiooxidans (WP_024894015.1), Acidithiobacillus ferrooxidans (WP_064218420.1), Bacillus acidicola (WP_066267988.1), Sulfolobus solfataricus (WP_009991241.1), Saccharomyces cerevisiae (P07170), Thermotoga neapolitana (Q8GGL2), Escherichia coli (P69441) and Geobacillus stearothermophilus (WP_049624206.1). In some embodiments, the adenylate kinase is an engineered adenylate kinase described in International patent application No. PCT/US2024/051084, filed Oct. 11, 2024, incorporated herein by reference.

[0582] In some embodiments, the ATP regeneration system includes at least an enzyme for the conversion of ADP to ATP in presence of a phosphate donor. In some embodiments, the ATP regeneration system includes, among others, an acetate kinase, pyruvate kinase, creatine kinase, or polyphosphate kinase (see, e.g., Endo et al., Adv. Synth. Catal., 2002, 343:521-526; Andexer et al., Chem Bio Chem., 2015, 16:380-386). In the ATP regeneration system, the phosphate donor for the conversion of ADP to ATP is selected based on the ATP regenerating enzyme employed. By way of example and not limitation, if acetate kinase enzyme is used for conversion of ADP to ATP, the phosphate donor is acetyl-phosphate. If pyruvate kinase is used for the conversion of ADP to ATP, the phosphate donor is phosphoenolpyruvate. If creatine kinase is used for the conversion of ADP to ATP, the phosphate donor is creatine phosphate. If polyphosphate kinase is used for the conversion of ADP to ATP, the phosphate donor is inorganic polyphosphate.

[0583] Accordingly, in some embodiments, the ATP regenerating system includes pyruvate kinase and phosphoenolpyruvate. In some embodiments, the ATP regenerating system includes creatine kinase and creatine phosphate. In some embodiments, the ATP regenerating system includes polyphosphate kinase and inorganic polyphosphate. In some embodiments, the ATP regenerating system includes acetate kinase and acetyl phosphate. In some embodiments, the acetate kinase is an acetate kinase of Escherichia coli str. K-12 substr. MG1655 (NP_416799.1), Corynebacterium jeikeium K411 (WP_011272972.1), Lactococcus cremoris subsp. cremoris KW2 (WP_011835968.1), Lactococcus lactis (WP_004254593.1), Marinitoga sp. 38H-ov (WP_165147355.1), Thermotoga sp. KOL6 (WP_101510533.1), Thermosipho melaniensis (WP_012057479.1), Thermotoga sp. RQ7 (WP_041844042.1), and Thermosipho africanus (WP_004102380.1). In some embodiments, the acetate kinase is an engineered acetate kinase described in International patent application No. PCT/US2024/051118, filed Oct. 11, 2024, incorporated by reference herein.

[0584] In some embodiments, the engineered RNA ligase is used to ligate nicks or related nick structures (see, e.g., Cheng et al., Royal Soc Chem Adv., 2019, 9:8620-8627). In some embodiments, the engineered RNA ligase is used to synthesize RNAs from shorter oligonucleotides, for example by use of splint nucleic acids (see, e.g., Stark et al., RNA, 2006, 12:2014-2019). In some embodiments, the engineered RNA ligase is used to ligate modified oligonucleotides, such as provided in the Examples. Other examples of modified oligonucleotide products that can be synthesized using short oligonucleotide substrates, include, among others, shRNAs or siRNAs described in patent publications WO22104366, WO22029209, WO22031847, WO20226960, US2022072024, US2021238606, US11286488, US2017305956, WO22212153, WO22192519, WO22125490, WO22072447, WO21257568, WO21102373, WO21072395, WO21022108, US2022079971, US11034957, US2021332365, US11015201, US10995336, US11091759, US10889813, US10130651, US10513703, WO19232255, WO21108640, WO22147304, and WO21138537.

### Method for Predicting Activity Profile for an RNA Ligase and Ligase Substrate

[0585] In another aspect, the present disclosure provides a method of assessing a ligation activity profile for a RNA ligase, comprising obtaining an RNA ligase enzyme and a RNA ligase substrate ligation activity data for multiple reaction variables, performing or applying Gaussian Process Regression (GPR) on the ligation activity data for the multiple reaction variables, and out putting the predicted activity distribution for the multiple reaction variables. The method further comprises predicting the optimal ligation condition for the RNA ligase and RNA ligase substrate. In some embodiments, the output comprises a three dimensional ligase activity map.

[0586] In some embodiments, the multiple reaction variables include, among others, cofactor nucleotide (e.g., ATP) concentration, divalent metal concentration (e.g., MgCl₂), ligase substrate concentration, 5-terminal nucleotide at the ligation junction (i.e., 5′-nucleotide of the nick), 3′-terminal nucleotide at the ligation junction (3′-nucleotide of the nick), 5′-terminal region sequence of the ligation junction, 3′-terminal sequence of the ligation junction, and ligation temperature. In some embodiments, the multiple reaction variable further include type of modification of the 3′-terminal nucleotide of the ligation junction and/or modification of the 5′-terminal nucleotide of the ligation junction.

[0587] In some embodiments, the Gaussian Process Regression analysis is carried out for each different RNA ligase being examined for a defined ligase substrate. In some embodiments, a Gaussian Process Regression analysis is developed for each RNA ligase for a set of different ligase substrates.

### Kits

[0588] In a further aspect, the present disclosure provides a kit comprising an engineered RNA ligase described herein. In some embodiments, the kit further comprises one or more of a buffer, a nucleotide substrate (e.g., ATP or dATP), and/or one or more polynucleotide substrates. In some embodiments, the kit further comprises an additive or ligation enhancing agent, including but not limited to, one or more of DMSO, betaine, polyethylene glycol (e.g., PEG 6000, PEG 8000, etc.), bovine serum albumin, Ficoll, and dextran (e.g., Dextran 6000).

### EXAMPLES

[0589] The following Examples, including experiments and results achieved, are provided for illustrative purposes only and are not to be construed as limiting the present invention.

[0590] In the experimental disclosure below, the following abbreviations where relevant apply: ppm (parts per million); M (molar); mM (millimolar), uM and μM (micromolar); nM (nanomolar); mol (moles); gm and g (gram); mg (milligrams); ug and μg (micrograms); L and 1 (liter); ml and mL (milliliter); ul, uL, μl, and μL (microliter); cm (centimeters); mm (millimeters); um and μm (micrometers); sec. (seconds); min(s) (minute(s)); h(s) and hr(s) (hour(s)); U (units); OD (optical density); MW (molecular weight); rpm (rotations per minute); rcf (relative centrifugal force); psi and PSI (pounds per square inch); ° C. (degrees Celsius); RT and rt (room temperature); NGS (next-generation sequencing); ds (double stranded); ss (single stranded); CDS (coding sequence); DNA (deoxyribonucleic acid); RNA (ribonucleic acid); E. coli W3110 (commonly used laboratory E. coli strain, available from the Coli Genetic Stock Center [CGSC], New Haven, CT); HTP (high throughput); HPLC (high pressure liquid chromatography); FPLC (fast protein liquid chromatography); ddH₂O (double distilled water); PBS (phosphate buffered saline); BSA (bovine serum albumin); DTT (dithiothreitol); CAM (chloramphenicol); CAT (chloramphenicol acetyltransferase); IPTG (isopropyl β-D-1-thiogalactopyranoside); FIOPC or FIOP (fold improvements over positive control or parent); LB (Luria-Bertani); TB (Terrific-Broth).

### Example 1

### E. coli Expression Hosts Containing Recombinant RNA Ligase 2 (Rnl2) Genes

[0591] The initial RNA ligase 2 enzyme used to produce the variants of the present invention was SEQ ID NO: 2 cloned into a pJV110900 expression vector (see, e.g., U.S. Pat. No. 10,184,117) operatively linked to the lac promoter under control of the lacl repressor. The expression vector also contains the P15a origin of replication and the chloramphenicol resistance gene. The resulting plasmids were transformed into E. coli W3110, using standard methods known in the art. The transformants were isolated by subjecting the cells to chloramphenicol selection, as known in the art (see e.g., U.S. Pat. No. 8,383,346 and International patent publication WO2010/144103).

### Example 2

### Preparation of RNA ligase (Rnl2)-Containing Wet Cell Pellets

[0592] E. coli cells containing recombinant RNA ligase 2-encoding genes from monoclonal colonies were inoculated into 180 uL LB containing 1% glucose and 30 μg/mL chloramphenicol (CAM) in the wells of 96-well, shallow-well microtiter plates. The plates were sealed with O₂-permeable seals, and cultures were grown overnight at 30° C., 200 rpm, and 85% humidity. Then 10 μL of each of the cell cultures were transferred into the wells of 96-well, deep-well plates containing 390 mL TB and 30 μg/mL CAM. The deep-well plates were sealed with O₂-permeable seals and incubated at 30° C., 250 rpm, and 85% humidity until OD₆₀₀ 0.6-0.8 was reached. The cell cultures were then induced by IPTG to a final concentration of 1 mM and incubated overnight under the same conditions as originally used. The cells were then pelleted using centrifugation at 4,000 rpm for 10 min. The supernatants were discarded, and the pellets were frozen at −80° C. prior to lysis.

### Example 3

### Shake Flask Expression and Purification of RNA Ligase 2 (Rnl2)

### Shake Flask Expression

[0593] Selected variant cultures grown as described above were plated onto LB agar plates with 1% glucose and 30 μg/mL chloramphenicol and grown overnight at 37° C. A single colony from each culture was transferred to 5 mL LB broth with 1% glucose and 30 μg/ml chloramphenicol. The cultures were grown for 20 h at 30° C. and 250 rpm, and then 30 μL of each culture was used to inoculate 160 mL of Terrific Broth containing 0.075% (w/v) glucose, 0.03% (w/v) lactose, and 30 μg/ml of chloramphenicol in a 1 L baffled shake flask. The cultures were incubated for 20 h at 30° C. and 250 rpm. Then the cultures were centrifuged at 4000 rpm for 10 min. The culture supernatant was discarded and the pellets were resuspended in 30 mL lysis buffer comprised of 50 mM Tris-HCl at pH 7.5. This cell suspension was chilled in an ice bath and lysed using a Microfluidizer cell disruptor (Microfluidics M-110L). The crude lysate was pelleted by centrifugation (11,000 rpm for 60 min at 4° C.), and the supernatant was then filtered through a 0.2 μm PES membrane to further clarify the lysate.

Purification of RNA Ligase from Shake Flask Lysates

[0594] Additional NaCl and imidazole were added to the clarified RNA ligase lysates to adjust the concentrations to 500 mM NaCl and 20 mM imidazole. Lysates were then purified using an AKTA Pure purification system and a 5 ml HisTrap FF column (GE Healthcare) using the AC Step HiF setting (the run parameters are provided below in Table 3.1). The wash buffer comprised 50 mM Tris-HCl pH 8, 500 mM NaCl, 20 mM imidazole, and the elution buffer comprised 50 mM Tris-HCl, pH 8, 500 mM NaCl, 250 mM imidazole.

TABLE 3.1
Purification Parameters

| Parameter | Volume | |
|---|---|---|
| Column volume | 5 | mL |
| Flow rate | 5 | mL/min |
| Pressure limit | 0.3 | MPa |
| Sample volume | 45 | ml |
| Equilibration volume | 5 column volumes (CV) = 25 mL | |
| Wash Unbound volume | 15 CV = 75 mL | |
| Elution | Isocratic (step) | |
| Elution volume | 5 CV = 25 mL | |
| Fraction volume | 1.5 | mL |

| | |
|---|---|
| RE-equilibration volume | 5 CV = 25 mL |

[0595] The first 2 elution fractions with over 1 mg/mL protein were identified by absorption at 280 nm on a NanoDrop Microvolume Spectrophotometer and dialyzed overnight in dialysis buffer comprised of 10 mM Tris-HCl pH 7.5, 50 mM KCl, 50% glycerol in a 3.5 K Slide-A-Lyzer™ dialysis cassette (Thermo Fisher) for buffer exchange. Concentrations of purified and dialyzed RNA polymerase samples were measured by absorption at 280 nm.

### Example 4

### Capillary Electrophoresis (CE) Analysis of Oligonucleotides

### Sample Preparation for Reaction Analysis Using CE

[0596] For analysis of the reaction samples, capillary electrophoresis was performed using an ABI 3500xl Genetic Analyzer (ThermoFisher). Reactions were quenched by the addition of water and EDTA such that the final concentration of EDTA in the quenched reaction was 20 mM. Quenched reactions were diluted in water to approximately 1.25 nM oligonucleotide, and a 2-uL aliquot of this solution was transferred to a new 96-well MicroAmp Optical PCR plate or 384-well MicroAmp Optical PCR plate containing 18 uL Hi-Di™ Formamide (ThermoFisher) containing an appropriate size standard (LIZ or Alexa633). The ABI3500xl was configured with POP6 polymer, 50 cm capillaries, and a 55° C. oven temperature. Pre-run settings were 18 KV for 50 sec. Injection was 10 KV for 2 sec, and the run settings were 19 KV for 620 sec. FAM-labeled oligo substrates and products were identified by their sizes relative to the sizing ladder.

### List of Oligonucleotide Substrates and Products

[0597] The oligonucleotides in Table 4.1 were used to assay RNA ligase activity. Each of the oligonucleotides are in the 5′-3′ direction, and the oligonucleotide residues are either deoxyribonucleic acid residues or their derivatives. FAM is fluorescein amidite. The oligonucleotides in Table 4.1 have the following features. Sense strand fragment 1 (AS017) has a 2′-methoxy group at residue 5 and 6, a 5′-OH terminus, and a 3′-OH terminus; sense strand fragment 2 (AS023) has a 5′-phosphate terminus and a 3′-FAM terminus; sense strand fragment 3 (AS032) has a 5′-phosphate terminus and a 3′-OH terminus; sense strand fragment 4 has a 5′-phosphate terminus, a 3′-FAM terminus, and a 2′-methoxy group at residue 5 and 6. Sense strand fragment 5 (AS047) has a 2′-methoxy group at residue 5 and 6, a 5′-OH terminus, and a 3′-OH terminus; antisense strand fragment 2 (AS090) has a 5′-phosphate terminus and a 3′-FAM terminus; antisense strand fragment 2 (AS092) has a 5′-phosphate terminus; antisense strand fragment 4 (AS040) has a 2′-methoxy group at residue 8 and a 2′-fluoro group at residue 9. For Reaction 1, sense strand fragment 2 (AS023) and 3 (AS032) were first mixed at a ratio of 1:100, and then mixed with the sense strand fragment 1 (AS017) and the antisense strand fragment 1 (AS022) at equal molar ratio at 3.2 mM stock concentration. For Reaction 2, antisense strand fragment 2 (AS090) and antisense strand fragment 3 (AS092) were mixed at a ratio of 1:100, and the sense strand fragment 2 (AS023) and 3 (AS032) were mixed at a ratio of 1:100, and then these mixtures were further mixed with the sense strand fragment 5 (AS047) and antisense strand fragment 4 (AS040) at equal molar ratio at 2.5 mM stock concentration. For Reaction 3, antisense strand fragment 6 (AS103) and antisense strand fragment 7 (AS104) were mixed at a ratio of 1:100, and the sense strand fragment 7 (AS100) and 8 (AS101) were mixed at a ratio of 1:100, and then these mixtures were further mixed with the sense strand fragment 6 (AS099) and antisense strand fragment 5 (AS102) at equal molar ratio at 2.5 mM stock concentration. For Reaction 4, antisense strand fragment 9 (AS109) and antisense strand fragment 10 (AS118) were mixed at a ratio of 1:100, and the sense strand fragment 9 (AS108) and 10 (AS117) were mixed at a ratio of 1:100, and then these mixtures were further mixed with the sense strand fragment 6 (AS099) and antisense strand fragment 8 (AS110) at equal molar ratio at 2.5 mM stock concentration. For Reaction 3, antisense strand fragment 6 (AS103) and antisense strand fragment 7 (AS104) were mixed at a ratio of 1:100, and the sense strand fragment 7 (AS100) and 8 (AS101) were mixed at a ratio of 1:100, and then these mixtures were further mixed with the sense strand fragment 6 (AS099) and antisense strand fragment 5 (AS102) at equal molar ratio at 2.5 mM stock concentration. For Reaction 4, antisense strand fragment 9 (AS109) and antisense strand fragment 10 (AS118) were mixed at a ratio of 1:100, and the sense strand fragment 9 (AS108) and 10 (AS117) were mixed at a ratio of 1:100, and then these mixtures were further mixed with the sense strand fragment 6 (AS099) and antisense strand fragment 8 (AS110) at equal molar ratio at 2.5 mM stock concentration. For Reaction 5, antisense strand fragment 12 (AS116) and antisense strand fragment 13 (AS114) were mixed at a ratio of 1:100, and the sense strand fragment 12 (AS115) and 13 (AS112) were mixed at a ratio of 1:100, and then these mixtures were further mixed with the sense strand fragment 11 (AS111) and antisense strand fragment 11 (AS113) at equal molar ratio at 2.5 mM stock concentration. For Reaction 6, antisense strand fragment 15 (AS124) and antisense strand fragment 16 (AS121) were mixed at a ratio of 1:100, and the sense strand fragment 15 (AS123) and 16 (AS120) were mixed at a ratio of 1:100, and then these mixtures were further mixed with the sense strand fragment 14 (AS119) and antisense strand fragment 14 (AS122) at equal molar ratio at 2.5 mM stock concentration. For Reaction 7, antisense strand fragment 18 (AS137) and antisense strand fragment 19 (AS135) were mixed at a ratio of 1:100, and the sense strand fragment 18 (AS136) and 19 (AS131) were mixed at a ratio of 1:100, and then these mixtures were further mixed with the sense strand fragment 17 (AS132) and antisense strand fragment 17 (AS133) and antisense strand fragment 20 (AS134) at equal molar ratio at 2.5 mM stock concentration.

TABLE 4.1
RNA ligase Oligonucleotide Substrates

| Ligase Substrate Name | Sequence |
|---|---|
| Sense strand fragment 1 (AS017) | 5′-CTAGmAmC |
| Sense strand fragment 2 (AS023) | 5′-p-CTGTTTTGCTTTTGT-3′FAM (SEQ ID NO: 1471) |
| Sense strand fragment 3 (AS032) | 5′-p-CTGTTTTGCTTTTGT (SEQ ID NO: 1472) |
| Antisense strand fragment 1 (AS022) | ACAAAAGCAAAACAGGTCTAGAA (SEQ ID NO: 1473) |
| Sense strand fragment 4 (AS046) | 5′-CTAGmAmCCTGTTTTGCTTTTGT-3′FAM (SEQ ID NO: |
| | 1474) |
| Sense strand fragment 5 (AS047) | 5′-CTAGmAmA |
| Antisense strand fragment 2 (AS090) | 5′-p-AAACAGTTCTAG-3′FAM (SEQ ID NO: 1475) |
| Antisense strand fragment 3 (AS092) | 5′-p-AAACAGTTCTAG (SEQ ID NO: 1476) |
| Antisense strand fragment 4 (AS040) | 5′-ACAAAAGfCmA |
| Sense strand fragment 6 (AS099) | 5′-mCmUmAmGmAmA |
| Sense strand fragment 7 (AS100) | 5′-p-mCmUmGmUmUmGmUmAmAmCmCmAmAmGmA-3′- |
| | FAM |
| Sense strand fragment 8 (AS101) | 5′-p-mCmUmGmUmUmGmUmAmAmCmCmAmAmGmA |
| Antisense strand fragment 5 (AS102) | 5′-mUmCmUmUmGmG |
| Antisense strand fragment 6 (AS103) | 5′-p- |
| | mUmUmAmCmAmAmCmAmGmUmUmCmUmAmGmAmA- |
| | 3′-FAM |
| Antisense strand fragment 7 (AS104) | 5′-p- |
| | mUmUmAmCmAmAmCmAmGmUmUmCmUmAmGmAmA |
| Sense strand fragment 9 (AS108) | 5′-p-fCmUfGmUfUmGmUmAmAmCmCmAmAmGmA-3′- |
| | FAM |
| Sense strand fragment 10 (AS117) | 5′-p-fCmUfGmUfUmGmUmAmAmCmCmAmAmGmA |
| Antisense strand fragment 8 (AS110) | 5′-mUfCmUmUmGfG |
| Antisense strand fragment 9 (AS109) | 5′-p-mUmUfAmCmAfAmCfAmGfUmUfCmUmAmGmAmA- |
| | 3′-FAM |
| Antisense strand fragment 10 (AS118) | 5′-p-mUmUfAmCmAfAmCfAmGfUmUfCmUmAmGmAmA |
| Sense strand fragment 11 (AS111) | 5′-mUmGmGmGmAmU |
| Sense strand fragment 12 (AS115) | 5′-p-fUmUfCfAfGmUfCmUfCmAmUmCmUmUmA-3′-FAM |
| Sense strand fragment 13 (AS112) | 5′-p-fUmUfCfAfGmUfCmUfCmAmUmCmUmUmA |
| Antisense strand fragment 11 (AS113) | 5′-mUfAfAfGmAfUmG |
| Antisense strand fragment 12 (AS116) | 5′-p-fAmGfAmCmUmGfAmAfAmUmCmCmCmAmUmC-3′- |
| | FAM |
| Antisense strand fragment 13 (AS114) | 5′-p-fAmGfAmCmUmGfAmAfAmUmCmCmCmAmUmC |
| Sense strand fragment 14 (AS119) | 5′-mCmAmGmAmAmA |
| Sense strand fragment 15 (AS123) | 5′-p-fGmAfGmUfCmUmGmGmAmAmAmUmAmUmA-3′- |
| | FAM |
| Sense strand fragment 16 (AS120) | 5′-p-fGmAfGmUfCmUmGmGmAmAmAmUmAmUmA |
| Antisense strand fragment 14 (AS122) | 5′-mUfAmUmAmUfU |
| Antisense strand fragment 15 (AS124) | 5′-p-mUfCfCmAmGfAmCfUmCfUmUfUmCfUmGmGmU-3′- |
| | FAM |
| Antisense strand fragment 16 (AS121) | 5′-p-mUfCfCmAmGfAmCfUmCfUmUfUmCfUmGmGmU |
| Sense strand fragment 17 (AS132) | 5′-p-fUmGmUmAmAmCmCmAmAmGmA |
| Sense strand fragment 18 (AS136) | 5′-FAM-mCmUmAmGmAmAfCmUfGmU |
| Sense strand fragment 19 (AS131) | 5′-mCmUmAmGmAmAfCmUfGmU |
| Antisense strand fragment 17 (AS133) | 5′-p-fUmUfCmUmAmGmAmA |
| Antisense strand fragment 18 (AS137) | 5′-FAM-mUfCmUmUmGfGmU |
| Antisense strand fragment 19 (AS135) | 5′-mUfCmUmUmGfGmU |
| Antisense strand fragment 20 (AS134) | 5′-p-mUfAmCmAfAmCfAmG |

### Example 5

### Improvements Over SEQ ID NO: 2 in RNA Ligase Activity

[0598] The RNA ligase of SEQ ID NO: 2 was selected as the parent enzyme in an RNA ligation assay. Libraries of engineered genes were produced using known techniques (e.g., saturation mutagenesis, recombination of previously identified beneficial mutations). The polypeptides encoded by each gene were produced in high throughput (HTP) as described in Example 1, and the cell paste was generated as described in Example 2. To prepare lysate, 300 ul of 0.1 mg/mL lysozyme in 50 mM Tris-HCl buffer at pH 7.5 was added to the cell paste of each sample. After thorough resuspension at room temperature on a plate mixer for 30 min, the cells were incubated at 40° C. for 1 hour in a PCR thermocycler. The samples were then centrifuged for 10 min at 4000 rpm and 4° C., and the clear supernatants were collected for ligation reactions.

[0599] The lysate was screened in a 100 nanoliter reaction that comprised 50 mM Tris-HCl buffer at pH 7.5, 2 mM MgCl₂, 1 mM dithiothreitol (DTT), 0.4 mM adenosine triphosphate (ATP), and 1.6 mM of an equimolar mixture of the oligonucleotide fragments compromising Reaction 1. Nanoliter scale liquid transfers were carried out by Echo Acoustic Liquid Handler. The reactions were mixed by vortex, incubated for 2 hr at 37° C. in a PCR thermocycler, and quenched and diluted for analytical analysis by CE as described in Example 4. Using the peak area from CE analytical method, the % conversion for each sample was calculated as shown below:

$$\% conversion = \frac{area under the curve for the product peak}{\begin{matrix}Total area under the curve for \\ all products and remaining fragments\end{matrix}} * 100$$

[0600] Activity relative to SEQ ID NO: 2 (Activity FIOP) was calculated as the % conversion by the variant over the % conversion by SEQ ID NO: 2. The result is shown in Table 5.1.

TABLE 5.1
Activities of Variants Relative to SEQ ID NO: 2

| | | Activity |
|---|---|---|
| | Amino Acid | FIOP |
| SEQ ID | Differences | Relative to |
| NO: | (Relative to | SEQ ID |
| (nt/aa) | SEQ ID NO: 2) | NO: 2 |
| 3/4 | K256A | ++++ |
| 5/6 | E258P | ++++ |
| 7/8 | K254L | ++++ |
| 9/10 | K251S | ++++ |
| 11/12 | K248T | ++++ |
| 13/14 | D37M | ++++ |
| 15/16 | F54L | ++++ |
| 17/18 | E258M | ++++ |
| 19/20 | T232S | ++++ |
| 21/22 | Y15M | +++ |
| 23/24 | P71T | +++ |
| 25/26 | K26L | +++ |
| 27/28 | T232M | +++ |
| 29/30 | G116L | +++ |
| 31/32 | M38S | +++ |
| 33/34 | K251L | +++ |
| 35/36 | N25S | +++ |
| 37/38 | S106G/K251F | +++ |
| 39/40 | T52C | +++ |
| 41/42 | G33L | +++ |
| 43/44 | K251G | +++ |
| 45/46 | K256S | +++ |
| 47/48 | A247L | ++ |
| 49/50 | D37L/S249R/V266L/M316L/T330R/Q334R/N335H | ++ |
| 51/52 | N21S | ++ |
| 53/54 | G11N/D37L/S249L/V266L/M316L | ++ |
| 55/56 | E261P | ++ |
| 57/58 | G11N/V266L/M316L | ++ |
| 59/60 | G11N/K248T/S249R/V266L | ++ |
| 61/62 | I331D | ++ |
| 63/64 | G11N/K248T/S249L | ++ |
| 65/66 | D37F | ++ |
| 67/68 | A255V | ++ |
| 69/70 | D37L/S249R/V266L/M316L/Q334R | ++ |
| 71/72 | M38L | ++ |
| 73/74 | V266L | ++ |
| 75/76 | T232R | ++ |
| 77/78 | G11N/D37L/T156Q/S249R/N335H | ++ |
| 79/80 | D37L/T156Q/K248T/S249R/V266L/Q334R | ++ |
| 81/82 | Q334E | ++ |
| 83/84 | T156Q | ++ |
| 85/86 | G11N/V266L/M316L/Q334R | ++ |
| 87/88 | G11N/H39P/T156Q/K248T/M316L | ++ |
| 89/90 | G11N/S249R | ++ |
| 91/92 | D37L/T156Q | ++ |
| 93/94 | V107M/K251R | ++ |
| 95/96 | T156Q/S249R/M316L | ++ |
| 97/98 | D37L/T156Q/M316L | ++ |
| 99/100 | G11N/D37L/T156Q/S249L | ++ |
| 101/102 | G11N/D37L/Q334R | ++ |
| 103/104 | T194A | ++ |
| 105/106 | D37L/M316L | ++ |
| 107/108 | Q175A | ++ |
| 109/110 | G11N/T156Q/S249L/M316L | ++ |
| 111/112 | G11N/D37L | ++ |
| 113/114 | P252Q | ++ |
| 115/116 | D37L | ++ |
| 117/118 | M12F | ++ |
| 119/120 | G11N/S249L | ++ |
| 121/122 | D37L/V266L | ++ |
| 123/124 | G11N/D37L/T156Q/V266L | ++ |
| 125/126 | G11N/D37L/T156Q/K248T/V266L | ++ |
| 127/128 | D37L/I236L/K248T/S249R | ++ |
| 129/130 | D37L/T156Q/K248T/S249L | ++ |
| 131/132 | G11N/V266L/T330R/N335H | ++ |
| 133/134 | S249L | ++ |
| 135/136 | G11N/T156Q/K248T/S249R/M316L | ++ |
| 137/138 | D37L/S249L/M316L | ++ |
| 139/140 | G11N | ++ |
| 141/142 | G11N/T156Q | ++ |
| 143/144 | G11N/D37L/S249L | ++ |
| 145/146 | T330R | ++ |
| 147/148 | M316L | ++ |
| 149/150 | T156Q/S249L/V266L/N335H | ++ |
| 151/152 | S249L/V266L/M316L/T330R/N335H | + |
| 153/154 | G11N/T156Q/S249L | + |
| 155/156 | S249R | + |
| 157/158 | V266L/M316L/T330R/Q334R/N335H | + |
| 159/160 | K254V | + |
| 161/162 | T156Q/K248T/S249L/M316L/Q334R | + |
| 163/164 | G33A | + |
| 165/166 | D37L/T156Q/K248T/S249R/M316L | + |
| 167/168 | T156Q/V266L | + |
| 169/170 | K248T/S249L | + |
| 171/172 | N25M | + |
| 173/174 | T156Q/S249R/M316L/T330R/N335H | + |
| 175/176 | Y218F | + |
| 177/178 | M12V | + |
| 179/180 | M12T | + |
| 181/182 | D37L/T156Q/K248T/S249L/V266L | + |
| 183/184 | M12L | + |
| 185/186 | G11N/D37L/T156Q/K248T/S249L/M316L | + |
| 187/188 | D37L/T156Q/M316L/T330R | + |
| 189/190 | G11N/D37L/K248T/S249R/M316L/T330R | + |
| 191/192 | G11N/D37L/K248T/S249L | + |
| 193/194 | S249R/T330R/N335H | + |
| 195/196 | G11N/D37L/T156Q/T330R/Q334R | + |
| 197/198 | N25L | + |
| 199/200 | M38R | + |
| 201/202 | T40D | + |
| 203/204 | K248T/S249R | + |
| 205/206 | G11N/D37L/Y148F/S249L/M316L | + |
| 207/208 | I83V | + |
| 209/210 | S323E | + |
| 211/212 | T193Q | + |
| 213/214 | N335H | + |
| 215/216 | V257G | + |
| 217/218 | E258V | + |

Levels of increased activity were determined relative to the reference polypeptide of SEQ ID NO: 2 and defined as follows:
“+” > 1,
“++” > 1.2,
“+++” > 3.6,
“++++” > 10

### Example 6

### Improvements Over SEQ ID NO: 54 in RNA Ligase Activity

[0601] The RNA ligase of SEQ ID NO: 54 was selected as the parent enzyme in an RNA ligation assay. Libraries of engineered genes were produced using known techniques (e.g., saturation mutagenesis, recombination of previously identified beneficial mutations). The polypeptides encoded by each gene were produced in high throughput (HTP) as described in Example 1, and the cell paste was generated as described in Example 2. To prepare lysate, 600 ul of 0.1 mg/mL lysozyme in 50 mM Tris-HCl buffer at pH 7.5 was added to the cell paste of each sample. After thorough resuspension at room temperature on a plate mixer for 30 min, the cells were incubated at 40° C. for 1 hour in a PCR thermocycler. The samples were then centrifuged for 10 min at 4000 rpm and 4° C., and the clear supernatants were collected for ligation reactions.

[0602] The oligonucleotide mix for Reaction 1 in Example 4 were used as substrates in the ligation reaction. The lysate was screened in a 100 nanoliter reaction that comprised 50 mM Tris-HCl buffer at pH 7.5, 2 mM MgCl₂, 1 mM dithiothreitol (DTT), 0.4 mM adenosine triphosphate (ATP), and 1.6 mM of an equimolar mixture of the oligonucleotide fragments compromising Reaction 1. Nanoliter scale liquid transfers were carried out by Echo Acoustic Liquid Handler. The reactions were mixed by vortex, incubated for 2 hr at 37° C. in a PCR thermocycler, and quenched and diluted for analytical analysis by CE as described in Example 4. Using the peak area from CE analytical method, the % conversion for each sample was calculated as shown below:

$$\% conversion = \frac{area under the curve for the product peak}{\begin{matrix}Total area under the curve for \\ all products and remaining fragments\end{matrix}} * 100$$

[0603] Activity relative to SEQ ID NO: 54 (Activity FIOP) was calculated as the % conversion by the variant over the % conversion by SEQ ID NO: 54. The result is shown in Table 6.1.

TABLE 6.1
Activities of Variants Relative to SEQ ID NO: 54

| | | Activity |
|---|---|---|
| | Amino Acid | FIOP |
| SEQ ID | Differences | Relative to |
| NO: | (Relative to | SEQ ID |
| (nt/aa) | SEQ ID NO: 54) | NO: 54 |
| 219/220 | T156Q/T232G/Q334R/N335H | ++++ |
| 221/222 | M12V/K254V/K256A | ++++ |
| 223/224 | M12V/N230T | ++++ |
| 225/226 | M12L/N230T/K251T | ++++ |
| 227/228 | M12L/N230T/K251S/K254V/K256A | ++++ |
| 229/230 | M12A/M38R/N230T | ++++ |
| 231/232 | N230T/K251S | ++++ |
| 233/234 | M12P/M38R/K254V | ++++ |
| 235/236 | M12V/N230T/K251T | ++++ |
| 237/238 | N230T/K256A | ++++ |
| 239/240 | K254V | ++++ |
| 241/242 | N230T | ++++ |
| 243/244 | M12T/N230T/K251S | ++++ |
| 245/246 | M12T/N230T/K254V | ++++ |
| 247/248 | M12V/M38R/N230T/K251T/K256A | ++++ |
| 249/250 | M12L/K251S | ++++ |
| 251/252 | M12T/K251T/K254V/K256A | +++ |
| 253/254 | M12V/N230T/K251S | +++ |
| 255/256 | M38R | +++ |
| 257/258 | M12T/N230T/K256A | +++ |
| 259/260 | M12L | +++ |
| 261/262 | M12V | +++ |
| 263/264 | M12L/N25M/M38R/N230T/K251T | +++ |
| 265/266 | M12L/M38R/M102T/N230T/K251T/K256A | +++ |
| 267/268 | M12L/N230T | +++ |
| 269/270 | M12V/K256A | +++ |
| 271/272 | M38R/N230T/K256A | +++ |
| 273/274 | M12V/N230T/K251S/K254V/K256A | +++ |
| 275/276 | K256A | +++ |
| 277/278 | M12T/N230T/K251S/K256A | +++ |
| 279/280 | M12T/K251T | +++ |
| 281/282 | N230T/K251S/K254L | +++ |
| 283/284 | N230T/K254V | +++ |
| 285/286 | K251S/K254L | +++ |
| 287/288 | M12T/N25L/N230T | +++ |
| 289/290 | M12V/N230T/K251S/K254L/K256A | +++ |
| 291/292 | M38R/N230T | +++ |
| 293/294 | M12T/K251S | +++ |
| 295/296 | M38R/K251T | +++ |
| 297/298 | M12V/N230T/K251S/K256A | +++ |
| 299/300 | M12L/N230T/K251T/K254V/K256A | +++ |
| 301/302 | M12T/M38R/N230T/K256A | +++ |
| 303/304 | M12L/N230T/K256A | +++ |
| 305/306 | M102T | +++ |
| 307/308 | K251T | +++ |
| 309/310 | M12V/N25M/K251T/K256A | +++ |
| 311/312 | M12T/M102T/K256A | +++ |
| 313/314 | N230T/K251T | +++ |
| 315/316 | M12T/N230T/K251S/K254L/K256A | +++ |
| 317/318 | M12V/M38R/N230T/K251T/K254V/K256A | +++ |
| 319/320 | M12T/M38R/N230T | +++ |
| 321/322 | M12L/M38R/K254V | +++ |
| 323/324 | M12L/K251T/K256A | +++ |
| 325/326 | M12T/N230T | +++ |
| 327/328 | M102T/N230T/K251S/K254V/K256A | +++ |
| 329/330 | N230T/K251S/K254V | +++ |
| 331/332 | M12T/N230T/K251S/K254V/K256A | +++ |
| 333/334 | M12T/M38R/K251S | +++ |
| 335/336 | M12T/N230T/K251S/K254V | +++ |
| 337/338 | M12T/N230T/K251T | +++ |
| 339/340 | T156Q/K248T/Q334R/N335H | +++ |
| 341/342 | M12V/M38R/N230T | +++ |
| 343/344 | M12T/N25M/M38R | +++ |
| 345/346 | M12V/M102T/N230T/K251T/K254V | +++ |
| 347/348 | M12L/K256A | +++ |
| 349/350 | M12T | +++ |
| 351/352 | N230T/K251T/K254L | +++ |
| 353/354 | M12V/N25L/M38R | +++ |
| 355/356 | M12T/M38R/K251S/K254V | +++ |
| 357/358 | M12V/K251S/K254L/K256A | +++ |
| 359/360 | M12T/K251T/K254V | +++ |
| 361/362 | M12T/M102T | +++ |
| 363/364 | M12V/M38R/K251S | +++ |
| 365/366 | M12V/N230T/K251S/K254L | +++ |
| 367/368 | M12T/K251T/K256A | +++ |
| 369/370 | M38R/N230T/K251S/K254V/K256A | +++ |
| 371/372 | M12V/N230T/K251T/K256A | +++ |
| 373/374 | M12L/N25M/N230T/K251S/K256A | +++ |
| 375/376 | M12T/N230T/R311C | +++ |
| 377/378 | M12L/M38R/N230T/K251S/K254V/K256A | ++ |
| 379/380 | M12L/N230T/K251T/K254L | ++ |
| 381/382 | M12L/K254V | ++ |
| 383/384 | M38R/N230T/K251S/K254V | ++ |
| 385/386 | M12L/M38R/K251S/K256A | ++ |
| 387/388 | M12L/M38R/K251S | ++ |
| 389/390 | T156Q/Q334R/N335H | ++ |
| 391/392 | M12A/N230T | ++ |
| 393/394 | M12P/N230T | ++ |
| 395/396 | M12T/M38R/K251T | ++ |
| 397/398 | V257G/E258P/Q334R | ++ |
| 399/400 | M12L/N25L/M38R/K251T/K256A | ++ |
| 401/402 | Q334R | ++ |
| 403/404 | M12T/N25L/N230T/K254V/K256A | ++ |
| 405/406 | M12T/K251S/K256A | ++ |
| 407/408 | M38R/K251T/K256A | ++ |
| 409/410 | M12V/K251S | ++ |
| 411/412 | M12V/K251T/K254L | ++ |
| 413/414 | M12V/M38R/N230T/K251T/K254V | ++ |
| 415/416 | M12L/M38R | ++ |
| 417/418 | M12L/K251S/K254L/K256A | ++ |
| 419/420 | V257G/E258P/Q334R/N335H | ++ |
| 421/422 | M12L/M38R/K254L/K256A | ++ |
| 423/424 | M12V/K254L | ++ |
| 425/426 | M12T/K254L | ++ |
| 427/428 | M12T/M38R | ++ |
| 429/430 | T232G/K248T/V257G/E258P/Q334R/N335H | ++ |
| 431/432 | M12L/M102T | ++ |
| 433/434 | T156Q/E258P/Q334R/N335H | ++ |
| 435/436 | T156Q/L249R/Q334R/N335H | ++ |
| 437/438 | M12T/M102T/N230T/K254L | ++ |
| 439/440 | N25M | ++ |
| 441/442 | M12V/K254L/K256A | ++ |
| 443/444 | T156H/Q334R/N335H | ++ |
| 445/446 | T156Q/V257G/E258P/Q334R/N335H | ++ |
| 447/448 | M12T/M102T/N230T | ++ |
| 449/450 | T156Q/K248T/V257G/E258P/Q334R | ++ |
| 451/452 | M12T/K256A | ++ |
| 453/454 | K248T/L249R/Q334R/N335H | ++ |
| 455/456 | T232G/V257G/E258P/Q334R/N335H | ++ |
| 457/458 | M12T/M38R/K251T/K254V | ++ |
| 459/460 | Q334R/N335H | ++ |
| 461/462 | T156Q/Q334R | ++ |
| 463/464 | M12V/M38R/K254V | ++ |
| 465/466 | K251T/K254V | ++ |
| 467/468 | M12T/M38R/M102T/K256A | + |
| 469/470 | T156Q/V257G/Q334R/N335H | + |
| 471/472 | M38R/K251S/K256A | + |
| 473/474 | M12T/N140I/K251S/K254L | + |
| 475/476 | K251S/K254V/K256A | + |
| 477/478 | M12V/K251T | + |
| 479/480 | K248T/Q334R/N335H | + |
| 481/482 | M12T/K254V | + |
| 483/484 | M12V/M38R | + |
| 485/486 | M12V/K251T/K256A | + |
| 487/488 | T156Q/E258P/Q334R | + |
| 489/490 | T156Q/K248T/T330R/N335H | + |
| 491/492 | M12T/M38R/K256A | + |
| 493/494 | T232G/Q334R/N335H | + |
| 495/496 | T156Q/L249R/Q334R | + |
| 497/498 | T330R/Q334R/N335H | + |
| 499/500 | T156Q/K248T/Q334R | + |
| 501/502 | T156Q/N335H | + |
| 503/504 | V257G/Q334R | + |
| 505/506 | T156H/K248T/Q334R/N335H | + |
| 507/508 | K248T/Q334R | + |
| 509/510 | T232G/K248T/Q334R/N335H | + |
| 511/512 | T156H/K248T/Q334R | + |
| 513/514 | T156H/Q334R | + |
| 515/516 | M12T/N25M/M38R/N230T/K251S/K256A | + |
| 517/518 | M12V/K251S/K254V/K256A | + |
| 519/520 | T156Q/K248T/L249R/Q334R/N335H | + |
| 521/522 | T330R/N335H | + |
| 523/524 | K248T/V257G/Q334R/N335H | + |
| 525/526 | T232G/K248T/Q334R | + |
| 527/528 | T156Q/T232G/K248T/Q334R/N335H | + |
| 529/530 | T232G/V257G/T330R/Q334R | + |
| 531/532 | T156Q/K248T/A291T/Q334R/N335H | + |
| 533/534 | T156Q/T232G/K248T/V257G/E258P/Q334R | + |
| 535/536 | M12V/M38R/K251T/K254L | + |
| 537/538 | M12T/N25L/M38R | + |
| 539/540 | T156Q/T232G/L249R/Q334R/N335H | + |
| 541/542 | M12T/N25M | + |
| 543/544 | T156Q/K248T/T330R/Q334R/N335H | + |
| 545/546 | T156Q/K248T/L249R/Q334R | + |
| 547/548 | T156H/T232G/K248T/Q334R/N335H | + |
| 549/550 | T232G/K248T/T330R/N335H | + |
| 551/552 | T156Q/T232G/T330R/Q334R/N335H | + |

Levels of increased activity were determined relative to the reference polypeptide of SEQ ID NO: 54 and defined as follows:
“+” > 1,
“++” > 1.5,
“+++” > 2.35,
“++++” > 3.52

[0604] In another assay, lysate was screened in a 100 nanoliter reaction that comprised 50 mM Tris-HCl buffer at pH 7.5, 2 mM MgCl₂, 1 mM dithiothreitol (DTT), 1.6 mM adenosine triphosphate (ATP), and 0.8 mM of an equimolar mixture of the oligonucleotide fragments compromising Reaction 1. Nanoliter scale liquid transfers were carried out by Echo Acoustic Liquid Handler. The reactions were mixed by vortex, incubated for 2 hr at 37° C. in a PCR thermocycler, and quenched and diluted for analytical analysis by CE as described in Example 4. Using the peak area from CE analytical method, the % conversion for each sample was calculated as shown below:

$$\% conversion = \frac{area under the curve for the product peak}{\begin{matrix}Total area under the curve for \\ all products and remaining fragments\end{matrix}} * 100$$

[0605] Activity relative to SEQ ID NO: 54 (Activity FIOP) was calculated as the % conversion by the variant over the % conversion by SEQ ID NO: 54. The result is shown in Table 6.2.

TABLE 6.2
Activities of Variants Relative to SEQ ID NO: 54

| SEQ ID | Amino Acid | Activity FIOP |
|---|---|---|
| NO: | Differences | Relative to SEQ |
| (nt/aa) | (Relative to SEQ ID NO: 54) | ID NO: 54 |
| 553/554 | E197W | ++++ |
| 555/556 | R338L | ++++ |
| 557/558 | K327S | ++++ |
| 559/560 | D192F | ++++ |
| 561/562 | I331S | ++++ |
| 563/564 | K326C | ++++ |
| 565/566 | R338G | ++++ |
| 567/568 | L345S | ++++ |
| 569/570 | K327G | ++++ |
| 571/572 | A101V | +++ |
| 573/574 | N100V | +++ |
| 575/576 | I331G | +++ |
| 577/578 | E141G | +++ |
| 579/580 | H198M | +++ |
| 581/582 | K326L | +++ |
| 583/584 | V64W | +++ |
| 585/586 | I306G | +++ |
| 587/588 | L345Q | +++ |
| 589/590 | A101W | ++ |
| 591/592 | N100R | ++ |
| 593/594 | I331W | ++ |
| 595/596 | L317F | ++ |
| 597/598 | R338M | ++ |
| 599/600 | R265F | ++ |
| 601/602 | R296W | ++ |
| 603/604 | T194V | ++ |
| 605/606 | E62V | ++ |
| 607/608 | L317W | ++ |
| 609/610 | D90F | ++ |
| 611/612 | N307R | + |
| 613/614 | L317G | + |
| 615/616 | N100T | + |
| 617/618 | N100L | + |
| 619/620 | T194G | + |
| 621/622 | D103G | + |
| 623/624 | E62A | + |
| 625/626 | S210G | + |
| 627/628 | V105R | + |
| 629/630 | T61A | + |

Levels of increased activity were determined relative to the reference polypeptide of SEQ ID NO: 54 and defined as follows:
“+” > 1, “++” > 1.41, “+++” > 1.7, “++++” > 2.1

### Example 7

### Improvements Over SEQ ID NO: 244 in RNA Ligase Activity

[0606] The RNA ligase of SEQ ID NO: 244 was selected as the parent enzyme in an RNA ligation assay. Libraries of engineered genes were produced using known techniques (e.g., saturation mutagenesis, recombination of previously identified beneficial mutations). The polypeptides encoded by each gene were produced in high throughput (HTP) as described in Example 1, and the cell paste was generated as described in Example 2. To prepare lysate, 600 ul of 0.1 mg/mL lysozyme in 50 mM Tris-HCl buffer at pH 7.5 was added to the cell paste of each sample. After thorough resuspension at room temperature on a plate mixer for 30 min, the cells were incubated at 40° C. for 1 hour in a PCR thermocycler. The samples were then centrifuged for 10 min at 4000 rpm and 4° C., and the clear supernatants were collected for ligation reactions.

[0607] The oligonucleotide mix for Reaction 1 in Example 4 were used as substrates in the ligation reaction. The lysate was screened in a 100 nanoliter reaction that comprised 50 mM Tris-HCl buffer at pH 7.5, 2 mM MgCl₂, 1 mM dithiothreitol (DTT), 3.2 mM adenosine triphosphate (ATP), and 1.6 mM of an equimolar mixture of the oligonucleotide fragments compromising Reaction 1. Nanoliter scale liquid transfers were carried out by Echo Acoustic Liquid Handler. The reactions were mixed by vortex, incubated for 2 hr at 37° C. in a PCR thermocycler, and quenched and diluted for analytical analysis by CE as described in Example 4. Using the peak area from CE analytical method, the % conversion for each sample was calculated as shown below:

$$\% conversion = \frac{area under the curve for the product peak}{\begin{matrix}Total area under the curve for \\ all products and remaining fragments\end{matrix}} * 100$$

[0608] Activity relative to SEQ ID NO: 244 (Activity FIOP) was calculated as the % conversion by the variant over the % conversion by SEQ ID NO: 244. The result is shown in Table 7.1.

TABLE 7.1
Activities of Variants Relative to SEQ ID NO: 244

| SEQ ID | Amino Acid | Activity FIOP |
|---|---|---|
| NO: | Differences | Relative to SEQ |
| (nt/aa) | (Relative to SEQ ID NO: 244) | ID NO: 244 |
| 631/632 | E141G/E197W/K326L/K327S | ++++ |
| 633/634 | N100V/A101V/R338L | ++++ |
| 635/636 | E141G/H198M/K326L | ++++ |
| 637/638 | V64W/N100V/A101V | ++++ |
| 639/640 | N100V/R338L | ++++ |
| 641/642 | A101V/E141G/H198M/K326L | ++++ |
| 643/644 | A101V/H198M/K326L/K327G | ++++ |
| 645/646 | N100V/A101V/R338G | ++++ |
| 647/648 | H198M/K326L | ++++ |
| 649/650 | V64W/N100V/A101V/R338G/L345Q | ++++ |
| 651/652 | V64W/N100V/A101V/R338L/L345Q | ++++ |
| 653/654 | E197W/K326L | ++++ |
| 655/656 | H198M/K327S | ++++ |
| 657/658 | E141G/H198M/K327S | ++++ |
| 659/660 | N100V/R338G | ++++ |
| 661/662 | H198M/K326L/K327G | ++++ |
| 663/664 | E197W/K326L/K327G | ++++ |
| 665/666 | V64W/N100V/R338G | ++++ |
| 667/668 | V64W/N100V/A101V/T156S/E197W/R338L | +++ |
| 669/670 | V64W/N100V/A101V/R338G | +++ |
| 671/672 | N100V/E197W/R338L | +++ |
| 673/674 | H198M/K326L/K327S | +++ |
| 675/676 | E197W/R338L | +++ |
| 677/678 | A101V/E197W/K326L | +++ |
| 679/680 | V64W/N100V/E197W/R338L | +++ |
| 681/682 | A101V/H198M | +++ |
| 683/684 | E141G/E197W/K327S | +++ |
| 685/686 | H198M/K327G | +++ |
| 687/688 | H198M/K326C/K327S | +++ |
| 689/690 | V64W/N100V/A101V/E197W/R338G | ++ |
| 691/692 | A101V/K326L | ++ |
| 693/694 | A101V/E197W/K326L/K327G | ++ |
| 695/696 | E141G/E197W/K326L/K327G | ++ |
| 697/698 | N100V/A101W/R338G | ++ |
| 699/700 | E197W/K327S | ++ |
| 701/702 | E197W | ++ |
| 703/704 | E141G/E197W | ++ |
| 705/706 | A101V | ++ |
| 707/708 | A101V/H198M/K326C | ++ |
| 709/710 | V64W/E197W/H198M/R338G | ++ |
| 711/712 | E141G | ++ |
| 713/714 | V64W/N100V/A101W/R338G | ++ |
| 715/716 | A101V/E141G | ++ |
| 717/718 | N100V/A101V/E197W/R338L | ++ |
| 719/720 | E141G/K326C | ++ |
| 721/722 | R338L | ++ |
| 723/724 | E197W/R338G | ++ |
| 725/726 | K326L | ++ |
| 727/728 | E197W/H198M/R338G | ++ |
| 729/730 | E197W/H198M/R338L | ++ |
| 731/732 | V64W/A101W/R338L | ++ |
| 733/734 | V64W/E197W/H198M | ++ |
| 735/736 | A101V/E197W | ++ |
| 737/738 | N100V/A101V | ++ |
| 739/740 | E141G/K326L | ++ |
| 741/742 | N100V/I109F/E197W/R338L | ++ |
| 743/744 | A101W/E197W/R338L | ++ |
| 745/746 | V64W/N100V/A101W | ++ |
| 747/748 | E197W/H198M | ++ |
| 749/750 | N100V/A101W/R338L | ++ |
| 751/752 | E141G/K326C/K327S | ++ |
| 753/754 | N100V/E197W | ++ |
| 755/756 | E197W/K326C/K327G | ++ |
| 757/758 | V64W/N100V | ++ |
| 759/760 | A101V/K326C | ++ |
| 761/762 | N100V/A101W | + |
| 763/764 | V64W/E197W/R338L | + |
| 765/766 | N100V/E197W/H198M | + |
| 767/768 | A101W | + |
| 769/770 | A101W/R338L | + |
| 771/772 | E141G/K327S | + |
| 773/774 | A101V/I306G | + |
| 775/776 | V64W/N100V/A101W/E197W | + |
| 777/778 | A101V/K326L/K327G | + |
| 779/780 | N100V | + |
| 781/782 | K327G | + |
| 783/784 | K326C/L345S | + |
| 785/786 | V64W/N100V/A101V/E197W/H198M | + |
| 787/788 | K326C/K327S | + |
| 789/790 | V64W/A101W | + |
| 791/792 | N100V/A101V/E197W | + |
| 793/794 | A101V/K327S | + |
| 795/796 | R338G | + |
| 797/798 | N100V/A101V/E197W/R338G | + |
| 799/800 | N100V/A101W/E197W/R338G | + |
| 801/802 | V64W/N100V/E197W/H198M/R338G | + |
| 803/804 | I306G | + |
| 805/806 | V64W/R338G | + |
| 807/808 | V64W/N100V/A101V/E197W | + |
| 809/810 | V64W/E197W/H198M/R338L | + |
| 811/812 | A101V/K327G | + |
| 813/814 | A101V/E141G/K326C/K327S | + |
| 815/816 | V64W/A101W/E197W/R338L | + |
| 817/818 | A101W/R338G | + |
| 819/820 | A101V/H198M/I306G/K327S | + |

Levels of increased activity were determined relative to the reference polypeptide of SEQ ID NO: 244 and defined as follows
“+” > 1, “++” > 2, “+++” > 7.3, “++++” > 16

### Example 8

### Improvements Over SEQ ID NO: 648 in RNA Ligase Activity

[0609] The RNA ligase of SEQ ID NO: 648 was selected as the parent enzyme in an RNA ligation assay. Libraries of engineered genes were produced using known techniques (e.g., saturation mutagenesis, recombination of previously identified beneficial mutations). The polypeptides encoded by each gene were produced in high throughput (HTP) as described in Example 1, and the cell paste was generated as described in Example 2. To prepare lysate, 600 ul of 0.1 mg/mL lysozyme in 50 mM Tris-HCl buffer at pH 7.5 was added to the cell paste of each sample. After thorough resuspension at room temperature on a plate mixer for 30 min, the cells were diluted 4-fold in 50 mM Tris-HCl buffer at pH 7.5 then incubated at 40° C. for 1 hour in a PCR thermocycler. The samples were then centrifuged for 10 min at 4000 rpm and 4° C., and the clear supernatants were collected for ligation reactions.

[0610] The oligonucleotide mix for Reaction 1 in Example 4 were used as substrates in the ligation reaction. The lysate was screened in a 100 nanoliter reaction that comprised 50 mM Tris-HCl buffer at pH 7.5, 2 mM MgCl₂, 1 mM dithiothreitol (DTT), 4 mM adenosine triphosphate (ATP), and 1.6 mM of an equimolar mixture of the oligonucleotide fragments compromising Reaction 1. Nanoliter scale liquid transfers were carried out by Echo Acoustic Liquid Handler. The reactions were mixed by vortex, incubated for 2 hr at 37° C. in a PCR thermocycler, and quenched and diluted for analytical analysis by CE as described in Example 4. Using the peak area from CE analytical method, the % conversion for each sample was calculated as shown below:

$$\% conversion = \frac{area under the curve for the product peak}{\begin{matrix}Total area under the curve for \\ all products and remaining fragments\end{matrix}} * 100$$

[0611] Activity relative to SEQ ID NO: 648 (Activity FIOP) was calculated as the % conversion by the variant over the % conversion by SEQ ID NO: 648. The result is shown in Table 8.1.

TABLE 8.1
Activities of Variants Relative to SEQ ID NO: 648

| SEQ | Amino Acid | Activity FIOP |
|---|---|---|
| ID NO: | Differences | Relative to SEQ |
| (nt/aa) | (Relative to SEQ ID NO: 648) | ID NO: 648 |
| 821/822 | T194V/T330D/I331W | ++++ |
| 823/824 | M298S | ++++ |
| 825/826 | I331W | ++++ |
| 827/828 | D192L/T193K/T194V/M298S | ++++ |
| 829/830 | T330D | ++++ |
| 831/832 | D192L/T330D/I331G | ++++ |
| 833/834 | D192L/T193K/T194V/I331S | ++++ |
| 835/836 | M298I/T330D/I331S | ++++ |
| 837/838 | T194V/M298S/T330D/I331G | +++ |
| 839/840 | D192L/T193K/T330D/I331S | +++ |
| 841/842 | D192L/M298S/I331S | +++ |
| 843/844 | D192L/T193K | +++ |
| 845/846 | T194V/T330D | +++ |
| 847/848 | I331G | +++ |
| 849/850 | D192L/M298S/I331W | ++ |
| 851/852 | P60D/N100R/T156G | ++ |
| 853/854 | T193K/R296G/I331W | ++ |
| 855/856 | M298S/I331G | ++ |
| 857/858 | T193K/T194V/T330D/I331W | ++ |
| 859/860 | T194V | ++ |
| 861/862 | T194V/M298S/I331G | ++ |
| 863/864 | T193K/M298S | ++ |
| 865/866 | T193K/T330D | ++ |
| 867/868 | D192L | ++ |
| 869/870 | D192L/T193K/T194V/M298S/I331S | ++ |
| 871/872 | D192L/T193K/T194V/M298S/T330D | ++ |
| 873/874 | D192L/T193K/M298S/I331S | ++ |
| 875/876 | N100R/T156G | ++ |
| 877/878 | M298S/I331S | ++ |
| 879/880 | M298I/I331G | ++ |
| 881/882 | E62V/N100V | ++ |
| 883/884 | M298S/T330D | + |
| 885/886 | T193K/M298I | + |
| 887/888 | I331S | + |
| 889/890 | P60D/N100R | + |
| 891/892 | D192L/T193K/M298S/T330D/I331S | + |
| 893/894 | D192L/T193K/T194V/M298S/I331W | + |
| 895/896 | D192L/T330D/I331S | + |
| 897/898 | N100R | + |
| 899/900 | T193K/T194V/M298S | + |
| 901/902 | T194V/M298S/I331S | + |
| 903/904 | R338L | + |
| 905/906 | E62V | + |

Levels of increased activity were determined relative to the reference polypeptide of SEQ ID NO: 648 and defined as follows:
“+” > 1, “++” > 1.5, “+++” > 2.5, “++++” > 4.5

[0612] In another assay, cell pastes were lysed by the addition of 600 ul of 0.1 mg/mL lysozyme in 50 mM Tris-HCl buffer at pH 7.5 to each sample. After thorough resuspension at room temperature on a plate mixer for 30 min, lysates were diluted 8-fold in 50 mM Tris-HCL buffer at pH 7.5 then were incubated at 40° C. for 1 hour in a PCR thermocycler. The samples were then centrifuged for 10 min at 4000 rpm and 4° C., and the clear supernatants were collected for ligation reactions. Lysate was diluted 8-fold in 50 mM Tris-HCl buffer at pH 7.5 and screened in a 100 nanoliter reaction that comprised 50 mM Tris-HCl buffer at pH 7.5, 20 mM MgCl₂, 1 mM dithiothreitol (DTT), 8 mM adenosine triphosphate (ATP), and 1.6 mM of an equimolar mixture of the oligonucleotide fragments compromising Reaction 1. Nanoliter scale liquid transfers were carried out by Echo Acoustic Liquid Handler. The reactions were mixed by vortex, incubated for 2 hr at 37° C. in a PCR thermocycler, and quenched and diluted for analytical analysis by CE as described in Example 4. Using the peak area from CE analytical method, the % conversion for each sample was calculated as shown below:

$$\% conversion = \frac{area under the curve for the product peak}{\begin{matrix}Total area under the curve for \\ all products and remaining fragments\end{matrix}} * 100$$

[0613] Activity relative to SEQ ID NO: 648 (Activity FIOP) was calculated as the % conversion by the variant over the % conversion by SEQ ID NO: 648. The result is shown in Table 8.2.

TABLE 8.2
Activities of Variants Relative to SEQ ID NO: 648

| SEQ ID | Amino Acid | Activity FIOP |
|---|---|---|
| NO: | Differences | Relative to SEQ |
| (nt/aa) | (Relative to SEQ ID NO: 648) | ID NO: 648 |
| 907/908 | A247S | ++++ |
| 909/910 | S18H | ++++ |
| 911/912 | L37A | ++++ |
| 913/914 | K254S | +++ |
| 915/916 | G33L | +++ |
| 917/918 | E261T | +++ |
| 919/920 | S251Y | +++ |
| 921/922 | T260G | +++ |
| 923/924 | S251C | ++ |
| 925/926 | T12R | ++ |
| 927/928 | G117A | ++ |
| 929/930 | K256S | ++ |
| 931/932 | A255Y | ++ |
| 933/934 | A255S | + |
| 935/936 | M38E | + |
| 937/938 | T12M | + |
| 939/940 | S251T | + |
| 941/942 | A255V | + |
| 943/944 | E29D | + |
| 945/946 | A247R | + |
| 947/948 | N25A | + |
| 949/950 | K256E | + |
| 951/952 | P252A | + |
| 953/954 | E261D | + |

Levels of increased activity were determined relative to the reference polypeptide of SEQ ID NO: 648 and defined as follows:
“+” > 1, “++” > 1.1, “+++” > 1.31, “++++” > 1.8

### Example 9

### Improvements Over SEQ ID NO: 862 in RNA Ligase Activity

[0614] The RNA ligase of SEQ ID NO: 862 was selected as the parent enzyme in an RNA ligation assay. Libraries of engineered genes were produced using known techniques (e.g., saturation mutagenesis, recombination of previously identified beneficial mutations). The polypeptides encoded by each gene were produced in high throughput (HTP) as described in Example 1, and the cell paste was generated as described in Example 2. To prepare lysate, 600 ul of 0.1 mg/mL lysozyme in 50 mM Tris-HCl buffer at pH 7.5 was added to the cell paste of each sample. After thorough resuspension at room temperature on a plate mixer for 30 min, the cells were diluted 8-fold in 50 mM Tris-HCl buffer at pH 7.5 then incubated at 40° C. for 1 hour in a PCR thermocycler. The samples were then centrifuged for 10 min at 4000 rpm and 4° C., and the clear supernatants were collected for ligation reactions.

[0615] The oligonucleotide mix for Reaction 1 in Example 4 were used as substrates in the ligation reaction. The lysate was screened in a 100 nanoliter reaction that comprised 50 mM Tris-HCl buffer at pH 7.5, 20 mM MgCl₂, 1 mM dithiothreitol (DTT), 8 mM adenosine triphosphate (ATP), and 1.6 mM of an equimolar mixture of the oligonucleotide fragments compromising Reaction 1. Nanoliter scale liquid transfers were carried out by Echo Acoustic Liquid Handler. The reactions were mixed by vortex, incubated for 2 hr at 37° C. in a PCR thermocycler, and quenched and diluted for analytical analysis by CE as described in Example 4. Using the peak area from CE analytical method, the % conversion for each sample was calculated as shown below:

$$\% conversion = \frac{area under the curve for the product peak}{\begin{matrix}Total area under the curve for \\ all products and remaining fragments\end{matrix}} * 100$$

[0616] Activity relative to SEQ ID NO: 862 (Activity FIOP) was calculated as the % conversion by the variant over the % conversion by SEQ ID NO: 862. The result is shown in Table 9.1.

TABLE 9.1
Activities of Variants Relative to SEQ ID NO: 862

| SEQ ID | Amino Acid | Activity FIOP |
|---|---|---|
| NO: | Differences | Relative to SEQ |
| (nt/aa) | (Relative to SEQ ID NO: 862) | ID NO: 862 |
| 955/956 | K254S | ++++ |
| 957/958 | S18H/K254S | ++++ |
| 959/960 | A247S/L317W | ++++ |
| 961/962 | L37A/L317W/H342R | ++++ |
| 963/964 | G33L | ++++ |
| 965/966 | A247S/L317F | ++++ |
| 967/968 | S18H/T156G/K254S | ++++ |
| 969/970 | S18H | ++++ |
| 971/972 | T156G | +++ |
| 973/974 | K254S/R338L | +++ |
| 975/976 | K254S/N307R | +++ |
| 977/978 | G33L/L37A/L317W | +++ |
| 979/980 | L37A | +++ |
| 981/982 | L37A/T156G/L317W | +++ |
| 983/984 | T156G/R265F/L317W | +++ |
| 985/986 | R265F/L317W | +++ |
| 987/988 | T156G/K254S | +++ |
| 989/990 | G33L/T156G/L317W | +++ |
| 991/992 | L317F | +++ |
| 993/994 | T156G/L317F | +++ |
| 995/996 | L317W | +++ |
| 997/998 | T156G/L317W | +++ |
| 999/1000 | L37A/L317W | +++ |
| 1001/1002 | S18H/R338M | +++ |
| 1003/1004 | R338M | +++ |
| 1005/1006 | T156G/A247S/L317W | +++ |
| 1007/1008 | S18H/R338L | +++ |
| 1009/1010 | G33L/L317W | +++ |
| 1011/1012 | L37A/A247S/R265F/L317F | +++ |
| 1013/1014 | L37A/L317F | ++ |
| 1015/1016 | G33L/L37A/T156G/L317W | ++ |
| 1017/1018 | T156G/A247S/R296W/L317W | ++ |
| 1019/1020 | S18H/N307R | ++ |
| 1021/1022 | T156G/R296W/L317W | ++ |
| 1023/1024 | T156G/A247S | ++ |
| 1025/1026 | L37A/A247S/L317F | ++ |
| 1027/1028 | T156G/R265F/L317F | ++ |
| 1029/1030 | S18H/K254S/N307R | ++ |
| 1031/1032 | N307R | ++ |
| 1033/1034 | R265F | ++ |
| 1035/1036 | R265F/L317F | + |
| 1037/1038 | G33L/L37A | + |
| 1039/1040 | S18H/T156G | + |
| 1041/1042 | G33L/T156G/R296W/L317W | + |
| 1043/1044 | S18H/T156G/K254S/R338L | + |
| 1045/1046 | L37A/R265F/L317F | + |
| 1047/1048 | G33L/L37A/T156G/A247S/L317W | + |
| 1049/1050 | R296W | + |
| 1051/1052 | G33L/R296W/L317W | + |
| 1053/1054 | T156G/A247S/L317F | + |
| 1055/1056 | T156G/R296W | + |
| 1057/1058 | R338L | + |
| 1059/1060 | L37A/R265F/L317W | + |
| 1061/1062 | A247S/R296W/L317F | + |
| 1063/1064 | G33L/T156G/L317F | + |
| 1065/1066 | L37A/R296W/L317F | + |
| 1067/1068 | A247S/R296W | + |
| 1069/1070 | G33L/L37A/T156G | + |
| 1071/1072 | R296W/L317W | + |
| 1073/1074 | T156G/K254S/N307R | + |
| 1075/1076 | S18H/T156G/N307R | + |
| 1077/1078 | G33L/L37A/R265F | + |

Levels of increased activity were determined relative to the reference polypeptide of SEQ ID NO: 862 and defined as follows:
“+” > 1, “++” > 1.3, “+++” > 1.48, “++++” > 1.8

### Example 10

### Improvements Over SEQ ID NO: 956 in RNA Ligase Activity

[0617] The RNA ligase of SEQ ID NO: 956 was selected as the parent enzyme in an RNA ligation assay. Libraries of engineered genes were produced using known techniques (e.g., saturation mutagenesis, recombination of previously identified beneficial mutations). The polypeptides encoded by each gene were produced in high throughput (HTP) as described in Example 1, and the cell paste was generated as described in Example 2. To prepare lysate, 600 ul of 0.1 mg/mL lysozyme in 50 mM Tris-HCl buffer at pH 7.5 was added to the cell paste of each sample. After thorough resuspension at room temperature on a plate mixer for 30 min, the cells were diluted 16-fold in 50 mM Tris-HCl buffer at pH 7.5 then incubated at 40° C. for 1 hour in a PCR thermocycler. The samples were then centrifuged for 10 min at 4000 rpm and 4° C., and the clear supernatants were collected for ligation reactions.

[0618] The oligonucleotide mix for Reaction 1 in Example 4 were used as substrates in the ligation reaction. The lysate was screened in a 100 nanoliter reaction that comprised 50 mM Tris-HCl buffer at pH 7.5, 20 mM MgCl₂, 1 mM dithiothreitol (DTT), 8 mM adenosine triphosphate (ATP), and 1.6 mM of an equimolar mixture of the oligonucleotide fragments compromising Reaction 1. Nanoliter scale liquid transfers were carried out by Echo Acoustic Liquid Handler. The reactions were mixed by vortex, incubated for 2 hr at 37° C. in a PCR thermocycler, and quenched and diluted for analytical analysis by CE as described in Example 4. Using the peak area from CE analytical method, the % conversion for each sample was calculated as shown below:

$$\% conversion = \frac{area under the curve for the product peak}{\begin{matrix}Total area under the curve for \\ all products and remaining fragments\end{matrix}} * 100$$

[0619] Activity relative to SEQ ID NO: 956 (Activity FIOP) was calculated as the % conversion by the variant over the % conversion by SEQ ID NO: 956. The result is shown in Table 10.1.

TABLE 10.1
Activities of Variants Relative to SEQ ID NO: 956

| SEQ ID | Amino Acid | Activity FIOP |
|---|---|---|
| NO: | Differences | Relative to SEQ |
| (nt/aa) | (Relative to SEQ ID NO: 956) | ID NO: 956 |
| 1079/1080 | T12M/N25A/E29D/T156G | ++++ |
| 1081/1082 | T12M/A255Y/K256S/V257D | ++++ |
| 1083/1084 | T12M/T156G/A255V | ++++ |
| 1085/1086 | A247R/P252A | ++++ |
| 1087/1088 | T12M/N25A | ++++ |
| 1089/1090 | T12M | ++++ |
| 1091/1092 | T12M/N25A/E29D/T156G/A255S | ++++ |
| 1093/1094 | K256S | ++++ |
| 1095/1096 | T12M/T156G | ++++ |
| 1097/1098 | T12M/N25A/T156G/A255V/K256S/V257D/E261D | ++++ |
| 1099/1100 | S18H/A247R/S251T | ++++ |
| 1101/1102 | N25A/A255V/K256S/V257D | ++++ |
| 1103/1104 | T12M/N25A/V257D | ++++ |
| 1105/1106 | A255S/V257D | ++++ |
| 1107/1108 | T12M/N25A/E29D/A255Y/V257D | ++++ |
| 1109/1110 | K256S/V257D | ++++ |
| 1111/1112 | T12M/A255S/V257D | ++++ |
| 1113/1114 | T12M/T156G/A255N/K256S/V257D | ++++ |
| 1115/1116 | N25A | ++++ |
| 1117/1118 | S18H/M38E/S251T/P252A | ++++ |
| 1119/1120 | T12M/K256S/V257D/E261D | ++++ |
| 1121/1122 | T12M/E29D | +++ |
| 1123/1124 | T12M/N25A/A255V/K256S/V257D/E261D | +++ |
| 1125/1126 | M38E | +++ |
| 1127/1128 | T12M/N25A/E29D/K256S/V257D | +++ |
| 1129/1130 | E29D/V257D | +++ |
| 1131/1132 | T12M/E261D | +++ |
| 1133/1134 | S251T | +++ |
| 1135/1136 | T12M/T156G/A255N | +++ |
| 1137/1138 | L249R/S251T | +++ |
| 1139/1140 | T12M/A255V | +++ |
| 1141/1142 | T12M/E29D/T156G/K256S/V257D | +++ |
| 1143/1144 | P252A | +++ |
| 1145/1146 | A255V/V257D/E261D | +++ |
| 1147/1148 | S18A | +++ |
| 1149/1150 | E29D/A255N/V257D | +++ |
| 1151/1152 | A255Y/K256S/V257D | +++ |
| 1153/1154 | T12M/N25A/E29D/T156G/K256S/V257D | +++ |
| 1155/1156 | N25A/A255V/K256S/V257D/E261D | +++ |
| 1157/1158 | E29D/A255Y/K256S/V257D/E261D | +++ |
| 1159/1160 | N25A/K256S | +++ |
| 1161/1162 | S18H/M38E/A247R/P252A/K327M | +++ |
| 1163/1164 | S18H/A247R | +++ |
| 1165/1166 | N25A/E29D | +++ |
| 1167/1168 | T12M/N25A/T156G/A255V/V257D | +++ |
| 1169/1170 | A255V/V257D | +++ |
| 1171/1172 | T12M/A255N | +++ |
| 1173/1174 | S18H/T156G/S251T/P252A | +++ |
| 1175/1176 | T12M/A255V/E261D | ++ |
| 1177/1178 | N25A/A255V | ++ |
| 1179/1180 | T12M/A255V/K256S/E261D | ++ |
| 1181/1182 | T156G/A255S/V257D | ++ |
| 1183/1184 | T156G/V257D | ++ |
| 1185/1186 | T12M/T156G/K256S/V257D | ++ |
| 1187/1188 | T12M/T156G/A255Y | ++ |
| 1189/1190 | N25A/T156G/K256S/V257D | ++ |
| 1191/1192 | T12M/N25A/E29D/T156G/V257D/E261D | ++ |
| 1193/1194 | N25A/E261D | ++ |
| 1195/1196 | T12M/T156G/A255Y/K256S/E261D | ++ |
| 1197/1198 | T12M/N25A/E29D/A255Y/K256S/V257D | ++ |
| 1199/1200 | M38E/P252A | ++ |
| 1201/1202 | T12M/T156G/A255V/K256S/V257D | ++ |
| 1203/1204 | A255S | ++ |
| 1205/1206 | L249R/P252A | ++ |
| 1207/1208 | T12M/T156G/A255Y/K256S | ++ |
| 1209/1210 | T12M/N25A/E29D/E261D | ++ |
| 1211/1212 | V257D | ++ |
| 1213/1214 | T12M/A255N/K256S | ++ |
| 1215/1216 | T12M/E29D/A255N | ++ |
| 1217/1218 | T12M/A255V/V257D/E261D | ++ |
| 1219/1220 | T12M/A255Y/V257D | ++ |
| 1221/1222 | T12M/T156G/V257D | ++ |
| 1223/1224 | D192N/L249R/S251T/P252A | ++ |
| 1225/1226 | T12M/N25A/E29D/A255N/K256S/V257D | ++ |
| 1227/1228 | T12M/N25A/E29D/A255V/E261D | ++ |
| 1229/1230 | T12M/T156G/A255Y/V257D | ++ |
| 1231/1232 | T12M/E29D/A255V/V257D | ++ |
| 1233/1234 | T12M/E29D/K256S/V257D | ++ |
| 1235/1236 | S18A/P252A | ++ |
| 1237/1238 | L249R | ++ |
| 1239/1240 | T156G/D250I | ++ |
| 1241/1242 | M38E/S251T/P252A | ++ |
| 1243/1244 | T156G/A255Y/K256S/V257D | ++ |
| 1245/1246 | N25A/V257D | ++ |
| 1247/1248 | T12M/A255V/K256S/V257D/E261D | ++ |
| 1249/1250 | N25A/T156G/E261D | ++ |
| 1251/1252 | T156G/P252A | ++ |
| 1253/1254 | T12M/N25A/A255V/K256S/V257D | + |
| 1255/1256 | T12M/N25A/E29D/T156G/A255S/V257D | + |
| 1257/1258 | E29D/T156G | + |
| 1259/1260 | S251T/P252A | + |
| 1261/1262 | K256S/V257D/E261D | + |
| 1263/1264 | N25A/T156G/A255Y/K256S/V257D | + |
| 1265/1266 | T12M/T156G/A255Y/K256S/V257D | + |
| 1267/1268 | T156G/L249R/S251T/P252A | + |
| 1269/1270 | N25A/E29D/A255V | + |
| 1271/1272 | T12M/E29D/T156G | + |
| 1273/1274 | A255V/K256S | + |
| 1275/1276 | T12M/A255Y/K256S | + |
| 1277/1278 | M38E/D250I/P252A | + |
| 1279/1280 | A247R/L249R/P252A | + |
| 1281/1282 | T12M/K256S/V257D | + |
| 1283/1284 | T12M/T156G/A255S/V257D | + |
| 1285/1286 | T12M/T156G/A255V/V257D | + |
| 1287/1288 | P60S | + |
| 1289/1290 | T12M/A255Y/K256S/E261D | + |
| 1291/1292 | T12M/K256S | + |
| 1293/1294 | T12M/A255S | + |
| 1295/1296 | A255S/V257D/E261D | + |
| 1297/1298 | T12M/T156G/K256S | + |
| 1299/1300 | T12M/A255Y/V257D/E261D | + |
| 1301/1302 | N25A/A255V/V257D/E261D | + |
| 1303/1304 | T12M/N25A/E29D/A255N/K256S/E261D | + |
| 1305/1306 | T12M/A255V/V257D | + |
| 1307/1308 | T12M/E29D/T156G/A255V/K256S | + |
| 1309/1310 | A255S/K256S | + |
| 1311/1312 | T12M/N25A/T156G/A255V/K256S | + |
| 1313/1314 | A247R/S251T/P252A | + |
| 1315/1316 | K256S/E261D | + |
| 1317/1318 | M38E/S251T | + |
| 1319/1320 | T12M/N25A/E29D/T156G/E261D | + |
| 1321/1322 | T12M/V257D | + |
| 1323/1324 | T156G/A255N/K256S/E261D | + |
| 1325/1326 | T12M/N25A/T156G/A255S | + |
| 1327/1328 | N25A/A255S | + |
| 1329/1330 | T12M/N25A/E29D/T156G/A255V/V257D/E261D | + |
| 1331/1332 | T12M/E29D/K256S/E261D | + |
| 1333/1334 | T156G/A255V/V257D | + |
| 1335/1336 | E29D/T156G/E261D | + |
| 1337/1338 | T12M/A255S/V257D/E261D | + |
| 1339/1340 | N25A/E29D/T156G/V257D/E261D | + |
| 1341/1342 | T12M/N25A/A255V/K256S/E261D | + |
| 1343/1344 | T12M/T156G/A255V/E261D | + |

Levels of increased activity were determined relative to the reference polypeptide of SEQ ID NO: 956 and defined as follows:
“+” > 1, “++” > 1.3, “+++” > 1.6, “++++” > 2.1

### Example 11

### Improvements Over SEQ ID NO: 956 in RNA Ligase Thermostability

[0620] The RNA ligase of SEQ ID NO: 956 was selected as the parent enzyme in an RNA ligation assay. Libraries of engineered genes were produced using known techniques (e.g., saturation mutagenesis, recombination of previously identified beneficial mutations). The polypeptides encoded by each gene were produced in high throughput (HTP) as described in Example 1, and the cell paste was generated as described in Example 2. To prepare lysate, 600 ul of 0.1 mg/mL lysozyme in 50 mM Tris-HCl buffer at pH 7.5 was added to the cell paste of each sample. After thorough resuspension at room temperature on a plate mixer for 30 min, the cells were diluted 8-fold in 50 mM Tris-HCl buffer at pH 7.5 then preincubated at 48° C. for 1 hour in a PCR thermocycler. The samples were then centrifuged for 10 min at 4000 rpm and 4° C. to remove the precipitated proteins, and the remainder clear supernatants were collected for ligation reactions.

[0621] The oligonucleotide mix for Reaction 1 in Example 4 were used as substrates in the ligation reaction. The lysate was screened in a 100 nanoliter reaction that comprised 50 mM Tris-HCl buffer at pH 7.5, 20 mM MgCl₂, 1 mM dithiothreitol (DTT), 8 mM adenosine triphosphate (ATP), and 1.6 mM of an equimolar mixture of the oligonucleotide fragments compromising Reaction 1. Nanoliter scale liquid transfers were carried out by Echo Acoustic Liquid Handler. The reactions were mixed by vortex, incubated for 2 hr at 37° C. in a PCR thermocycler, and quenched and diluted for analytical analysis by CE as described in Example 4. Using the peak area from CE analytical method, the % conversion for each sample was calculated as shown below:

$$\% conversion = \frac{area under the curve for the product peak}{\begin{matrix}Total area under the curve for \\ all products and remaining fragments\end{matrix}} * 100$$

[0622] Activity relative to SEQ ID NO: 956 (Activity FIOP) was calculated as the % conversion by the variant over the % conversion by SEQ ID NO: 956. The result is shown in Table 11.1.

TABLE 11.1
Activities of Variants Relative to SEQ ID NO:
956 after 48° C. Heat Challenge for 60 min

| | Amino Acid | |
|---|---|---|
| | Differences | Activity FIOP |
| SEQ ID | (Relative to | Relative to |
| NO: (nt/aa) | SEQ ID NO: 956) | SEQ ID NO: 956 |
| 1345/1346 | L157V | ++++ |
| 1347/1348 | I183L | ++++ |
| 1349/1350 | V95A | ++++ |
| 1351/1352 | I183V | ++++ |
| 1353/1354 | N185P | +++ |
| 1355/1356 | K181E | +++ |
| 1357/1358 | G213D | +++ |
| 1359/1360 | K89M | +++ |
| 1361/1362 | K89G | ++ |
| 1363/1364 | I28M | ++ |
| 1365/1366 | L190M | ++ |
| 1367/1368 | V214L | ++ |
| 1369/1370 | V143A | + |
| 1371/1372 | K89Q | + |
| 1373/1374 | V95G | + |

Levels of increased activity after preincubation at 48° C. for 1 hour were determined relative to the reference polypeptide of SEQ ID NO: 956 and defined as follows:
“+” > 1, “++” > 1.4, “+++” > 2, “++++” > 3

### Example 12

### Improvements Over SEQ ID NO: 1088 in RNA Ligase Thermostability

[0623] The RNA ligase of SEQ ID NO: 1088 was selected as the parent enzyme in an RNA ligation assay. Libraries of engineered genes were produced using known techniques (e.g., saturation mutagenesis, recombination of previously identified beneficial mutations). The polypeptides encoded by each gene were produced in high throughput (HTP) as described in Example 1, and the cell paste was generated as described in Example 2. To prepare lysate, 600 ul of 0.1 mg/mL lysozyme in 50 mM Tris-HCl buffer at pH 7.5 was added to the cell paste of each sample. After thorough resuspension at room temperature on a plate mixer for 30 min, the cells were diluted 8-fold in 50 mM Tris-HCl buffer at pH 7.5 then preincubated at 48° C. for 1 hour in a PCR thermocycler. The samples were then centrifuged for 10 min at 4000 rpm and 4° C. to remove the precipitated proteins, and the remainder clear supernatants were collected for ligation reactions.

[0624] The oligonucleotide mix for Reaction 1 in Example 4 were used as substrates in the ligation reaction. The lysate was screened in a 100 nanoliter reaction that comprised 50 mM Tris-HCl buffer at pH 7.5, 20 mM MgCl₂, 1 mM dithiothreitol (DTT), 8 mM adenosine triphosphate (ATP), and 1.6 mM of an equimolar mixture of the oligonucleotide fragments compromising Reaction 1. Nanoliter scale liquid transfers were carried out by Echo Acoustic Liquid Handler. The reactions were mixed by vortex, incubated for 2 hr at 37° C. in a PCR thermocycler, and quenched and diluted for analytical analysis by CE as described in Example 4. Using the peak area from CE analytical method, the % conversion for each sample was calculated as shown below:

$$\% conversion = \frac{area under the curve for the product peak}{\begin{matrix}Total area under the curve for all \\ products and remaining fragments\end{matrix}} * 100$$

[0625] Activity relative to SEQ ID NO: 1088 (Activity FIOP) was calculated as the % conversion by the variant over the % conversion by SEQ ID NO: 1088. The result is shown in Table 12.1.

TABLE 12.1
Activities of Variants Relative to SEQ ID NO:
1088 after 48° C. Heat Challenge for 60 min

| | Amino Acid | Activity FIOP |
|---|---|---|
| SEQ ID | Differences | Relative to |
| NO: (nt/aa) | (Relative to SEQ ID NO: 1088) | SEQ ID NO: 1088 |
| 1375/1376 | V95A/L157V | ++++ |
| 1377/1378 | V95G/I183V/N185P/V214L | ++++ |
| 1379/1380 | K89M/I183V | ++++ |
| 1381/1382 | I28M/K89G/V143M/I183L | ++++ |
| 1383/1384 | I28M/V143M/L157V | +++ |
| 1385/1386 | K181E/I183V | +++ |
| 1387/1388 | V143A/K181E/I183V/V214L | +++ |
| 1389/1390 | V143A/K181E/I183V | +++ |
| 1391/1392 | K89G/V143M/I183L | +++ |
| 1393/1394 | I28M/V143M/K181E/I183L | +++ |
| 1395/1396 | V143M/L157V | +++ |
| 1397/1398 | V95A/K181E/I183L | ++ |
| 1399/1400 | L157V | ++ |
| 1401/1402 | V143A/I183L | ++ |
| 1403/1404 | V143A/L157V | ++ |
| 1405/1406 | K89G/V143A/L157V/I183L | ++ |
| 1407/1408 | K89M/V95A/L157V | ++ |
| 1409/1410 | K89M/L157V | ++ |
| 1411/1412 | K89G/V95A/V143A/K181E | ++ |
| 1413/1414 | V95A/V143A | ++ |
| 1415/1416 | K89M/L157V/I183L/V214L | + |
| 1417/1418 | V143M/V214L | + |
| 1419/1420 | V143M/K181E/I183V/N185P | + |
| 1421/1422 | I28M/V95A/V143A | + |
| 1423/1424 | V143M/I183L/V214L | + |
| 1425/1426 | I28M/V95A/I183V/V214L | + |
| 1427/1428 | K89M/V143A/L157V | + |
| 1429/1430 | I28M/V95A | + |
| 1431/1432 | V95A/V143M/I183V/N185P | + |
| 1433/1434 | V95A/V143A/L157V/I183L | + |

Levels of increased activity after preincubation at 48° C. for 1 hour were determined relative to the reference polypeptide of SEQ ID NO: 956 and defined as follows:
“+” > 1, “++” > 3, “+++” > 5, “++++” > 9

### Example 13

### Improvements Over SEQ ID NO: 1416 in RNA Ligase Activity

[0626] The RNA ligase of SEQ ID NO: 1416 was selected as the parent enzyme in an RNA ligation assay. Libraries of engineered genes were produced using known techniques (e.g., saturation mutagenesis, recombination of previously identified beneficial mutations). The polypeptides encoded by each gene were produced in high throughput (HTP) as described in Example 1, and the cell paste was generated as described in Example 2. To prepare lysate, 600 ul of 0.1 mg/mL lysozyme in 50 mM Tris-HCl buffer at pH 7.5 was added to the cell paste of each sample. After thorough resuspension at room temperature on a plate mixer for 30 min, the cells were incubated at 40° C. for 1 hour in a PCR thermocycler. The samples were then centrifuged for 10 min at 4000 rpm and 4° C., and the clear supernatants were collected for ligation reactions.

[0627] The oligonucleotide mix for Reaction 2 in Example 4 were used as substrates in the ligation reaction. The lysate was screened in a 100 nanoliter reaction that comprised 50 mM Tris-HCl buffer at pH 7.5, 20 mM MgCl₂, 1 mM dithiothreitol (DTT), 8 mM adenosine triphosphate (ATP), and 1.25 mM of an equimolar mixture of the oligonucleotide fragments compromising Reaction 2. Nanoliter scale liquid transfers were carried out by Echo Acoustic Liquid Handler. The reactions were mixed by vortex, incubated for 2 hr at 37° C. in a PCR thermocycler, and quenched and diluted for analytical analysis by CE as described in Example 4. Using the peak area from CE analytical method, the % conversions of sense strand and antisense strand for each sample were calculated as shown below:

$$\% conversion = \frac{area under the curve for the product peak}{\begin{matrix}Total area under the curve for all \\ products and remaining fragments\end{matrix}} * 100$$

[0628] Activity relative to SEQ ID NO: 1416 (Activity FIOP) was calculated as the % conversion by the variant over the % conversion by SEQ ID NO: 1416. The result is shown in Table 13.1.

TABLE 13.1
Activities of Variants Relative to SEQ ID NO: 1416

| | Amino Acid | Activity FIOP on Sense | Activity FIOP on Antisense |
|---|---|---|---|
| SEQ ID | Differences | Strand | Strand |
| NO: | (Relative to | Relative to | Relative to |
| (nt/aa) | SEQ ID NO: 1416) | SEQ ID NO: 1416 | SEQ ID NO: 1416 |
| 1435/1436 | I83L/D137R/V150D | ++++ | |
| 1437/1438 | D137R/G213R | ++++ | +++ |
| 1439/1440 | D137R | ++++ | +++ |
| 1441/1442 | V150D/L190M | +++ | ++ |
| 1443/1444 | V143A/V150D | +++ | |
| 1445/1446 | L104T/V150D | +++ | ++ |
| 1447/1448 | P60A/V143A/V150D/L190M | +++ | ++ |
| 1449/1450 | P60A/V150D/L190M/G213R | +++ | + |
| 1451/1452 | L104T/D137R/C154V | +++ | ++ |
| 1453/1454 | D123K/D137R | ++ | ++++ |
| 1455/1456 | D137R/V150D/C154V/L190M | ++ | |
| 1457/1458 | D123K/V143T/V150D | ++ | ++++ |
| 1459/1460 | P60A/L104T/V143A/V150D/ | ++ | |
| | G213R | | |
| 1461/1462 | P60A/V95G/V143T/L190M | + | +++ |
| 1463/1464 | D123R/D137R/L190M | + | +++ |
| 1465/1466 | P60A/D123R | | ++++ |
| 1467/1468 | L104T/D123R | | ++++ |
| 1469/1470 | P60A/D123R/V143A | | ++++ |

Levels of increased activity on sense strand were determined relative to the reference polypeptide of SEQ ID NO: 1416 and defined as follows:
“+” > 1, “++” > 1.1, “+++” > 1.3, “++++” > 1.6
Levels of increased activity on antisense strand were determined relative to the reference polypeptide of SEQ ID NO: 1416 and defined as follows:
“+” > 1, “++” > 1.1, “+++” > 1.3, “++++” > 2

### Example 14

### Improvements Over SEQ ID NO: 1416 in RNA Ligase Activity

[0629] The RNA ligase of SEQ ID NO: 1416 was selected as the parent enzyme in an RNA ligation assay. Libraries of engineered genes were produced using known techniques (e.g., saturation mutagenesis, recombination of previously identified beneficial mutations). The polypeptides encoded by each gene were produced in high throughput (HTP) as described in Example 1, and the cell paste was generated as described in Example 2. To prepare lysate, 600 ul of 0.1 mg/mL lysozyme in 50 mM Tris-HCl buffer at pH 7.5 was added to the cell paste of each sample. After thorough resuspension at room temperature on a plate mixer for 1 hour, the cells were centrifuged for 20 min at 4000 rpm and 4° C. The supernatant was diluted 4-fold in 50 mM Tris-HCl buffer at pH 7.5 and incubated at 40° C. for 1 hour in a PCR thermocycler. The samples were then centrifuged for 10 min at 4000 rpm and 4° C., and the clear supernatants were collected for ligation reactions.

[0630] The oligonucleotide mix for Reaction 3 in Example 4 were used as substrates in the ligation reaction. The lysate was screened in a 100 nanoliter reaction that comprised 50 mM Tris-HCl buffer at pH 7.5, 20 mM MgCl₂, 1 mM dithiothreitol (DTT), 8 mM adenosine triphosphate (ATP), and 1.25 mM of an equimolar mixture of the oligonucleotide fragments compromising Reaction 3. Nanoliter scale liquid transfers were carried out by Echo Acoustic Liquid Handler. The reactions were mixed by vortex, incubated for 2 hr at 37° C. in a PCR thermocycler, and quenched and diluted for analytical analysis by CE as described in Example 4. Using the peak area from CE analytical method, the % conversions of sense strand and antisense strand for each sample were calculated as shown below:

$$\% conversion = \frac{area under the curve for the product peak}{\begin{matrix}Total area under the curve for all \\ products and remaining fragments\end{matrix}} * 100$$

[0631] Activity relative to SEQ ID NO: 1416 (Activity FIOP) was calculated as the % conversion by the variant over the % conversion by SEQ ID NO: 1416. The result is shown in Table 14.1.

TABLE 14.1: Activities of Variants Relative to SEQ ID NO: 1416

| | Amino Acid | Activity FIOP on | Activity FIOP on |
|---|---|---|---|
| SEQ ID | Differences | Antisense Strand | Sense Strand |
| NO: | (Relative to | relative to | relative to |
| (nt/aa) | SEQ ID NO: 1416) | SEQ ID NO: 1416 | SEQ ID NO: 1416 |
| 1477/1478 | M38V | ++++ | + |
| 1479/1480 | L249K | ++++ | |
| 1481/1482 | A255S | ++++ | |
| 1483/1484 | Y23K | ++++ | |
| 1485/1486 | G33L | ++++ | |
| 1487/1488 | A25G | ++++ | |
| 1489/1490 | I226R | ++++ | + |
| 1491/1492 | L249S | ++++ | |
| 1493/1494 | E29S | ++++ | |
| 1495/1496 | L37M | ++++ | + |
| 1497/1498 | M38A | ++++ | ++ |
| 1499/1500 | S10F | ++++ | |
| 1501/1502 | D250S | +++ | |
| 1503/1504 | G75D | +++ | ++ |
| 1505/1506 | T230V | +++ | |
| 1507/1508 | S77M | +++ | |
| 1509/1510 | S251E | +++ | ++ |
| 1511/1512 | Y23T | +++ | |
| 1513/1514 | G33V | +++ | |
| 1515/1516 | F228L | +++ | ++ |
| 1517/1518 | H81Y | +++ | ++ |
| 1519/1520 | Y224A | +++ | + |
| 1521/1522 | V64Q | +++ | + |
| 1523/1524 | S254K | +++ | + |
| 1525/1526 | E268F | ++ | |
| 1527/1528 | P65C | ++ | + |
| 1529/1530 | T232N | ++ | |
| 1531/1532 | L332E | ++ | + |
| 1533/1534 | L37K | ++ | |
| 1535/1536 | G331R | ++ | ++ |
| 1537/1538 | T330K | ++ | |
| 1539/1540 | A101P | ++ | |
| 1541/1542 | E268G | ++ | + |
| 1543/1544 | N307R | ++ | + |
| 1545/1546 | Y224Q | ++ | + |
| 1547/1548 | D137N | ++ | + |
| 1549/1550 | V223C | ++ | + |
| 1551/1552 | S280N | + | + |
| 1553/1554 | V289I | + | + |
| 1555/1556 | S288E | + | + |
| 1557/1558 | H342T | | +++ |
| 1559/1560 | V93K | | +++ |
| 1561/1562 | E268M | | ++ |
| 1563/1564 | R296Q | | ++ |
| 1565/1566 | K86G | | + |
| 1567/1568 | S241Q | | ++++ |
| 1569/1570 | D126M | | + |
| 1571/1572 | N277A | | ++ |
| 1573/1574 | K87E | | ++ |
| 1575/1576 | A247I | +++ | |
| 1577/1578 | F243H | ++ | |
| 1579/1580 | I84V | ++ | |
| 1581/1582 | I83A | ++ | |
| 1583/1584 | D192E | + | |
| 1585/1586 | V105K | + | |
| 1587/1588 | A25G/E29S | +++ | ++++ |
| 1589/1590 | A25G/E29S/D250S | ++ | +++ |
| 1591/1592 | A25G/E29S/G75D/S77M/D250S/A255S | +++ | ++ |
| 1593/1594 | A25G/G75D/T230V | ++ | ++ |
| 1595/1596 | A25G/S77M/I226R/A255S | +++ | +++ |
| 1597/1598 | A25G/T230V | ++ | ++++ |
| 1599/1600 | D250S/A255S | ++ | + |
| 1601/1602 | E29S/G75D/I226R/T230V/A255S | +++ | |
| 1603/1604 | E29S/G75D/S77M | +++ | + |
| 1605/1606 | E29S/G75D/S77M/I226R | + | + |
| 1607/1608 | E29S/G75D/S77M/T230V/A255S | + | +++ |
| 1609/1610 | E29S/I226R | +++ | ++++ |
| 1611/1612 | E29S/I226R/T230V | ++++ | +++ |
| 1613/1614 | E29S/T230V/A255S | ++ | |
| 1615/1616 | G33V/F228L | +++ | +++ |
| 1617/1618 | G33V/L249K | ++ | |
| 1619/1620 | G33V/L249S | +++ | |
| 1621/1622 | G33V/L37M/F228L | ++ | |
| 1623/1624 | G33V/L37M/M38A/F228L | ++++ | |
| 1625/1626 | G33V/L37M/M38A/F228L/L249K | +++ | |
| 1627/1628 | G33V/M38V | +++ | |
| 1629/1630 | G75D/D250S/A255S | + | |
| 1631/1632 | G75D/I226R | ++ | ++++ |
| 1633/1634 | G75D/I226R/D250S/A255S | ++ | |
| 1635/1636 | G75D/I226R/T230V/D250S/A255S | ++ | +++ |
| 1637/1638 | G75D/S77M | +++ | + |
| 1639/1640 | G75D/S77M/A255S | ++ | |
| 1641/1642 | G75D/S77M/D250S/A255S | +++ | +++ |
| 1643/1644 | G75D/S77M/I226R/A255S | + | ++++ |
| 1645/1646 | G75D/S77M/I226R/D250S/A255S | + | |
| 1647/1648 | G75D/S77M/T230V | ++++ | +++ |
| 1649/1650 | G75D/S77M/T230V/D250S | +++ | ++++ |
| 1651/1652 | G75D/T230V | +++ | ++++ |
| 1653/1654 | G75D/T230V/A255S | +++ | |
| 1655/1656 | G75D/T230V/D250S | ++++ | ++++ |
| 1657/1658 | I226R/A255S | + | ++++ |
| 1659/1660 | I226R/D250S | ++ | ++++ |
| 1661/1662 | I226R/T230V | +++ | ++++ |
| 1663/1664 | I226R/T230V/A255S | ++ | +++ |
| 1665/1666 | L37M/F228L | + | +++ |
| 1667/1668 | L37M/F228L/L249S | ++ | |
| 1669/1670 | L37M/M38A | + | +++ |
| 1671/1672 | L37M/M38A/F228L | +++ | |
| 1673/1674 | L37M/M38V/F228L/L249K | + | |
| 1675/1676 | L37M/M38V/L249K | + | + |
| 1677/1678 | M38A/L249S/A291T | + | ++++ |
| 1679/1680 | S10F/F228L | + | |
| 1681/1682 | S10F/F228L/L249K | ++ | |
| 1683/1684 | S10F/G33L/L249K | ++ | |
| 1685/1686 | S10F/G33L/L37M | ++ | + |
| 1687/1688 | S10F/G33L/L37M/M38A/L249K | ++ | +++ |
| 1689/1690 | S10F/G33L/M38A/L249S | +++ | |
| 1691/1692 | S10F/G33L/M38V | ++ | +++ |
| 1693/1694 | S10F/G33V/L249K/S251E | ++ | +++ |
| 1695/1696 | S10F/G33V/L37M | +++ | +++ |
| 1697/1698 | S10F/G33V/L37M/F228L | +++ | |
| 1699/1700 | S10F/G33V/L37M/L249K | ++ | |
| 1701/1702 | S10F/G33V/L37M/L249S | + | |
| 1703/1704 | S10F/G33V/L37M/M38A/F228L/L249K | +++ | |
| 1705/1706 | S10F/G33V/L37M/M38V | ++ | |
| 1707/1708 | S10F/G33V/L37M/M38V/F228L/L249K | +++ | |
| 1709/1710 | S10F/G33V/L37M/M38V/L249K | ++ | +++ |
| 1711/1712 | S10F/L249K | ++ | +++ |
| 1713/1714 | S10F/L249S | + | |
| 1715/1716 | S10F/L37M | ++ | +++ |
| 1717/1718 | S10F/L37M/F228L | + | ++++ |
| 1719/1720 | S10F/L37M/F228L/L249K | ++ | +++ |
| 1721/1722 | S10F/L37M/L249K | +++ | +++ |
| 1723/1724 | S10F/L37M/M38A/F228L | ++ | ++ |
| 1725/1726 | S10F/L37M/M38A/F228L/L249K | ++ | +++ |
| 1727/1728 | S10F/L37M/M38V | ++ | + |
| 1729/1730 | S10F/L37M/M38V/F228L | +++ | |
| 1731/1732 | S10F/L37M/M38V/F228L/L249S | +++ | +++ |
| 1733/1734 | S10F/M38A/L249K | +++ | + |
| 1735/1736 | S10F/M38V | +++ | +++ |
| 1737/1738 | S10F/M38V/F228L | ++ | +++ |
| 1739/1740 | S10F/M38V/L249S | +++ | + |
| 1741/1742 | S77M/A255S | +++ | |
| 1743/1744 | S77M/D250S | ++ | |
| 1745/1746 | S77M/D250S/A255S | +++ | |
| 1747/1748 | S77M/I226R | +++ | + |
| 1749/1750 | S77M/I226R/A255S | +++ | ++++ |
| 1751/1752 | S77M/T230V | +++ | +++ |
| 1753/1754 | S77M/T230V/A255S | +++ | ++ |
| 1755/1756 | T230V/A255S | +++ | ++++ |
| 1757/1758 | T230V/D250S | +++ | ++++ |
| 1759/1760 | T230V/D250S/A255S | + | |
| 1761/1762 | Y23T/A25G/I226R/A255S | + | ++++ |
| 1763/1764 | Y23T/A25G/I226R/T230V | ++++ | +++ |
| 1765/1766 | Y23T/A25G/T230V | +++ | +++ |

Levels of increased activity were determined for Activity FIOP on Antisense Strand relative to SEQ ID NO: 1416 and are defined as follows:
“+” > 1.0, “++” > 1.1, “+++” > 1.3, “++++” > 1.7. Levels of
increased activity were determined for Activity FIOP on Sense Strand relative to SEQ ID NO: 1416 and are defined as follows:
“+” > 1.0, “++” > 1.2, “+++” > 1.5, “++++” > 3.0.

### Example 15

### Improvements Over SEQ ID NO: 1612 in RNA Ligase Activity

[0632] The RNA ligase of SEQ ID NO: 1612 was selected as the parent enzyme in an RNA ligation assay. Libraries of engineered genes were produced using known techniques (e.g., saturation mutagenesis, recombination of previously identified beneficial mutations). The polypeptides encoded by each gene were produced in high throughput (HTP) as described in Example 1, and the cell paste was generated as described in Example 2. To prepare lysate, 600 ul of 0.1 mg/mL lysozyme in 50 mM Tris-HCl buffer at pH 7.5 was added to the cell paste of each sample. After thorough resuspension at room temperature on a plate mixer for 1 hour, the cells were centrifuged for 20 min at 4000 rpm and 4° C. The supernatant was diluted 4-fold in 50 mM Tris-HCl buffer at pH 7.5 and incubated at 40° C. for 1 hour in a PCR thermocycler. The samples were then centrifuged for 10 min at 4000 rpm and 4° C., and the clear supernatants were collected for ligation reactions.

[0633] The oligonucleotide mix for Reaction 3 in Example 4 were used as substrates in the ligation reaction. The lysate was screened in a 100 nanoliter reaction that comprised 50 mM Tris-HCl buffer at pH 7.5, 20 mM MgCl₂, 1 mM dithiothreitol (DTT), 8 mM adenosine triphosphate (ATP), and 1.25 mM of an equimolar mixture of the oligonucleotide fragments compromising Reaction 3. Nanoliter scale liquid transfers were carried out by Echo Acoustic Liquid Handler. The reactions were mixed by vortex, incubated for 2 hr at 37° C. in a PCR thermocycler, and quenched and diluted for analytical analysis by CE as described in Example 4. Using the peak area from CE analytical method, the % conversions of sense strand and antisense strand for each sample were calculated as shown below:

$$\% conversion = \frac{area under the curve for the product peak}{\begin{matrix}Total area under the curve for all \\ products and remaining fragments\end{matrix}} * 100$$

[0634] Activity relative to SEQ ID NO: 1612 (Activity FIOP) was calculated as the % conversion by the variant over the % conversion by SEQ ID NO: 1612. The result is shown in Table 15.1.

TABLE 15.1: Activities of Variants Relative to SEQ ID NO: 1612

| | Amino Acid | Activity FIOP on | Activity FIOP on |
|---|---|---|---|
| SEQ ID | Differences | Antisense Strand | Sense Strand |
| NO: | (Relative to | relative to | relative to |
| (nt/aa) | SEQ ID NO: 1612) | SEQ ID NO: 1612 | SEQ ID NO: 1612 |
| 1767/1768 | A101P | + | ++ |
| 1769/1770 | A291T | +++ | ++ |
| 1771/1772 | A291T/N307R | | ++++ |
| 1773/1774 | G331R | +++ | |
| 1775/1776 | G33V/G75D | ++ | ++ |
| 1777/1778 | G33V/G75D/L249K/A291T/G331R | ++ | |
| 1779/1780 | G33V/M38A | + | |
| 1781/1782 | G33V/V93K/L249K | | + |
| 1783/1784 | M38A/G75D/A291T/N307R | ++ | |
| 1785/1786 | M38V/G75D/L249K/D250S | + | + |
| 1787/1788 | M38V/G75D/V93K/S271G | ++ | + |
| 1789/1790 | M38V/V93K | + | |
| 1791/1792 | S10F/G75D | ++ | |
| 1793/1794 | S10F/M38A/G75D | ++ | ++++ |
| 1795/1796 | S10F/M38V/G75D/A291T | ++ | ++ |
| 1797/1798 | S10F/M38V/G75D/L249K | ++ | +++ |
| 1799/1800 | S10F/M38V/G75D/V93K | ++ | |
| 1801/1802 | V64Q/Y224A | + | +++ |
| 1803/1804 | Y224A | + | + |
| 1805/1806 | Y224Q | ++ | ++++ |
| 1807/1808 | Y23T/A101P/N307K | +++ | ++ |
| 1809/1810 | Y23T/E268F | ++ | ++ |
| 1811/1812 | Y23T/L37K/V64Q/Y224A/S254K | ++++ | ++++ |
| 1813/1814 | Y23T/V64Q/H81Y | +++ | |
| 1815/1816 | Y23T/Y224A/E268F | ++ | ++ |
| 1817/1818 | Y23T/Y224A/S254K | +++ | +++ |
| 1819/1820 | Y23T | ++++ | +++ |
| 1821/1822 | Y23T/V64Q/Y224A | +++ | ++++ |
| 1823/1824 | V64Q | +++ | +++ |
| 1825/1826 | G75D/L249K/N307R | +++ | + |
| 1827/1828 | V93K | ++++ | + |
| 1829/1830 | G33V/M38A/G75D/L249K | ++++ | ++++ |
| 1831/1832 | G75D/L249K | +++ | |
| 1833/1834 | A25S/M38V/G75D/V93K/A291T | +++ | +++ |
| 1835/1836 | G33V/M38A/G75D | ++++ | +++ |
| 1837/1838 | G75D | ++++ | ++++ |
| 1839/1840 | Y23T/S254K | ++++ | +++ |

Levels of increased activity were determined for Activity FIOP on Antisense Strand relative to SEQ ID NO: 1612 and are defined as follows:
“+” > 1.0, “++” > 1.2, “+++” > 1.7, “++++” > 3.0. Levels of increased
activity were determined for Activity FIOP on Sense Strand relative to SEQ ID NO: 1612 and are defined as follows:
“+” > 1.0, “++” > 1.2, “+++” > 1.5, “++++” > 2.5.

### Example 16

### Improvements Over SEQ ID NO: 1840 in RNA Ligase Activity

[0635] The RNA ligase of SEQ ID NO: 1840 was selected as the parent enzyme in an RNA ligation assay. Libraries of engineered genes were produced using known techniques (e.g., saturation mutagenesis, recombination of previously identified beneficial mutations). The polypeptides encoded by each gene were produced in high throughput (HTP) as described in Example 1, and the cell paste was generated as described in Example 2. To prepare lysate, 600 ul of 0.1 mg/mL lysozyme in 50 mM Tris-HCl buffer at pH 7.5 was added to the cell paste of each sample. After thorough resuspension at room temperature on a plate mixer for 1 hour, the cells were centrifuged for 20 min at 4000 rpm and 4° C. The supernatant was incubated at 40° C. for 1 hour in a PCR thermocycler. The samples were then centrifuged for 10 min at 4000 rpm and 4° C., and the clear supernatants were collected for ligation reactions.

[0636] The oligonucleotide mix for Reaction 3 in Example 4 were used as substrates in the ligation reaction. The lysate was screened in a 100 nanoliter reaction that comprised 50 mM Tris-HCl buffer at pH 7.5, 20 mM MgCl₂, 1 mM dithiothreitol (DTT), 8 mM adenosine triphosphate (ATP), and 1.75 mM of an equimolar mixture of the oligonucleotide fragments compromising Reaction 3. Nanoliter scale liquid transfers were carried out by Echo Acoustic Liquid Handler. The reactions were mixed by vortex, incubated for 2 hr at 37° C. in a PCR thermocycler, and quenched and diluted for analytical analysis by CE as described in Example 4. Using the peak area from CE analytical method, the % conversions of sense strand and antisense strand for each sample were calculated as shown below:

$$\% conversion = \frac{area under the curve for the product peak}{\begin{matrix}Total area under the curve for all \\ products and remaining fragments\end{matrix}} * 100$$

[0637] Activity relative to SEQ ID NO: 1840 (Activity FIOP) was calculated as the % conversion by the variant over the % conversion by SEQ ID NO: 1840. The result is shown in Table 16.1.

TABLE 16.1
Activities of Variants Relative to SEQ ID NO: 1840

| | Amino Acid | Activity FIOP on | Activity FIOP on |
|---|---|---|---|
| SEQ | Differences | Antisense Strand | Sense Strand |
| ID NO: | (Relative to SEQ | relative to SEQ | relative to SEQ |
| (nt/aa) | ID NO: 1840) | ID NO: 1840 | ID NO: 1840 |
| 1841/1842 | M38A/P65C/D192E | ++++ | + |
| 1843/1844 | M38T/P65C | ++++ | ++ |
| 1845/1846 | M38A/P65C/Y224R | ++++ | + |
| 1847/1848 | M38A/V64Q | ++++ | ++++ |
| 1849/1850 | V93K/N307R | ++++ | +++ |
| 1851/1852 | M38A | ++++ | +++ |
| 1853/1854 | M38A/Y224A | +++ | +++ |
| 1855/1856 | M38A/D192E/Y224R | +++ | +++ |
| 1857/1858 | P65C | +++ | |
| 1859/1860 | M38A/D192E/Y224A | +++ | +++ |
| 1861/1862 | D192E/Y224A | +++ | +++ |
| 1863/1864 | G75D/N307R | +++ | + |
| 1865/1866 | G75D/D250I/E268G/ | +++ | ++ |
| | N307R | | |
| 1867/1868 | D250I/E268G/N307R/ | +++ | ++ |
| | H342T | | |
| 1869/1870 | Y224R | ++ | +++ |
| 1871/1872 | P65C/D192E | ++ | ++ |
| 1873/1874 | E268G | ++ | +++ |
| 1875/1876 | V64Q/D192E | ++ | ++ |
| 1877/1878 | D250I/E268G/A291T/ | ++ | ++ |
| | H342T | | |
| 1879/1880 | G75D/V93K/L249K/ | ++ | |
| | N307R/H342T | | |
| 1881/1882 | D250I/A291T | ++ | +++ |
| 1883/1884 | M38A/V64Q/D192E | ++ | ++++ |
| 1885/1886 | M38A/V64Q/Y224R | ++ | ++ |
| 1887/1888 | V93K/L249K/N307R | ++ | + |
| 1889/1890 | M38A/V64Q/K86G/ | ++ | ++ |
| | D192E/S241R | | |
| 1891/1892 | M38A/H342T | ++ | + |
| 1893/1894 | D192E/Y224R | + | ++ |
| 1895/1896 | K248G/D250I/N307R | + | ++++ |
| 1897/1898 | G75D/S77M/D250I/ | + | + |
| | E268G/N307R/H342T | | |
| 1899/1900 | V93K/E268G | + | ++ |
| 1901/1902 | D192E | + | ++ |
| 1903/1904 | M38A/D192E | + | ++++ |
| 1905/1906 | V64Q | + | ++++ |

Levels of increased activity were determined for Activity FIOP on Antisense Strand relative to SEQ ID NO: 1840 and are defined as follows: “+” > 1.2, “++” > 1.23, “+++” > 1.3, “++++” > 1.4. Levels of increased activity were determined for Activity FIOP on Sense Strand relative to SEQ ID NO: 1840 and are defined as follows: “+” > 1.0, “++” > 1.1, “+++” > 1.3, “++++” > 1.55.

### Example 17

### Improvements Over SEQ ID NO: 1416 in RNA Ligase Activity

[0638] The RNA ligase of SEQ ID NO: 1416 was selected as the parent enzyme in an RNA ligation assay. Libraries of engineered genes were produced using known techniques (e.g., saturation mutagenesis, recombination of previously identified beneficial mutations). The polypeptides encoded by each gene were produced in high throughput (HTP) as described in Example 1, and the cell paste was generated as described in Example 2. To prepare lysate, 600 ul of 0.1 mg/mL lysozyme in 50 mM Tris-HCl buffer at pH 7.5 was added to the cell paste of each sample. After thorough resuspension at room temperature on a plate mixer for 1 hour, the cells were centrifuged for 20 min at 4000 rpm and 4° C. The supernatant was incubated at 40° C. for 1 hour in a PCR thermocycler. The samples were then centrifuged for 10 min at 4000 rpm and 4° C., and the clear supernatants were collected for ligation reactions.

[0639] The oligonucleotide mix for Reaction 4 in Example 4 were used as substrates in the ligation reaction. The lysate was screened in a 100 nanoliter reaction that comprised 50 mM Tris-HCl buffer at pH 7.5, 20 mM MgCl₂, 1 mM dithiothreitol (DTT), 8 mM adenosine triphosphate (ATP), and 1.25 mM of an equimolar mixture of the oligonucleotide fragments compromising Reaction 4. Nanoliter scale liquid transfers were carried out by Echo Acoustic Liquid Handler. The reactions were mixed by vortex, incubated for 2 hr at 37° C. in a PCR thermocycler, and quenched and diluted for analytical analysis by CE as described in Example 4. Using the peak area from CE analytical method, the % conversions of sense strand and antisense strand for each sample were calculated as shown below:

$$\% conversion = \frac{area under the curve for the product peak}{\begin{matrix}Total area under the curve for all \\ products and remaining fragments\end{matrix}} * 100$$

[0640] Activity relative to SEQ ID NO: 1416 (Activity FIOP) was calculated as the % conversion by the variant over the % conversion by SEQ ID NO: 1416. The result is shown in Table 17.1.

TABLE 17.1
Activities of Variants Relative to SEQ ID NO: 1416

| | Amino Acid | Activity FIOP on | Activity FIOP on |
|---|---|---|---|
| SEQ | Differences | Antisense Strand | Sense Strand |
| ID NO: | (Relative to SEQ | relative to SEQ | relative to SEQ |
| (nt/aa) | ID NO: 1416) | ID NO: 1416 | ID NO: 1416 |
| 1481/1482 | A255S | +++ | +++ |
| 1507/1508 | S77M | ++ | +++ |
| 1509/1510 | S251E | ++ | ++ |
| 1511/1512 | Y23T | ++ | + |
| 1527/1528 | P65C | ++++ | ++++ |
| 1529/1530 | T232N | + | |
| 1539/1540 | A101P | ++++ | ++++ |
| 1551/1552 | S280N | +++ | ++++ |
| 1563/1564 | R296Q | + | ++ |
| 1571/1572 | N277A | ++ | ++ |
| 1581/1582 | I83A | + | + |
| 1907/1908 | K86D | ++++ | ++++ |
| 1909/1910 | A255V | ++++ | ++++ |
| 1911/1912 | I306T | ++++ | ++++ |
| 1913/1914 | D250I | +++ | +++ |
| 1915/1916 | G75A | +++ | +++ |
| 1917/1918 | F318S | +++ | +++ |
| 1919/1920 | N335Q | +++ | +++ |
| 1921/1922 | S241G | +++ | ++ |
| 1923/1924 | D250E | ++ | ++ |
| 1925/1926 | K248F | ++ | |
| 1927/1928 | V344K | ++ | ++ |
| 1929/1930 | M38S | ++ | ++ |
| 1931/1932 | E272S | ++ | + |
| 1933/1934 | I83G | ++ | ++ |
| 1935/1936 | I306L | ++ | ++ |
| 1937/1938 | E272M | + | + |
| 1939/1940 | K248G | + | + |
| 1941/1942 | V257E | + | + |
| 1943/1944 | E258M | + | + |
| 1945/1946 | S323G | + | + |

Levels of increased activity were determined for Activity FIOP on Antisense Strand relative to SEQ ID NO: 1416 and are defined as follows: “+” > 1.1, “++” > 1.12, “+++” > 1.17, “++++” > 1.3. Levels of increased activity were determined for Activity FIOP on Sense Strand relative to SEQ ID NO: 1416 and are defined as follows: “+” > 1.0, “++” > 1.1, “+++” > 1.2, “++++” > 1.35.

### Example 18

### Improvements Over SEQ ID NO: 1866 in RNA Ligase Activity

[0641] The RNA ligase of SEQ ID NO: 1866 was selected as the parent enzyme in an RNA ligation assay. Libraries of engineered genes were produced using known techniques (e.g., saturation mutagenesis, recombination of previously identified beneficial mutations). The polypeptides encoded by each gene were produced in high throughput (HTP) as described in Example 1, and the cell paste was generated as described in Example 2. To prepare lysate, 600 ul of 0.1 mg/mL lysozyme in 50 mM Tris-HCl buffer at pH 7.5 was added to the cell paste of each sample. After thorough resuspension at room temperature on a plate mixer for 1 hour, the cells were centrifuged for 20 min at 4000 rpm and 4° C. The supernatant was incubated at 40° C. for 1 hour in a PCR thermocycler. The samples were then centrifuged for 10 min at 4000 rpm and 4° C., and the clear supernatants were collected for ligation reactions.

[0642] The oligonucleotide mix for Reaction 4 in Example 4 were used as substrates in the ligation reaction. The lysate was screened in a 100 nanoliter reaction that comprised 50 mM Tris-HCl buffer at pH 7.5, 20 mM MgCl₂, 1 mM dithiothreitol (DTT), 8 mM adenosine triphosphate (ATP), and 1.25 mM of an equimolar mixture of the oligonucleotide fragments compromising Reaction 4. Nanoliter scale liquid transfers were carried out by Echo Acoustic Liquid Handler. The reactions were mixed by vortex, incubated for 2 hr at 37° C. in a PCR thermocycler, and quenched and diluted for analytical analysis by CE as described in Example 4. Using the peak area from CE analytical method, the % conversions of sense strand and antisense strand for each sample were calculated as shown below:

$$\% conversion = \frac{area under the curve for the product peak}{\begin{matrix}Total area under the curve for all \\ products and remaining fragments\end{matrix}} * 100$$

[0643] Activity relative to SEQ ID NO: 1866 (Activity FIOP) was calculated as the % conversion by the variant over the % conversion by SEQ ID NO: 1866. The result is shown in Table 18.1.

TABLE 18.1
Activities of Variants Relative to SEQ ID NO: 1866

| | Amino Acid | Activity FIOP on | Activity FIOP on |
|---|---|---|---|
| SEQ | Differences | Antisense Strand | Sense Strand |
| ID NO: | (Relative to SEQ | relative to SEQ | relative to SEQ |
| (nt/aa) | ID NO: 1866) | ID NO: 1866 | ID NO: 1866 |
| 1947/1948 | M38S/K248F/S251E | ++++ | ++++ |
| 1949/1950 | M38S/K248F/I250E/S251E/N277A | ++++ | ++++ |
| 1951/1952 | K248F/I250E/S251E | ++++ | ++++ |
| 1953/1954 | M38S/V93K/D192E/K248F/S251E | ++++ | ++++ |
| 1955/1956 | M38S/D192E/K248F/S251E | ++++ | +++ |
| 1957/1958 | I250E/S251E | ++++ | ++++ |
| 1959/1960 | M38S/K248F/I250E/S251E | +++ | ++++ |
| 1961/1962 | K248F/S251E/V344K | +++ | +++ |
| 1963/1964 | D192E/K248F/I250E/S251R | +++ | +++ |
| 1965/1966 | M38S/K248F/I250E | +++ | +++ |
| 1967/1968 | M38S/V93K/I250E/S251E/N277A | +++ | ++++ |
| 1969/1970 | M38A/A255V/S280N/F318S | +++ | +++ |
| 1971/1972 | K248F | +++ | ++ |
| 1973/1974 | M38A/K86D/S241G/A255V/ | +++ | +++ |
| | S280N/F318S/N335Q | | |
| 1975/1976 | M38A/A255S | +++ | +++ |
| 1977/1978 | M38A | +++ | +++ |
| 1979/1980 | F318S | ++ | +++ |
| 1981/1982 | M38A/A101P/A255S/S280N | ++ | +++ |
| 1983/1984 | M38A/F318S/N335Q | ++ | ++ |
| 1985/1986 | M38A/A255V/F318S | ++ | ++ |
| 1987/1988 | D192E/I250E/S251E/V344K | ++ | +++ |
| 1989/1990 | M38A/N335Q | ++ | ++ |
| 1991/1992 | F318S/N335Q | ++ | +++ |
| 1993/1994 | M38S/N277A | ++ | +++ |
| 1995/1996 | M38S/V93K/S251E | ++ | +++ |
| 1997/1998 | D192E/S251E | ++ | ++ |
| 1999/2000 | A255S | ++ | ++ |
| 2001/2002 | M38A/V64Q/F318S | ++ | ++ |
| 2003/2004 | K248I | ++ | + |
| 2005/2006 | M38A/V64Q/S241G/A255V/F318S | ++ | ++ |
| 2007/2008 | S251E | + | ++ |
| 2009/2010 | V64Q/A101P/A255V/S280N/F318S | + | + |
| 2011/2012 | M38A/A101P/A255V/S280N/F318S/N335Q | + | + |
| 2013/2014 | M38A/A255V/S280N | + | + |
| 2015/2016 | M38S/S251R/N277A | + | ++ |
| 2017/2018 | V64Q/F318S | + | + |
| 2019/2020 | M38A/V64Q/A255V/F318S | + | + |
| 2021/2022 | S241G/A255S/S280N/F318S | + | + |
| 2023/2024 | A255V | + | + |
| 2025/2026 | M38A/K86D/A101P/S241G/F318S | + | + |
| 2027/2028 | M38A/S241G | + | ++ |
| 2029/2030 | M38A/A255S/F318S/N335Q | + | + |
| 2031/2032 | M38A/V64Q/A101P/F318S | + | + |
| 2033/2034 | M38A/V64Q/A255V/S280N/F318S | + | + |
| 2035/2036 | S241G/A255S/F318S | + | + |
| 2037/2038 | M38A/S241G/N335Q | + | |

Levels of increased activity were determined for Activity FIOP on Antisense Strand relative to SEQ ID NO: 1866 and are defined as follows: “+” > 1.0, “++” > 1.2, “+++” > 1.4, “++++” > 1.9. Levels of increased activity were determined for Activity FIOP on Sense Strand relative to SEQ ID NO: 1866 and are defined as follows: “+” > 1.0, “++” > 1.5, “+++” > 2.0, “++++” > 3.0.

### Example 19

### Improvements Over SEQ ID NO: 1954 in RNA Ligase Activity

[0644] SEQ ID NO: 1954 was selected as the parent enzyme in an RNA ligation assay. Libraries of engineered genes were produced using known techniques (e.g., saturation mutagenesis, recombination of previously identified beneficial mutations). The polypeptides encoded by each gene were produced in high throughput (HTP) as described in Example 1, and the cell paste was generated as described in Example 2. To prepare lysate, 600 ul of 0.1 mg/mL lysozyme in 50 mM Tris-HCl buffer at pH 7.5 was added to the cell paste of each sample. After thorough resuspension at room temperature on a plate mixer for 1 hour, the cells were centrifuged for 20 min at 4000 rpm and 4° C. The supernatant was diluted 2-fold in 50 mM Tris-HCl buffer at pH 7.5 and incubated at 40° C. for 1 hour in a PCR thermocycler. The samples were then centrifuged for 10 min at 4000 rpm and 4° C., and the clear supernatants were collected for ligation reactions.

[0645] The oligonucleotide mix for Reaction 5 in Example 4 were used as substrates in the ligation reaction. The lysate was screened in a 100 nanoliter reaction that comprised 50 mM Tris-HCl buffer at pH 7.5, 20 mM MgCl₂, 1 mM dithiothreitol (DTT), 8 mM adenosine triphosphate (ATP), and 1.25 mM of an equimolar mixture of the oligonucleotide fragments compromising Reaction 5. Nanoliter scale liquid transfers were carried out by Echo Acoustic Liquid Handler. The reactions were mixed by vortex, incubated for 2 hr at 33° C. in a PCR thermocycler, and quenched and diluted for analytical analysis by CE as described in Example 4. Using the peak area from CE analytical method, the % conversions of sense strand and antisense strand for each sample were calculated as shown below:

$$\% conversion = \frac{area under the curve for the product peak}{\begin{matrix}Total area under the curve for all \\ products and remaining fragments\end{matrix}} * 100$$

[0646] Activity relative to SEQ ID NO: 1954 (Activity FIOP) was calculated as the % conversion by the variant over the % conversion by SEQ ID NO: 1954. The result is shown in Table 19.1.

TABLE 19.1
RNA ligase 2 activity relative to SEQ ID NO: 1954

| | Amino Acid | Activity FIOP on | Activity FIOP on |
|---|---|---|---|
| SEQ | Differences | Antisense Strand | Sense Strand |
| ID NO: | (Relative to SEQ | relative to SEQ | relative to SEQ |
| (nt/aa) | ID NO: 1954) | ID NO: 1954 | ID NO: 1954 |
| 2039/2040 | K93V/T232N/A291T/I306L | ++++ | ++++ |
| 2041/2042 | K93V/T232N/S280N/I306L | ++++ | ++++ |
| 2043/2044 | K93V/S241G/V257E/I306L/N335Q | ++++ | ++++ |
| 2045/2046 | T232N/S280N | ++++ | ++++ |
| 2047/2048 | K93V/A291T/I306L | ++++ | +++ |
| 2049/2050 | K93V/V257E | ++++ | ++++ |
| 2051/2052 | K93V/I306L | ++++ | +++ |
| 2053/2054 | K93V/S280N | ++++ | +++ |
| 2055/2056 | E192D/F318S | ++++ | ++ |
| 2057/2058 | K93V/S280N/A291T | ++++ | +++ |
| 2059/2060 | K93V/S241G/A291T/I306L | +++ | ++ |
| 2061/2062 | E192D | +++ | ++ |
| 2063/2064 | V257E/A291T | +++ | +++ |
| 2065/2066 | S241G/V257E/I306L | +++ | +++ |
| 2067/2068 | S280N/N335Q | +++ | ++ |
| 2069/2070 | K93V/A291T/I306L/N335Q | +++ | ++ |
| 2071/2072 | K93V/N335Q | +++ | ++ |
| 2073/2074 | K93V/T232N/N335Q | ++ | ++ |
| 2075/2076 | V64Q/F318S | ++ | ++ |
| 2077/2078 | K93V/S241G | ++ | ++ |
| 2079/2080 | K93V/T232N/S241G/S280N | ++ | ++ |
| 2081/2082 | V64Q/E192D/F318S/S323G | ++ | + |
| 2083/2084 | T232N/S280N/I306L | ++ | ++ |
| 2085/2086 | K93V/T232N | ++ | ++ |
| 2087/2088 | A291T/N335Q | ++ | ++ |
| 2089/2090 | V257E/E258M | ++ | +++ |
| 2091/2092 | K93V/T232N/S241G/V257E/E258M/S280N/N335Q | ++ | +++ |
| 2093/2094 | F318S/S323G | ++ | + |
| 2095/2096 | K93V/S241G/A291T/N335Q | ++ | ++ |
| 2097/2098 | I83A/K86D/S323G | ++ | + |
| 2099/2100 | V257E/E258M/A291T | + | ++ |
| 2101/2102 | A101P/Y224A/F318S | + | + |
| 2103/2104 | I83A/E192D/A255V/R296Q | + | ++ |
| 2105/2106 | A171S/T232N/V257E/E258M/S280N | + | ++ |
| 2107/2108 | I83A/Y224A/A255V/F318S | + | + |
| 2109/2110 | V64Q/E192D/I250E/F318S | + | + |
| 2111/2112 | A101P/R296Q | + | ++ |
| 2113/2114 | T232N/S241G/S280N | + | + |
| 2115/2116 | V64Q/A255V/F318S | + | + |
| 2117/2118 | K86D/I250E/A255V | + | + |
| 2119/2120 | I83A/K86D/A101P | + | + |
| 2121/2122 | I83A/K86D | + | + |
| 2123/2124 | K93V/S241G/E258M/N335Q | + | + |
| 2125/2126 | I250E/R296Q/S323G | + | + |
| 2127/2128 | V257E/E258M/S280N | + | ++ |

Levels of increased activity were determined for Activity FIOP on Antisense Strand relative to SEQ ID NO: 1954 and are defined as follows: “+” > 1.0, “++” > 1.2, “+++” > 1.4, “++++” > 1.5. Levels of increased activity were determined for Activity FIOP on Sense Strand relative to SEQ ID NO: 1954 and are defined as follows: “+” > 1.0, “++” > 1.2, “+++” > 1.4, “++++” > 1.55.

### Example 20

### Improvements Over SEQ ID NO: 1866 in RNA Ligase Activity

[0647] SEQ ID NO: 1866 was selected as the parent enzyme in an RNA ligation assay. Libraries of engineered genes were produced using known techniques (e.g., saturation mutagenesis, recombination of previously identified beneficial mutations). The polypeptides encoded by each gene were produced in high throughput (HTP) as described in Example 1, and the cell paste was generated as described in Example 2. To prepare lysate, 600 ul of 0.1 mg/mL lysozyme in 50 mM Tris-HCl buffer at pH 7.5 was added to the cell paste of each sample. After thorough resuspension at room temperature on a plate mixer for 1 hour, the cells were centrifuged for 20 min at 4000 rpm and 4° C. The supernatant was incubated at 40° C. for 1 hour in a PCR thermocycler. The samples were then centrifuged for 10 min at 4000 rpm and 4° C., and the clear supernatants were collected for ligation reactions.

[0648] The oligonucleotide mix for Reaction 6 in Example 4 were used as substrates in the ligation reaction. The lysate was screened in a 100 nanoliter reaction that comprised 50 mM Tris-HCl buffer at pH 7.5, 20 mM MgCl₂, 1 mM dithiothreitol (DTT), 8 mM adenosine triphosphate (ATP), and 1.25 mM of an equimolar mixture of the oligonucleotide fragments compromising Reaction 6. Nanoliter scale liquid transfers were carried out by Echo Acoustic Liquid Handler. The reactions were mixed by vortex, incubated for 2 hr at 33° C. in a PCR thermocycler, and quenched and diluted for analytical analysis by CE as described in Example 4. Using the peak area from CE analytical method, the % conversions of sense strand and antisense strand for each sample were calculated as shown below:

$$\% conversion = \frac{area under the curve for the product peak}{\begin{matrix}Total area under the curve for all \\ products and remaining fragments\end{matrix}} * 100$$

[0649] Activity relative to SEQ ID NO: 1866 (Activity FIOP) was calculated as the % conversion by the variant over the % conversion by SEQ ID NO: 1866. The result is shown in Table 20.1.

TABLE 20.1
RNA ligase 2 activity relative to SEQ ID NO: 1866

| | Amino Acid | Activity FIOP on | Activity FIOP on |
|---|---|---|---|
| SEQ | Differences | Antisense Strand | Sense Strand |
| ID NO: | (Relative to SEQ | relative to SEQ | relative to SEQ |
| (nt/aa) | ID NO: 1866) | ID NO: 1866 | ID NO: 1866 |
| 2129/2130 | M89D | ++++ | ++++ |
| 2131/2132 | M89E | ++++ | ++++ |
| 2133/2134 | V122F | ++++ | +++ |
| 2135/2136 | K181P | ++++ | ++++ |
| 2137/2138 | I28V | ++++ | ++++ |
| 2139/2140 | G125K | ++++ | ++++ |
| 2141/2142 | K181R | ++++ | ++++ |
| 2143/2144 | V157F | ++++ | ++++ |
| 2145/2146 | C238K | ++++ | ++++ |
| 2147/2148 | M89Q | ++++ | ++++ |
| 2149/2150 | M89S | ++++ | ++++ |
| 2151/2152 | T330E | ++++ | +++ |
| 2153/2154 | V122C | ++++ | ++++ |
| 2155/2156 | M89Y | ++++ | ++++ |
| 2157/2158 | M89C | ++++ | ++++ |
| 2159/2160 | T212E | ++++ | ++++ |
| 2161/2162 | M89W | ++++ | +++ |
| 2163/2164 | V143S | ++++ | ++++ |
| 2165/2166 | M89V | ++++ | ++++ |
| 2167/2168 | A208P | ++++ | ++++ |
| 2169/2170 | T290D | ++++ | +++ |
| 2171/2172 | L161V | ++++ | ++++ |
| 2173/2174 | L161M | +++ | ++++ |
| 2175/2176 | L214C | +++ | +++ |
| 2177/2178 | K181N | +++ | ++++ |
| 2179/2180 | I84V | +++ | ++++ |
| 2181/2182 | F270L | +++ | +++ |
| 2183/2184 | S91A | +++ | +++ |
| 2185/2186 | G295V | +++ | +++ |
| 2187/2188 | V122W | +++ | ++ |
| 2189/2190 | L316Y | +++ | +++ |
| 2191/2192 | I286E | +++ | +++ |
| 2193/2194 | T301M | +++ | +++ |
| 2195/2196 | F170Y | +++ | +++ |
| 2197/2198 | K264A | +++ | +++ |
| 2199/2200 | V289D | +++ | +++ |
| 2201/2202 | V289T | +++ | +++ |
| 2203/2204 | T290P | +++ | +++ |
| 2205/2206 | L190I | +++ | +++ |
| 2207/2208 | L316I | +++ | +++ |
| 2209/2210 | L183V | +++ | +++ |
| 2211/2212 | D128E | +++ | +++ |
| 2213/2214 | V289E | +++ | +++ |
| 2215/2216 | S91E | +++ | +++ |
| 2217/2218 | P60V | +++ | +++ |
| 2219/2220 | A310M | +++ | +++ |
| 2221/2222 | V131T | +++ | +++ |
| 2223/2224 | V143F | +++ | +++ |
| 2225/2226 | T301V | +++ | +++ |
| 2227/2228 | A208H | +++ | +++ |
| 2229/2230 | M302S | +++ | +++ |
| 2231/2232 | P60R | +++ | +++ |
| 2233/2234 | V143E | +++ | +++ |
| 2235/2236 | V122Q | +++ | +++ |
| 2237/2238 | L267M | +++ | ++ |
| 2239/2240 | V157L | +++ | +++ |
| 2241/2242 | S288W | +++ | +++ |
| 2243/2244 | N185K | +++ | +++ |
| 2245/2246 | A291Q | +++ | +++ |
| 2247/2248 | K264E | +++ | +++ |
| 2249/2250 | F129W | +++ | +++ |
| 2251/2252 | S280L | +++ | +++ |
| 2253/2254 | S298R | +++ | +++ |
| 2255/2256 | G295K | +++ | +++ |
| 2257/2258 | V122T | +++ | +++ |
| 2259/2260 | L267I | +++ | +++ |
| 2261/2262 | M89G | +++ | +++ |
| 2263/2264 | I286V | +++ | +++ |
| 2265/2266 | N185F | +++ | +++ |
| 2267/2268 | G158R/A215G | +++ | +++ |
| 2269/2270 | G295T | +++ | +++ |
| 2271/2272 | I28A/V122G | +++ | ++++ |
| 2273/2274 | W276M | +++ | +++ |
| 2275/2276 | V274A | +++ | ++ |
| 2277/2278 | N185M | +++ | ++ |
| 2279/2280 | S271T | +++ | +++ |
| 2281/2282 | A215T | +++ | +++ |
| 2283/2284 | G295P | +++ | +++ |
| 2285/2286 | F294V | +++ | +++ |
| 2287/2288 | F270M | ++ | +++ |
| 2289/2290 | K264S | ++ | +++ |
| 2291/2292 | S106L | ++ | +++ |
| 2293/2294 | T301F | ++ | ++ |
| 2295/2296 | G295L | ++ | +++ |
| 2297/2298 | V122L | ++ | ++ |
| 2299/2300 | S106R | ++ | +++ |
| 2301/2302 | S280N | ++ | +++ |
| 2303/2304 | W276G | ++ | ++ |
| 2305/2306 | A310H | ++ | ++ |
| 2307/2308 | A208K | ++ | +++ |
| 2309/2310 | S106Q | ++ | +++ |
| 2311/2312 | I58M | ++ | ++ |
| 2313/2314 | G295Y | ++ | +++ |
| 2315/2316 | A291W | ++ | + |
| 2317/2318 | A208T | ++ | +++ |
| 2319/2320 | L135V | ++ | +++ |
| 2321/2322 | A45S | ++ | +++ |
| 2323/2324 | I28L | ++ | +++ |
| 2325/2326 | G299V | ++ | ++ |
| 2327/2328 | L214Y | ++ | ++ |
| 2329/2330 | G295Q | ++ | ++ |
| 2331/2332 | T290N | ++ | ++ |
| 2333/2334 | M302L | ++ | ++ |
| 2335/2336 | D315S | ++ | ++ |
| 2337/2338 | V143C | ++ | +++ |
| 2339/2340 | M89R | ++ | ++ |
| 2341/2342 | F204W | ++ | ++ |
| 2343/2344 | L332W | ++ | ++ |
| 2345/2346 | S169G | ++ | ++ |
| 2347/2348 | I305V | ++ | ++ |
| 2349/2350 | M89L | ++ | +++ |
| 2351/2352 | C154S | ++ | +++ |
| 2353/2354 | G295R | ++ | +++ |
| 2355/2356 | G158R | ++ | +++ |
| 2357/2358 | L135A | ++ | +++ |
| 2359/2360 | C238V | ++ | +++ |
| 2361/2362 | T290H | ++ | ++ |
| 2363/2364 | F294A | ++ | ++ |
| 2365/2366 | G299I | ++ | + |
| 2367/2368 | M89N | ++ | +++ |
| 2369/2370 | S288L | ++ | ++ |
| 2371/2372 | G295F | ++ | ++ |
| 2373/2374 | V297I | ++ | ++ |
| 2375/2376 | G125T | ++ | ++ |
| 2377/2378 | D315E | ++ | ++ |
| 2379/2380 | V95C | ++ | +++ |
| 2381/2382 | I337V | ++ | ++ |
| 2383/2384 | K264G | ++ | ++ |
| 2385/2386 | G295S | ++ | +++ |
| 2387/2388 | V289P | ++ | ++ |
| 2389/2390 | T212I | ++ | +++ |
| 2391/2392 | W276A | ++ | ++ |
| 2393/2394 | P60C | ++ | +++ |
| 2395/2396 | L214A | ++ | + |
| 2397/2398 | A324D | ++ | ++ |
| 2399/2400 | N185C | ++ | ++ |
| 2401/2402 | M302C | ++ | ++ |
| 2403/2404 | A324M | ++ | + |
| 2405/2406 | T301L | ++ | ++ |
| 2407/2408 | A310N | ++ | ++ |
| 2409/2410 | S298C | ++ | ++ |
| 2411/2412 | G295M | ++ | ++ |
| 2413/2414 | G299T | ++ | +++ |
| 2415/2416 | V150L | ++ | ++ |
| 2417/2418 | C238S | ++ | ++ |
| 2419/2420 | A291T | ++ | ++ |
| 2421/2422 | L135M | ++ | ++ |
| 2423/2424 | D179E | ++ | ++ |
| 2425/2426 | L283C | ++ | ++ |
| 2427/2428 | A310S | ++ | ++ |
| 2429/2430 | P206L | ++ | ++ |
| 2431/2432 | A310Q | ++ | ++ |
| 2433/2434 | S106V | ++ | ++ |
| 2435/2436 | K181S | ++ | ++ |
| 2437/2438 | S298K | ++ | ++ |
| 2439/2440 | G299Q | ++ | ++ |
| 2441/2442 | G295C | ++ | + |
| 2443/2444 | V143M | ++ | ++ |
| 2445/2446 | P60S | ++ | ++ |
| 2447/2448 | L214H | ++ | ++ |
| 2449/2450 | T212L | ++ | ++ |
| 2451/2452 | I236V | ++ | ++ |
| 2453/2454 | L266C | ++ | ++ |
| 2455/2456 | V289A | ++ | ++ |
| 2457/2458 | T330A | ++ | +++ |
| 2459/2460 | G213N | ++ | + |
| 2461/2462 | M302A | ++ | ++ |
| 2463/2464 | F294S | ++ | ++ |
| 2465/2466 | T336I | ++ | ++ |
| 2467/2468 | N178V | ++ | ++ |
| 2469/2470 | A324G | ++ | + |
| 2471/2472 | V297L | ++ | ++ |
| 2473/2474 | L99I | ++ | ++ |
| 2475/2476 | V184L | ++ | ++ |
| 2477/2478 | S169N | ++ | ++ |
| 2479/2480 | T212G | ++ | ++ |
| 2481/2482 | V282A | ++ | ++ |
| 2483/2484 | S271G | ++ | ++ |
| 2485/2486 | S106M | ++ | ++ |
| 2487/2488 | S271A | ++ | + |
| 2489/2490 | P60D | ++ | ++ |
| 2491/2492 | M89T | ++ | ++ |
| 2493/2494 | M302I | ++ | + |
| 2495/2496 | F270V | ++ | +++ |
| 2497/2498 | I57V | ++ | + |
| 2499/2500 | V143H | ++ | ++ |
| 2501/2502 | P177K | ++ | ++ |
| 2503/2504 | A291L | ++ | + |
| 2505/2506 | L214Q | ++ | + |
| 2507/2508 | T301I | ++ | ++ |
| 2509/2510 | S271E | ++ | + |
| 2511/2512 | I109L | ++ | + |
| 2513/2514 | V191C | ++ | + |
| 2515/2516 | G213T | ++ | ++ |
| 2517/2518 | V107S | ++ | + |
| 2519/2520 | S106W | ++ | ++ |
| 2521/2522 | N185G | ++ | + |
| 2523/2524 | A310R | ++ | + |
| 2525/2526 | V289I | ++ | ++ |
| 2527/2528 | V282M | ++ | + |
| 2529/2530 | T336L | ++ | + |
| 2531/2532 | L332H | ++ | ++ |
| 2533/2534 | A291H | ++ | + |
| 2535/2536 | S298V | ++ | + |
| 2537/2538 | L135H | ++ | ++ |
| 2539/2540 | S280W | ++ | ++ |
| 2541/2542 | A310L | ++ | + |
| 2543/2544 | L266I | ++ | + |
| 2545/2546 | L135Q | ++ | ++ |
| 2547/2548 | G158S | ++ | + |
| 2549/2550 | S288R | ++ | + |
| 2551/2552 | K160R | ++ | + |
| 2553/2554 | A310T | ++ | + |
| 2555/2556 | I286F | ++ | ++ |
| 2557/2558 | W276V | ++ | + |
| 2559/2560 | A291R | + | ++ |
| 2561/2562 | T330G | + | ++++ |
| 2563/2564 | F129L | + | + |
| 2565/2566 | V143T | + | + |
| 2567/2568 | T212K | + | + |
| 2569/2570 | A208I | + | + |
| 2571/2572 | V297A | + | ++ |
| 2573/2574 | I286D | + | + |
| 2575/2576 | V157Q | + | + |
| 2577/2578 | T301A | + | + |
| 2579/2580 | Y144L | + | ++ |
| 2581/2582 | S106G | + | + |
| 2583/2584 | L283V | + | + |
| 2585/2586 | V56L | + | + |
| 2587/2588 | A291S | + | + |
| 2589/2590 | K264V | + | + |
| 2591/2592 | A215G | + | ++ |
| 2593/2594 | F170H | + | + |
| 2595/2596 | F294Y | + | + |
| 2597/2598 | L159F | + | + |
| 2599/2600 | I286M | + | + |
| 2601/2602 | V95I | + | + |
| 2603/2604 | W341A | + | ++ |
| 2605/2606 | V325L | + | + |
| 2607/2608 | L214K | + | + |
| 2609/2610 | T336M | + | + |
| 2611/2612 | S91V | + | ++ |
| 2613/2614 | I337A | + | + |
| 2615/2616 | N185T | + | + |
| 2617/2618 | N185S | + | + |
| 2619/2620 | N185V | + | + |

Levels of increased activity were determined for Activity FIOP on Antisense Strand relative to SEQ ID NO: 1866 and are defined as follows: “+” > 1.0, “++” > 1.4, “+++” > 1.8, “++++” > 2.2. Levels of increased activity were determined for Activity FIOP on Sense Strand relative to SEQ ID NO: 1866 and are defined as follows: “+” > 1.0, “++” > 1.6, “+++” > 2.0, “++++” > 3.0.

### Example 21

### Improvements Over SEQ ID NO: 2062 in RNA Ligase Activity

[0650] SEQ ID NO: 2062 was selected as the parent enzyme in an RNA ligation assay. Libraries of engineered genes were produced using known techniques (e.g., saturation mutagenesis, recombination of previously identified beneficial mutations). The polypeptides encoded by each gene were produced in high throughput (HTP) as described in Example 1, and the cell paste was generated as described in Example 2. To prepare lysate, 600 ul of 0.1 mg/mL lysozyme in 50 mM Tris-HCl buffer at pH 7.5 was added to the cell paste of each sample. After thorough resuspension at room temperature on a plate mixer for 1 hour, the cells were centrifuged for 20 min at 4000 rpm and 4° C. The supernatant was incubated at 40° C. for 1 hour in a PCR thermocycler. The samples were then centrifuged for 10 min at 4000 rpm and 4° C., and the clear supernatants were collected for ligation reactions.

[0651] The oligonucleotide mix for Reaction 6 in Example 4 were used as substrates in the ligation reaction. The lysate was screened in a 100 nanoliter reaction that comprised 50 mM Tris-HCl buffer at pH 7.5, 20 mM MgCl₂, 1 mM dithiothreitol (DTT), 8 mM adenosine triphosphate (ATP), and 1.25 mM of an equimolar mixture of the oligonucleotide fragments compromising Reaction 6. Nanoliter scale liquid transfers were carried out by Echo Acoustic Liquid Handler. The reactions were mixed by vortex, incubated for 2 hr at 33° C. in a PCR thermocycler, and quenched and diluted for analytical analysis by CE as described in Example 4. Using the peak area from CE analytical method, the % conversions of sense strand and antisense strand for each sample were calculated as shown below:

$$\% conversion = \frac{area under the curve for the product peak}{\begin{matrix}Total area under the curve for all \\ products and remaining fragments\end{matrix}} * 100$$

[0652] Activity relative to SEQ ID NO: 2062 (Activity FIOP) was calculated as the % conversion by the variant over the % conversion by SEQ ID NO: 2062. The result is shown in Table 21.1.

TABLE 21.1
RNA ligase 2 activity relative to SEQ ID NO: 2062

| | Amino Acid | Activity FIOP on | Activity FIOP on |
|---|---|---|---|
| SEQ | Differences | Antisense Strand | Sense Strand |
| ID NO: | (Relative to SEQ | relative to SEQ | relative to SEQ |
| (nt/aa) | ID NO: 2062) | ID NO: 2062 | ID NO: 2062 |
| 2621/2622 | I83A/I84V/T330E | ++++ | +++ |
| 2623/2624 | S91A/F270L/T290D | ++++ | ++++ |
| 2625/2626 | I83A/K181P | ++++ | ++++ |
| 2627/2628 | L161V/T290D/T330E | ++++ | +++ |
| 2629/2630 | K181R/T330E | ++++ | +++ |
| 2631/2632 | L161V/F270L/T330E | ++++ | +++ |
| 2633/2634 | L161M/F270L/T330E | ++++ | +++ |
| 2635/2636 | F270L/T290D | ++++ | +++ |
| 2637/2638 | I83A/I84V/F270L/F318S/T330E | ++++ | ++++ |
| 2639/2640 | V64Q/I83A/I84V/L161M/D192E/T290D/F318S | ++++ | ++++ |
| 2641/2642 | S91A/L161V/T290D/F318S/T330E | ++++ | +++ |
| 2643/2644 | L161V/T330E | ++++ | +++ |
| 2645/2646 | L161V/L214C/F270L/T290D/T330E | +++ | +++ |
| 2647/2648 | D192E/F270L/F318S | +++ | ++++ |
| 2649/2650 | S91A/L161M/D192E/T330E | +++ | +++ |
| 2651/2652 | L161V/F270L | +++ | ++++ |
| 2653/2654 | K181P/T330E | +++ | ++++ |
| 2655/2656 | K181P/F270L/T330E | +++ | ++ |
| 2657/2658 | S91A/K181R/D192E/T290D | +++ | +++ |
| 2659/2660 | L161M/T290D | +++ | ++++ |
| 2661/2662 | I83A/L161M/F270L | +++ | +++ |
| 2663/2664 | I83A/D192E/F318S | +++ | +++ |
| 2665/2666 | L214C/T330E | +++ | ++ |
| 2667/2668 | I83A/L161M/T290D/T330E | +++ | ++ |
| 2669/2670 | V64Q/I83A/L161M/T290D/T330E | +++ | +++ |
| 2671/2672 | I83A/L161M/D192E/L214C/F318S | +++ | ++++ |
| 2673/2674 | V122F/V143S/T212E/G295V | +++ | + |
| 2675/2676 | L161V/D192E/F270L/T290D | +++ | ++++ |
| 2677/2678 | K181P/T290D | +++ | +++ |
| 2679/2680 | S91A/L161V/L214C/F270L/T290D/F318S | +++ | +++ |
| 2681/2682 | S91A/D192E/L214C/F270L | ++ | +++ |
| 2683/2684 | L214C/T290D | ++ | ++ |
| 2685/2686 | V64Q/I83A/L161M/F270L/F318S/T330E | ++ | +++ |
| 2687/2688 | S91A/L161M/K181P/T330E | ++ | +++ |
| 2689/2690 | L161M/F318S/T330E | ++ | +++ |
| 2691/2692 | S91A/F270L/T290D/T330E | ++ | ++ |
| 2693/2694 | V64Q/K181P/T290D/F318S | ++ | +++ |
| 2695/2696 | K181R/F270L/T290D/F318S | ++ | +++ |
| 2697/2698 | V64Q/I83A/L161V/D192E/F270L/T290D/F318S/T330E | ++ | ++++ |
| 2699/2700 | V64Q/I83A/L161M/L214C/T290D/F318S | ++ | ++ |
| 2701/2702 | V122F/D192E/T212E | ++ | ++ |
| 2703/2704 | V64Q/I83A/S91A/D192E/L214C/T330E | ++ | ++ |
| 2705/2706 | I83A/S91A/L161M/K181R/T290D/F318S | ++ | ++++ |
| 2707/2708 | S91A/L161V/D192E/L214C/F270L/T290D | ++ | ++ |
| 2709/2710 | S91A/L161V/K181P/T290D/T330E | ++ | +++ |
| 2711/2712 | I83A/S91A/G125K/L161M/F270L | ++ | + |
| 2713/2714 | L161M/T290D/T330E | ++ | ++ |
| 2715/2716 | I28V/T212E | ++ | + |
| 2717/2718 | V122F/T212E | ++ | |
| 2719/2720 | I28V/V64Q/I83A/V122F/V143S/D192E/T212E/G295V/F318S | ++ | + |
| 2721/2722 | V122F/G295V | ++ | + |
| 2723/2724 | S91A/L161V/D192E/F318S | ++ | ++ |
| 2725/2726 | I28V/V122F/V143S/T212E | ++ | |
| 2727/2728 | V64Q/L161V/T290D | ++ | +++ |
| 2729/2730 | V64Q/V122F/A208P/F318S | ++ | |
| 2731/2732 | V64Q/I83A/D192E/T290D/F318S | + | +++ |
| 2733/2734 | V64Q/I83A/L161V/T290D | + | +++ |
| 2735/2736 | K181R/D192E/F318S | + | +++ |
| 2737/2738 | I83A/L161V/D192E/F318S | + | ++ |
| 2739/2740 | L214C/F270L | + | ++ |
| 2741/2742 | I83A/V122F | + | |
| 2743/2744 | D192E/T212E | + | + |
| 2745/2746 | I28V/V122F | + | |

Levels of increased activity were determined for Activity FIOP on Antisense Strand relative to SEQ ID NO: 2062 and are defined as follows: “+” > 1.0, “++” > 1.55, “+++” > 1.75, “++++” > 2.0. Levels of increased activity were determined for Activity FIOP on Sense Strand relative to SEQ ID NO: 2062 and are defined as follows: “+” > 1.0, “++” > 1.1, “+++” > 1.2, “++++” > 1.3.

### Example 22

### Improvements Over SEQ ID NO: 2674 in RNA Ligase Activity

[0653] SEQ ID NO: 2674 was selected as the parent enzyme in an RNA ligation assay. Libraries of engineered genes were produced using known techniques (e.g., saturation mutagenesis, recombination of previously identified beneficial mutations). The polypeptides encoded by each gene were produced in high throughput (HTP) as described in Example 1, and the cell paste was generated as described in Example 2. To prepare lysate, 600 ul of 0.1 mg/mL lysozyme in 50 mM Tris-HCl buffer at pH 7.5 was added to the cell paste of each sample. After thorough resuspension at room temperature on a plate mixer for 1 hour, the cells were centrifuged for 20 min at 4000 rpm and 4° C. The supernatant was diluted 2-fold in 50 mM Tris-HCl buffer at pH 7.5 and incubated at 40° C. for 1 hour in a PCR thermocycler. The samples were then centrifuged for 10 min at 4000 rpm and 4° C., and the clear supernatants were collected for ligation reactions.

[0654] The oligonucleotide mix for Reaction 4 in Example 4 were used as substrates in the ligation reaction. The lysate was screened in a 100 nanoliter reaction that comprised 50 mM Tris-HCl buffer at pH 7.5, 20 mM MgCl₂, 1 mM dithiothreitol (DTT), 8 mM adenosine triphosphate (ATP), and 1.25 mM of an equimolar mixture of the oligonucleotide fragments compromising Reaction 4. Nanoliter scale liquid transfers were carried out by Echo Acoustic Liquid Handler. The reactions were mixed by vortex, incubated for 2 hr at 33° C. in a PCR thermocycler, and quenched and diluted for analytical analysis by CE as described in Example 4. Using the peak area from CE analytical method, the % conversions of sense strand and antisense strand for each sample were calculated as shown below:

$$\% conversion = \frac{area under the curve for the product peak}{\begin{matrix}Total area under the curve for all \\ products and remaining fragments\end{matrix}} * 100$$

[0655] Activity relative to SEQ ID NO: 2674 (Activity FIOP) was calculated as the % conversion by the variant over the % conversion by SEQ ID NO: 2674. The result is shown in Table 22.1.

TABLE 22.1
RNA ligase 2 activity relative to SEQ ID NO: 2674

| | Amino Acid | Activity FIOP on | Activity FIOP on |
|---|---|---|---|
| SEQ | Differences | Antisense Strand | Sense Strand |
| ID NO: | (Relative to SEQ | relative to SEQ | relative to SEQ |
| (nt/aa) | ID NO: 2674) | ID NO: 2674 | ID NO: 2674 |
| 2747/2748 | I28L/A291Q/V295G/S298V/D315E | ++ | ++++ |
| 2749/2750 | I28L/V95I/A291S/V295G/S298V/D315E | ++ | ++++ |
| 2751/2752 | S143T/V295G/S298V/D315E | ++ | ++++ |
| 2753/2754 | A291Q/V295G/S298V | + | ++++ |
| 2755/2756 | I28L/S143V/V295G/S298V | ++ | +++ |
| 2757/2758 | I28L/A291S/V295G/S298V | + | +++ |
| 2759/2760 | S143V/N185V/A291Q/V295G/S298V | ++++ | ++ |
| 2761/2762 | I28L/S143V/N185V/A291Q/S298V/T336I | ++++ | ++ |
| 2763/2764 | I28L/S298V | ++++ | + |
| 2765/2766 | S280N/V295G | +++ | |
| 2767/2768 | S143V/S298V/T336I | ++++ | |
| 2769/2770 | S143V/A291S/V295G/S298V | + | +++ |
| 2771/2772 | A291Q/V295G/S298V/D315E/T336I | ++ | ++ |
| 2773/2774 | S143V/V295G/S298V | + | ++ |
| 2775/2776 | I28L/S143T/V295G/S298V/T336I | + | ++ |
| 2777/2778 | V95I/S143T/V295G/S298V | + | ++ |
| 2779/2780 | S143V/S280N/T290N | | + |
| 2781/2782 | S143T/A291S/S298V | + | + |

Levels of increased activity were determined for Activity FIOP on Antisense Strand relative to SEQ ID NO: 2674 and are defined as follows: “+” > 1.0, “++” > 1.025, “+++” > 1.1, “++++” > 1.3. Levels of increased activity were determined for Activity FIOP on Sense Strand relative to SEQ ID NO: 2674 and are defined as follows: “+” > 1.0, “++” > 1.1, “+++” > 1.3, “++++” > 2.0.

### Example 23

### Improvements Over SEQ ID NO: 2754 in RNA Ligase Activity

[0656] SEQ ID NO: 2754 was selected as the parent enzyme in an RNA ligation assay. Libraries of engineered genes were produced using known techniques (e.g., saturation mutagenesis, recombination of previously identified beneficial mutations). The polypeptides encoded by each gene were produced in high throughput (HTP) as described in Example 1, and the cell paste was generated as described in Example 2. To prepare lysate, 600 ul of 0.1 mg/mL lysozyme in 50 mM Tris-HCl buffer at pH 7.5 was added to the cell paste of each sample. After thorough resuspension at room temperature on a plate mixer for 1 hour, the cells were centrifuged for 20 min at 4000 rpm and 4° C. The supernatant was diluted 4-fold in 50 mM Tris-HCl buffer at pH 7.5 and incubated at 40° C. for 1 hour in a PCR thermocycler. The samples were then centrifuged for 10 min at 4000 rpm and 4° C., and the clear supernatants were collected for ligation reactions.

[0657] The oligonucleotide mix for Reaction 7 in Example 4 were used as substrates in the ligation reaction. The lysate was screened in a 100 nanoliter reaction that comprised 50 mM Tris-HCl buffer at pH 7.5, 20 mM MgCl₂, 1 mM dithiothreitol (DTT), 8 mM adenosine triphosphate (ATP), and 1.25 mM of an equimolar mixture of the oligonucleotide fragments compromising Reaction 7. Nanoliter scale liquid transfers were carried out by Echo Acoustic Liquid Handler. The reactions were mixed by vortex, incubated for 2 hr at 33° C. in a PCR thermocycler, and quenched and diluted for analytical analysis by CE as described in Example 4. Using the peak area from CE analytical method, the % conversions of sense strand and antisense strand for each sample were calculated as shown below:

$$\% conversion = \frac{area under the curve for the product peak}{\begin{matrix}Total area under the curve for all \\ products and remaining fragments\end{matrix}} * 100$$

[0658] Activity relative to SEQ ID NO: 2754 (Activity FIOP) was calculated as the % conversion by the variant over the % conversion by SEQ ID NO: 2754. The result is shown in Table 23.1.

TABLE 23.1
RNA ligase 2 activity relative to SEQ ID NO: 2754

| | Amino Acid | Activity FIOP on | Activity FIOP on |
|---|---|---|---|
| SEQ | Differences | Antisense Strand | Sense Strand |
| ID NO: | (Relative to SEQ | relative to SEQ | relative to SEQ |
| (nt/aa) | ID NO: 2754) | ID NO: 2754 | ID NO: 2754 |
| 2783/2784 | S106R/K264E/S280L | ++++ | ++++ |
| 2785/2786 | S280L/T330A | +++ | ++++ |
| 2787/2788 | I28L/S106M/K264S/Q291S | ++++ | +++ |
| 2789/2790 | I28L/K264E/S280L/T330A | ++ | ++++ |
| 2791/2792 | I57V/P60R/L135V/K264S/Q291S | ++++ | ++ |
| 2793/2794 | I28L/L135V/K264S/S280L | +++ | ++ |
| 2795/2796 | S106L/K264E/S280L/Q291S | ++++ | ++ |
| 2797/2798 | I28L/S106L/K264S/S280L | +++ | ++ |
| 2799/2800 | S280L/G299I | | ++++ |
| 2801/2802 | I28L/I57V/M89G/S106L/K264S/S280L/Q291S | ++++ | + |
| 2803/2804 | K264S | ++ | ++ |
| 2805/2806 | N185S/Q291S | +++ | ++ |
| 2807/2808 | I28L/S106M/G299V | | ++++ |
| 2809/2810 | I28L/L214Y/K264S/G299V | | +++ |
| 2811/2812 | K264E/T330A | | + |
| 2813/2814 | I28V/M89N/L214Q/Q291S | ++ | |
| 2815/2816 | I28V/N185K/S271G/A310H | | + |
| 2817/2818 | F122T/S271G | | ++ |
| 2819/2820 | M89N/S106M/L135V/K264E/S280L/T330A | | + |

Levels of increased activity were determined for Activity FIOP on Antisense Strand relative to SEQ ID NO: 2754 and are defined as follows: “+” > 1.0, “++” > 1.2, “+++” > 1.4, “++++” > 1.7. Levels of increased activity were determined for Activity FIOP on Sense Strand relative to SEQ ID NO: 2754 and are defined as follows: “+” > 1.0, “++” > 1.3, “+++” > 2.0, “++++” > 2.5.

### Example 24

### Improvements Over SEQ ID NO: 2674 in RNA Ligase Activity

[0659] SEQ ID NO: 2674 was selected as the parent enzyme in an RNA ligation assay. Libraries of engineered genes were produced using known techniques (e.g., saturation mutagenesis, recombination of previously identified beneficial mutations). The polypeptides encoded by each gene were produced in high throughput (HTP) as described in Example 1, and the cell paste was generated as described in Example 2. To prepare lysate, 600 ul of 0.1 mg/mL lysozyme in 50 mM Tris-HCl buffer at pH 7.5 was added to the cell paste of each sample. After thorough resuspension at room temperature on a plate mixer for 1 hour, the cells were centrifuged for 20 min at 4000 rpm and 4° C. The supernatant was diluted 4-fold in 50 mM Tris-HCl buffer at pH 7.5 and incubated at 40° C. for 1 hour in a PCR thermocycler. The samples were then centrifuged for 10 min at 4000 rpm and 4° C., and the clear supernatants were collected for ligation reactions.

[0660] The oligonucleotide mix for Reaction 6 in Example 4 were used as substrates in the ligation reaction. The lysate was screened in a 100 nanoliter reaction that comprised 50 mM Tris-HCl buffer at pH 7.5, 20 mM MgCl₂, 1 mM dithiothreitol (DTT), 8 mM adenosine triphosphate (ATP), and 1.25 mM of an equimolar mixture of the oligonucleotide fragments compromising Reaction 6. Nanoliter scale liquid transfers were carried out by Echo Acoustic Liquid Handler. The reactions were mixed by vortex, incubated for 2 hr at 33° C. in a PCR thermocycler, and quenched and diluted for analytical analysis by CE as described in Example 4. Using the peak area from CE analytical method, the % conversions of sense strand and antisense strand for each sample were calculated as shown below:

$$\% conversion = \frac{area under the curve for the product peak}{\begin{matrix}Total area under the curve for all \\ products and remaining fragments\end{matrix}} * 100$$

[0661] Activity relative to SEQ ID NO: 2674 (Activity FIOP) was calculated as the % conversion by the variant over the % conversion by SEQ ID NO: 2674. The result is shown in Table 24.1.

TABLE 24.1
RNA ligase 2 activity relative to SEQ ID NO: 2674

| | Amino Acid | Activity FIOP on | Activity FIOP on |
|---|---|---|---|
| SEQ | Differences | Antisense Strand | Sense Strand |
| ID NO: | (Relative to SEQ | relative to SEQ | relative to SEQ |
| (nt/aa) | ID NO: 2674) | ID NO: 2674 | ID NO: 2674 |
| 2821/2822 | A208T | + | |
| 2823/2824 | A25G | + | + |
| 2825/2826 | D90E | ++ | |
| 2827/2828 | E141D | +++ | ++++ |
| 2829/2830 | E258D | +++ | ++++ |
| 2831/2832 | F248G | ++++ | |
| 2833/2834 | F248K | ++++ | |
| 2835/2836 | F318E | ++++ | ++++ |
| 2837/2838 | F318S | +++ | + |
| 2839/2840 | G117Q | + | |
| 2841/2842 | G299K | | ++ |
| 2843/2844 | G33I | + | |
| 2845/2846 | G33T | +++ | + |
| 2847/2848 | G80E | ++ | |
| 2849/2850 | I253W | ++++ | |
| 2851/2852 | I83E | ++ | + |
| 2853/2854 | I83T | | + |
| 2855/2856 | K254Q | ++ | |
| 2857/2858 | K254V | ++ | |
| 2859/2860 | K256A | + | |
| 2861/2862 | K256G | ++++ | |
| 2863/2864 | K256M | ++++ | + |
| 2865/2866 | K256W | +++ | |
| 2867/2868 | K30L | +++ | |
| 2869/2870 | K30V | ++++ | |
| 2871/2872 | K30W | ++++ | ++ |
| 2873/2874 | K327E | +++ | ++++ |
| 2875/2876 | L73Q | +++ | + |
| 2877/2878 | L73W | + | |
| 2879/2880 | N100A | +++ | ++ |
| 2881/2882 | N100G | + | |
| 2883/2884 | N100H | ++ | +++ |
| 2885/2886 | N100S | +++ | + |
| 2887/2888 | N97A | +++ | + |
| 2889/2890 | Q119L | | ++++ |
| 2891/2892 | R265A | + | |
| 2893/2894 | R296E | ++ | |
| 2895/2896 | R296L | | + |
| 2897/2898 | R296Q | | + |
| 2899/2900 | R32E | +++ | |
| 2901/2902 | T156Q | ++ | |
| 2903/2904 | T40I | + | |
| 2905/2906 | V105L | ++ | ++++ |
| 2907/2908 | V107M | ++ | |
| 2909/2910 | V41E/A114E | ++ | + |
| 2911/2912 | V41I | +++ | + |
| 2913/2914 | V64A | + | |

Levels of increased activity were determined for Activity FIOP on Antisense Strand relative to SEQ ID NO: 2674 and are defined as follows: “+” > 1.0, “++” > 1.04, “+++” > 1.12, “++++” > 1.3. Levels of increased activity were determined for Activity FIOP on Sense Strand relative to SEQ ID NO: 2674 and are defined as follows: “+” > 1.0, “++” > 1.04, “+++” > 1.07, “++++” > 1.1.

### Example 25

### Improvements Over SEQ ID NO: 2674 in RNA Ligase Thermostability

[0662] The RNA ligase of SEQ ID NO: 2674 was selected as the parent enzyme in an RNA ligation assay. Libraries of engineered genes were produced using known techniques (e.g., saturation mutagenesis, recombination of previously identified beneficial mutations). The polypeptides encoded by each gene were produced in high throughput (HTP) as described in Example 1, and the cell paste was generated as described in Example 2. To prepare lysate, 600 ul of 0.1 mg/mL lysozyme in 50 mM Tris-HCl buffer at pH 7.5 was added to the cell paste of each sample. After thorough resuspension at room temperature on a plate mixer for 30 min, the cells were diluted 2-fold in 50 mM Tris-HCl buffer at pH 7.5 then preincubated at 51.5° C. for 1 hour in a PCR thermocycler. The samples were then centrifuged for 10 min at 4000 rpm and 4° C. to remove the precipitated proteins, and the remainder clear supernatants were collected for ligation reactions.

[0663] The oligonucleotide mix for Reaction 3 in Example 4 were used as substrates in the ligation reaction. The lysate was screened in a 100 nanoliter reaction that comprised 50 mM Tris-HCl buffer at pH 7.5, 20 mM MgCl₂, 1 mM dithiothreitol (DTT), 8 mM adenosine triphosphate (ATP), and 1.6 mM of an equimolar mixture of the oligonucleotide fragments compromising Reaction 3. Nanoliter scale liquid transfers were carried out by Echo Acoustic Liquid Handler. The reactions were mixed by vortex, incubated for 2 hr at 33° C. in a PCR thermocycler, and quenched and diluted for analytical analysis by CE as described in Example 4. Using the peak area from CE analytical method, the % conversion for each sample was calculated as shown below:

$$\% conversion = \frac{area under the curve for the product peak}{\begin{matrix}Total area under the curve for all \\ products and remaining fragments\end{matrix}} * 100$$

[0664] Activity relative to SEQ ID NO: 2674 (Activity FIOP) was calculated as the % conversion by the variant over the % conversion by SEQ ID NO: 2674. The result is shown in Table 25.1.

TABLE 25.1
RNA ligase 2 activity relative to SEQ ID NO:
2674 after 51.5° C. heat challenge for 60 min

| | Amino Acid | Activity FIOP on | Activity FIOP on |
|---|---|---|---|
| SEQ | Differences | Antisense Strand | Sense Strand |
| ID NO: | (Relative to | relative to SEQ | relative to SEQ |
| (nt/aa) | SEQ ID NO: 2674) | ID NO: 2674 | ID NO: 2674 |
| 2915/2916 | A162C | + | |
| 2917/2918 | A208L | ++ | ++ |
| 2919/2920 | A25D | +++ | + |
| 2921/2922 | A25F | +++ | ++++ |
| 2923/2924 | A25T | ++ | +++ |
| 2925/2926 | D103V | + | ++ |
| 2927/2928 | E346S | +++ | +++ |
| 2929/2930 | E42T | + | + |
| 2931/2932 | E74D | +++ | ++ |
| 2933/2934 | F113M | ++ | |
| 2935/2936 | F13W | ++ | +++ |
| 2937/2938 | F228D | +++ | + |
| 2939/2940 | F228L | ++ | |
| 2941/2942 | F318A | ++ | + |
| 2943/2944 | F318G | +++ | ++++ |
| 2945/2946 | G121N | + | |
| 2947/2948 | G299E | ++++ | |
| 2949/2950 | G299R | + | ++ |
| 2951/2952 | G33L | +++ | ++++ |
| 2953/2954 | H342S | ++ | +++ |
| 2955/2956 | I253L | +++ | ++ |
| 2957/2958 | K127P | ++ | + |
| 2959/2960 | K254E | ++++ | +++ |
| 2961/2962 | K254N | +++ | +++ |
| 2963/2964 | K292N | ++ | +++ |
| 2965/2966 | K292S | +++ | ++++ |
| 2967/2968 | K30A | ++++ | ++++ |
| 2969/2970 | K30T | +++ | ++++ |
| 2971/2972 | K67R | + | ++ |
| 2973/2974 | K86L | + | ++ |
| 2975/2976 | L165M | ++++ | ++ |
| 2977/2978 | L173M | ++++ | |
| 2979/2980 | L300A | ++ | ++ |
| 2981/2982 | L317E | ++ | ++ |
| 2983/2984 | L317Q | ++++ | ++++ |
| 2985/2986 | L317V | ++ | +++ |
| 2987/2988 | L326C | + | |
| 2989/2990 | N11G | +++ | +++ |
| 2991/2992 | N229W | + | |
| 2993/2994 | N97E | +++ | +++ |
| 2995/2996 | P71T | ++ | +++ |
| 2997/2998 | S17P | ++ | |
| 2999/3000 | S210V | +++ | ++++ |
| 3001/3002 | S241E | ++ | + |
| 3003/3004 | S271G | ++ | ++ |
| 3005/3006 | T40P | ++ | +++ |
| 3007/3008 | T40S | +++ | +++ |
| 3009/3010 | V56I | ++ | +++ |
| 3011/3012 | V95A | +++ | +++ |

Levels of increased activity were determined for Activity FIOP on Antisense Strand relative to SEQ ID NO: 2674 and are defined as follows: “+” > 1.0, “++” > 1.7, “+++” > 3.0, “++++” > 8.0. Levels of increased activity were determined for Activity FIOP on Sense Strand relative to SEQ ID NO: 2674 and are defined as follows: “+” > 1.0, “++” > 1.4, “+++” > 3.5, “++++” > 8.0.

### Example 26

### Improvements Over SEQ ID NO: 2786 in RNA Ligase Activity

[0665] SEQ ID NO: 2786 was selected as the parent enzyme in an RNA ligation assay. Libraries of engineered genes were produced using known techniques (e.g., saturation mutagenesis, recombination of previously identified beneficial mutations). The polypeptides encoded by each gene were produced in high throughput (HTP) as described in Example 1, and the cell paste was generated as described in Example 2. To prepare lysate, 600 ul of 0.1 mg/mL lysozyme in 50 mM Tris-HCl buffer at pH 7.5 was added to the cell paste of each sample. After thorough resuspension at room temperature on a plate mixer for 1 hour, the cells were centrifuged for 20 min at 4000 rpm and 4° C. The supernatant was diluted 2-fold in 50 mM Tris-HCl buffer at pH 7.5 and incubated at 40° C. for 1 hour in a PCR thermocycler. The samples were then centrifuged for 10 min at 4000 rpm and 4° C., and the clear supernatants were collected for ligation reactions.

[0666] The oligonucleotide mix for Reaction 6 in Example 4 were used as substrates in the ligation reaction. The lysate was screened in a 100 nanoliter reaction that comprised 50 mM Tris-HCl buffer at pH 7.5, 20 mM MgCl₂, 1 mM dithiothreitol (DTT), 8 mM adenosine triphosphate (ATP), and 1.25 mM of an equimolar mixture of the oligonucleotide fragments compromising Reaction 6. Nanoliter scale liquid transfers were carried out by Echo Acoustic Liquid Handler. The reactions were mixed by vortex, incubated for 2 hr at 33° C. in a PCR thermocycler, and quenched and diluted for analytical analysis by CE as described in Example 4. Using the peak area from CE analytical method, the % conversions of sense strand and antisense strand for each sample were calculated as shown below:

$$\% conversion = \frac{area under the curve for the product peak}{\begin{matrix}Total area under the curve for all \\ products and remaining fragments\end{matrix}} * 100$$

[0667] Activity relative to SEQ ID NO: 2786 (Activity FIOP) was calculated as the % conversion by the variant over the % conversion by SEQ ID NO: 2786. The result is shown in Table 26.1.

TABLE 26.1
RNA ligase 2 activity relative to SEQ ID NO: 2786

| | Amino Acid | Activity FIOP on | Activity FIOP on |
|---|---|---|---|
| SEQ | Differences | Antisense Strand | Sense Strand |
| ID NO: | (Relative to SEQ | relative to SEQ | relative to SEQ |
| (nt/aa) | ID NO: 2786) | ID NO: 2786 | ID NO: 2786 |
| 3013/3014 | A25D/F228L/F248G/K264S | ++++ | |
| 3015/3016 | R32E/F113M/F228L/F248G | ++++ | |
| 3017/3018 | A25D/R32E/F113L/S241E/F248G/K264S/G299E | ++++ | |
| 3019/3020 | A25D/F113M/F248G/K264E/F318E | ++++ | |
| 3021/3022 | A25D/K127P/F228L/K264S/G299E/F318E | ++++ | |
| 3023/3024 | A25D/F113M/F228L/F248G/K327E | +++ | |
| 3025/3026 | F228L/S241E/K264E | +++ | ++++ |
| 3027/3028 | K264S/G299E/F318E/K327E | +++ | |
| 3029/3030 | A25D/F113M/S241E/F248G/K264S/F318E | +++ | |
| 3031/3032 | A25D/K127P/F248G/G299E/F318E | +++ | |
| 3033/3034 | F113M/K127P/F228L/K264E/G299E | +++ | |
| 3035/3036 | A25D/K127P | +++ | +++ |
| 3037/3038 | A25D/F228D/F248G/K264E/K327E | +++ | |
| 3039/3040 | A25D/F113M/K264E/G299E | ++ | |
| 3041/3042 | R32E/F113M/K264S/F318E | ++ | +++ |
| 3043/3044 | A25D/R32E/S241E/K264S/K327E | ++ | |
| 3045/3046 | F113M/K264E/K327E | ++ | |
| 3047/3048 | A25D/K127P/F228D/F248G/F318E | ++ | |
| 3049/3050 | K327E | + | |
| 3051/3052 | R32E/F113M/K254E/K264E | + | |
| 3053/3054 | A25D/F228L/S241E/K264E | + | + |
| 3055/3056 | A25D/F113M/F228L/S241E/F318E | + | ++ |
| 3057/3058 | F113M/K327E | + | |

Levels of increased activity were determined for Activity FIOP on Antisense Strand relative to SEQ ID NO: 2786 and are defined as follows: “+” > 1.0, “++” > 1.15, “+++” > 1.4, “++++” > 2.0. Levels of increased activity were determined for Activity FIOP on Sense Strand relative to SEQ ID NO: 2786 and are defined as follows: “+” > 1.0, “++” > 1.07, “+++” > 1.1, “++++” > 1.2.

[0668] While the invention has been described with reference to the specific embodiments, various changes can be made and equivalents can be substituted to adapt to a particular situation, material, composition of matter, process, process step or steps, thereby achieving benefits of the invention without departing from the scope of what is claimed.

[0669] For all purposes, each and every publication and patent document cited in this disclosure is incorporated herein by reference as if each such publication or document was specifically and individually indicated to be incorporated herein by reference. Citation of publications and patent documents is not intended as an indication that any such document is pertinent prior art, nor does it constitute an admission as to its contents or date.

The application's sequence listing, which the Patent Office published only in electronic form, follows.

SEQUENCE LISTING (3060 sequences)

SEQ ID NO: 1 - DNA, 1038 bp, synthetic construct
  misc_feature 1..1038: note = variant of RNA ligase 2 from Klebsiella phage KP179
  source 1..1038: mol_type = other DNA
atgcatcaccatcaccatcacggtggcagcggtatgtttgcgtattattcaagtctggaaaaccattacaataataagttcattgagaagatccgtggtgcaggcttcgatatgcacaccgtggaatgggtagctcgcgagaagattcatggaacgaactttagcgttatcattactccgaccgaaatcgtcccagccaaacgcacagggccgatcttggaaggcgagtcgttctttggtcacgaaattatcatgaaaaaatataaagactccttcgtgaaggtgcagaacatgctgaatgccatggatcttgttagcgtgcaaatctttggcgaatttgcgggtggtggcattcagaaaggcgtcgattacggagacaaagatttctatgtgtttgacatcctgtctgatagcgggaacgagaaagtttactgggatgactatcgcgtcgaatcgttttgcaccacgctcggtctgaaattagcgcctctgctgggacgtggtagtttcgctgaactgtcccagtacccaaacgatttcaaaagcattgtgaaccgttataatgaattggttgatacgacgggcctggaacatgccaataaacacgtctttggtccgcaagcgtcttctgaaactggcgtagcagaaggctacgttcttaaacccgtctatccgatcttctttaataatggtacacgcgtggcgattaaatgcaagaactccaaattttcggagaaagccaagagcgacaaaccaattaaagcgaaagtggaactgacggagaacgataaacgtgtgctcgaaatctttagcgagtatgttacctggaatcgcgtcagtaacgtactgtcacatattggctcagtgaccgcaaaagattttgggcgtgttatgggtctgacgatgaaagacatcattaatgaagcagcacgcgaaggccatgatatgttgttcgctgataacccgtcggcggtgaagaaagagctgaccattctcatccagaacacgattcgttccaaatggcacgaagttctggag

SEQ ID NO: 2 - protein, 346 aa, synthetic construct
  REGION 1..346: note = variant of RNA ligase 2 from Klebsiella phage KP179
MHHHHHHGGSGMFAYYSSLENHYNNKFIEKIRGAGFDMHTVEWVAREKIHGTNFSVIITPTEIVPAKRTGPILEGESFFGHEIIMKKYKDSFVKVQNMLNAMDLVSVQIFGEFAGGGIQKGVDYGDKDFYVFDILSDSGNEKVYWDDYRVESFCTTLGLKLAPLLGRGSFAELSQYPNDFKSIVNRYNELVDTTGLEHANKHVFGPQASSETGVAEGYVLKPVYPIFFNNGTRVAIKCKNSKFSEKAKSDKPIKAKVELTENDKRVLEIFSEYVTWNRVSNVLSHIGSVTAKDFGRVMGLTMKDIINEAAREGHDMLFADNPSAVKKELTILIQNTIRSKWHEVLE

SEQ ID NO: 3 - DNA, 1038 bp, synthetic construct
  misc_feature 1..1038: note = variant of RNA ligase 2 from Klebsiella phage KP179
  source 1..1038: mol_type = other DNA
atgcatcaccatcaccatcacggtggcagcggtatgtttgcgtattattcaagtctggaaaaccattacaataataagttcattgagaagatccgtggtgcaggcttcgatatgcacaccgtggaatgggtagctcgcgagaagattcatggaacgaactttagcgttatcattactccgaccgaaatcgtcccagccaaacgcacagggccgatcttggaaggcgagtcgttctttggtcacgaaattatcatgaaaaaatataaagactccttcgtgaaggtgcagaacatgctgaatgccatggatcttgttagcgtgcaaatctttggcgaatttgcgggtggtggcattcagaaaggcgtcgattacggagacaaagatttctatgtgtttgacatcctgtctgatagcgggaacgagaaagtttactgggatgactatcgcgtcgaatcgttttgcaccacgctcggtctgaaattagcgcctctgctgggacgtggtagtttcgctgaactgtcccagtacccaaacgatttcaaaagcattgtgaaccgttataatgaattggttgatacgacgggcctggaacatgccaataaacacgtctttggtccgcaagcgtcttctgaaactggcgtagcagaaggctacgttcttaaacccgtctatccgatcttctttaataatggtacacgcgtggcgattaaatgcaagaactccaaattttcggagaaagccaagagcgacaaaccaattaaagcggcggtggaactgacggagaacgataaacgtgtgctcgaaatctttagcgagtatgttacctggaatcgcgtcagtaacgtactgtcacatattggctcagtgaccgcaaaagattttgggcgtgttatgggtctgacgatgaaagacatcattaatgaagcagcacgcgaaggccatgatatgttgttcgctgataacccgtcggcggtgaagaaagagctgaccattctcatccagaacacgattcgttccaaatggcacgaagttctggag

SEQ ID NO: 4 - protein, 346 aa, synthetic construct
  REGION 1..346: note = variant of RNA ligase 2 from Klebsiella phage KP179
MHHHHHHGGSGMFAYYSSLENHYNNKFIEKIRGAGFDMHTVEWVAREKIHGTNFSVIITPTEIVPAKRTGPILEGESFFGHEIIMKKYKDSFVKVQNMLNAMDLVSVQIFGEFAGGGIQKGVDYGDKDFYVFDILSDSGNEKVYWDDYRVESFCTTLGLKLAPLLGRGSFAELSQYPNDFKSIVNRYNELVDTTGLEHANKHVFGPQASSETGVAEGYVLKPVYPIFFNNGTRVAIKCKNSKFSEKAKSDKPIKAAVELTENDKRVLEIFSEYVTWNRVSNVLSHIGSVTAKDFGRVMGLTMKDIINEAAREGHDMLFADNPSAVKKELTILIQNTIRSKWHEVLE

SEQ ID NO: 5 - DNA, 1038 bp, synthetic construct
  misc_feature 1..1038: note = variant of RNA ligase 2 from Klebsiella phage KP179
  source 1..1038: mol_type = other DNA
atgcatcaccatcaccatcacggtggcagcggtatgtttgcgtattattcaagtctggaaaaccattacaataataagttcattgagaagatccgtggtgcaggcttcgatatgcacaccgtggaatgggtagctcgcgagaagattcatggaacgaactttagcgttatcattactccgaccgaaatcgtcccagccaaacgcacagggccgatcttggaaggcgagtcgttctttggtcacgaaattatcatgaaaaaatataaagactccttcgtgaaggtgcagaacatgctgaatgccatggatcttgttagcgtgcaaatctttggcgaatttgcgggtggtggcattcagaaaggcgtcgattacggagacaaagatttctatgtgtttgacatcctgtctgatagcgggaacgagaaagtttactgggatgactatcgcgtcgaatcgttttgcaccacgctcggtctgaaattagcgcctctgctgggacgtggtagtttcgctgaactgtcccagtacccaaacgatttcaaaagcattgtgaaccgttataatgaattggttgatacgacgggcctggaacatgccaataaacacgtctttggtccgcaagcgtcttctgaaactggcgtagcagaaggctacgttcttaaacccgtctatccgatcttctttaataatggtacacgcgtggcgattaaatgcaagaactccaaattttcggagaaagccaagagcgacaaaccaattaaagcgaaagtgccgctgacggagaacgataaacgtgtgctcgaaatctttagcgagtatgttacctggaatcgcgtcagtaacgtactgtcacatattggctcagtgaccgcaaaagattttgggcgtgttatgggtctgacgatgaaagacatcattaatgaagcagcacgcgaaggccatgatatgttgttcgctgataacccgtcggcggtgaagaaagagctgaccattctcatccagaacacgattcgttccaaatggcacgaagttctggag

SEQ ID NO: 6 - protein, 346 aa, synthetic construct
  REGION 1..346: note = variant of RNA ligase 2 from Klebsiella phage KP179
MHHHHHHGGSGMFAYYSSLENHYNNKFIEKIRGAGFDMHTVEWVAREKIHGTNFSVIITPTEIVPAKRTGPILEGESFFGHEIIMKKYKDSFVKVQNMLNAMDLVSVQIFGEFAGGGIQKGVDYGDKDFYVFDILSDSGNEKVYWDDYRVESFCTTLGLKLAPLLGRGSFAELSQYPNDFKSIVNRYNELVDTTGLEHANKHVFGPQASSETGVAEGYVLKPVYPIFFNNGTRVAIKCKNSKFSEKAKSDKPIKAKVPLTENDKRVLEIFSEYVTWNRVSNVLSHIGSVTAKDFGRVMGLTMKDIINEAAREGHDMLFADNPSAVKKELTILIQNTIRSKWHEVLE

SEQ ID NO: 7 - DNA, 1038 bp, synthetic construct
  misc_feature 1..1038: note = variant of RNA ligase 2 from Klebsiella phage KP179
  source 1..1038: mol_type = other DNA
atgcatcaccatcaccatcacggtggcagcggtatgtttgcgtattattcaagtctggaaaaccattacaataataagttcattgagaagatccgtggtgcaggcttcgatatgcacaccgtggaatgggtagctcgcgagaagattcatggaacgaactttagcgttatcattactccgaccgaaatcgtcccagccaaacgcacagggccgatcttggaaggcgagtcgttctttggtcacgaaattatcatgaaaaaatataaagactccttcgtgaaggtgcagaacatgctgaatgccatggatcttgttagcgtgcaaatctttggcgaatttgcgggtggtggcattcagaaaggcgtcgattacggagacaaagatttctatgtgtttgacatcctgtctgatagcgggaacgagaaagtttactgggatgactatcgcgtcgaatcgttttgcaccacgctcggtctgaaattagcgcctctgctgggacgtggtagtttcgctgaactgtcccagtacccaaacgatttcaaaagcattgtgaaccgttataatgaattggttgatacgacgggcctggaacatgccaataaacacgtctttggtccgcaagcgtcttctgaaactggcgtagcagaaggctacgttcttaaacccgtctatccgatcttctttaataatggtacacgcgtggcgattaaatgcaagaactccaaattttcggagaaagccaagagcgacaaaccaattcttgcgaaagtggaactgacggagaacgataaacgtgtgctcgaaatctttagcgagtatgttacctggaatcgcgtcagtaacgtactgtcacatattggctcagtgaccgcaaaagattttgggcgtgttatgggtctgacgatgaaagacatcattaatgaagcagcacgcgaaggccatgatatgttgttcgctgataacccgtcggcggtgaagaaagagctgaccattctcatccagaacacgattcgttccaaatggcacgaagttctggag

SEQ ID NO: 8 - protein, 346 aa, synthetic construct
  REGION 1..346: note = variant of RNA ligase 2 from Klebsiella phage KP179
MHHHHHHGGSGMFAYYSSLENHYNNKFIEKIRGAGFDMHTVEWVAREKIHGTNFSVIITPTEIVPAKRTGPILEGESFFGHEIIMKKYKDSFVKVQNMLNAMDLVSVQIFGEFAGGGIQKGVDYGDKDFYVFDILSDSGNEKVYWDDYRVESFCTTLGLKLAPLLGRGSFAELSQYPNDFKSIVNRYNELVDTTGLEHANKHVFGPQASSETGVAEGYVLKPVYPIFFNNGTRVAIKCKNSKFSEKAKSDKPILAKVELTENDKRVLEIFSEYVTWNRVSNVLSHIGSVTAKDFGRVMGLTMKDIINEAAREGHDMLFADNPSAVKKELTILIQNTIRSKWHEVLE

SEQ ID NO: 9 - DNA, 1038 bp, synthetic construct
  misc_feature 1..1038: note = variant of RNA ligase 2 from Klebsiella phage KP179
  source 1..1038: mol_type = other DNA
atgcatcaccatcaccatcacggtggcagcggtatgtttgcgtattattcaagtctggaaaaccattacaataataagttcattgagaagatccgtggtgcaggcttcgatatgcacaccgtggaatgggtagctcgcgagaagattcatggaacgaactttagcgttatcattactccgaccgaaatcgtcccagccaaacgcacagggccgatcttggaaggcgagtcgttctttggtcacgaaattatcatgaaaaaatataaagactccttcgtgaaggtgcagaacatgctgaatgccatggatcttgttagcgtgcaaatctttggcgaatttgcgggtggtggcattcagaaaggcgtcgattacggagacaaagatttctatgtgtttgacatcctgtctgatagcgggaacgagaaagtttactgggatgactatcgcgtcgaatcgttttgcaccacgctcggtctgaaattagcgcctctgctgggacgtggtagtttcgctgaactgtcccagtacccaaacgatttcaaaagcattgtgaaccgttataatgaattggttgatacgacgggcctggaacatgccaataaacacgtctttggtccgcaagcgtcttctgaaactggcgtagcagaaggctacgttcttaaacccgtctatccgatcttctttaataatggtacacgcgtggcgattaaatgcaagaactccaaattttcggagaaagccaagagcgacagtccaattaaagcgaaagtggaactgacggagaacgataaacgtgtgctcgaaatctttagcgagtatgttacctggaatcgcgtcagtaacgtactgtcacatattggctcagtgaccgcaaaagattttgggcgtgttatgggtctgacgatgaaagacatcattaatgaagcagcacgcgaaggccatgatatgttgttcgctgataacccgtcggcggtgaagaaagagctgaccattctcatccagaacacgattcgttccaaatggcacgaagttctggag

SEQ ID NO: 10 - protein, 346 aa, synthetic construct
  REGION 1..346: note = variant of RNA ligase 2 from Klebsiella phage KP179
MHHHHHHGGSGMFAYYSSLENHYNNKFIEKIRGAGFDMHTVEWVAREKIHGTNFSVIITPTEIVPAKRTGPILEGESFFGHEIIMKKYKDSFVKVQNMLNAMDLVSVQIFGEFAGGGIQKGVDYGDKDFYVFDILSDSGNEKVYWDDYRVESFCTTLGLKLAPLLGRGSFAELSQYPNDFKSIVNRYNELVDTTGLEHANKHVFGPQASSETGVAEGYVLKPVYPIFFNNGTRVAIKCKNSKFSEKAKSDSPIKAKVELTENDKRVLEIFSEYVTWNRVSNVLSHIGSVTAKDFGRVMGLTMKDIINEAAREGHDMLFADNPSAVKKELTILIQNTIRSKWHEVLE

SEQ ID NO: 11 - DNA, 1038 bp, synthetic construct
  misc_feature 1..1038: note = variant of RNA ligase 2 from Klebsiella phage KP179
  source 1..1038: mol_type = other DNA
atgcatcaccatcaccatcacggtggcagcggtatgtttgcgtattattcaagtctggaaaaccattacaataataagttcattgagaagatccgtggtgcaggcttcgatatgcacaccgtggaatgggtagctcgcgagaagattcatggaacgaactttagcgttatcattactccgaccgaaatcgtcccagccaaacgcacagggccgatcttggaaggcgagtcgttctttggtcacgaaattatcatgaaaaaatataaagactccttcgtgaaggtgcagaacatgctgaatgccatggatcttgttagcgtgcaaatctttggcgaatttgcgggtggtggcattcagaaaggcgtcgattacggagacaaagatttctatgtgtttgacatcctgtctgatagcgggaacgagaaagtttactgggatgactatcgcgtcgaatcgttttgcaccacgctcggtctgaaattagcgcctctgctgggacgtggtagtttcgctgaactgtcccagtacccaaacgatttcaaaagcattgtgaaccgttataatgaattggttgatacgacgggcctggaacatgccaataaacacgtctttggtccgcaagcgtcttctgaaactggcgtagcagaaggctacgttcttaaacccgtctatccgatcttctttaataatggtacacgcgtggcgattaaatgcaagaactccaaattttcggagaaagccactagcgacaaaccaattaaagcgaaagtggaactgacggagaacgataaacgtgtgctcgaaatctttagcgagtatgttacctggaatcgcgtcagtaacgtactgtcacatattggctcagtgaccgcaaaagattttgggcgtgttatgggtctgacgatgaaagacatcattaatgaagcagcacgcgaaggccatgatatgttgttcgctgataacccgtcggcggtgaagaaagagctgaccattctcatccagaacacgattcgttccaaatggcacgaagttctggag

SEQ ID NO: 12 - protein, 346 aa, synthetic construct
  REGION 1..346: note = variant of RNA ligase 2 from Klebsiella phage KP179
MHHHHHHGGSGMFAYYSSLENHYNNKFIEKIRGAGFDMHTVEWVAREKIHGTNFSVIITPTEIVPAKRTGPILEGESFFGHEIIMKKYKDSFVKVQNMLNAMDLVSVQIFGEFAGGGIQKGVDYGDKDFYVFDILSDSGNEKVYWDDYRVESFCTTLGLKLAPLLGRGSFAELSQYPNDFKSIVNRYNELVDTTGLEHANKHVFGPQASSETGVAEGYVLKPVYPIFFNNGTRVAIKCKNSKFSEKATSDKPIKAKVELTENDKRVLEIFSEYVTWNRVSNVLSHIGSVTAKDFGRVMGLTMKDIINEAAREGHDMLFADNPSAVKKELTILIQNTIRSKWHEVLE

SEQ ID NO: 13 - DNA, 1038 bp, synthetic construct
  misc_feature 1..1038: note = variant of RNA ligase 2 from Klebsiella phage KP179
  source 1..1038: mol_type = other DNA
atgcatcaccatcaccatcacggtggcagcggtatgtttgcgtattattcaagtctggaaaaccattacaataataagttcattgagaagatccgtggtgcaggcttcatgatgcacaccgtggaatgggtagctcgcgagaagattcatggaacgaactttagcgttatcattactccgaccgaaatcgtcccagccaaacgcacagggccgatcttggaaggcgagtcgttctttggtcacgaaattatcatgaaaaaatataaagactccttcgtgaaggtgcagaacatgctgaatgccatggatcttgttagcgtgcaaatctttggcgaatttgcgggtggtggcattcagaaaggcgtcgattacggagacaaagatttctatgtgtttgacatcctgtctgatagcgggaacgagaaagtttactgggatgactatcgcgtcgaatcgttttgcaccacgctcggtctgaaattagcgcctctgctgggacgtggtagtttcgctgaactgtcccagtacccaaacgatttcaaaagcattgtgaaccgttataatgaattggttgatacgacgggcctggaacatgccaataaacacgtctttggtccgcaagcgtcttctgaaactggcgtagcagaaggctacgttcttaaacccgtctatccgatcttctttaataatggtacacgcgtggcgattaaatgcaagaactccaaattttcggagaaagccaagagcgacaaaccaattaaagcgaaagtggaactgacggagaacgataaacgtgtgctcgaaatctttagcgagtatgttacctggaatcgcgtcagtaacgtactgtcacatattggctcagtgaccgcaaaagattttgggcgtgttatgggtctgacgatgaaagacatcattaatgaagcagcacgcgaaggccatgatatgttgttcgctgataacccgtcggcggtgaagaaagagctgaccattctcatccagaacacgattcgttccaaatggcacgaagttctggag

SEQ ID NO: 14 - protein, 346 aa, synthetic construct
  REGION 1..346: note = variant of RNA ligase 2 from Klebsiella phage KP179
MHHHHHHGGSGMFAYYSSLENHYNNKFIEKIRGAGFMMHTVEWVAREKIHGTNFSVIITPTEIVPAKRTGPILEGESFFGHEIIMKKYKDSFVKVQNMLNAMDLVSVQIFGEFAGGGIQKGVDYGDKDFYVFDILSDSGNEKVYWDDYRVESFCTTLGLKLAPLLGRGSFAELSQYPNDFKSIVNRYNELVDTTGLEHANKHVFGPQASSETGVAEGYVLKPVYPIFFNNGTRVAIKCKNSKFSEKAKSDKPIKAKVELTENDKRVLEIFSEYVTWNRVSNVLSHIGSVTAKDFGRVMGLTMKDIINEAAREGHDMLFADNPSAVKKELTILIQNTIRSKWHEVLE

SEQ ID NO: 15 - DNA, 1038 bp, synthetic construct
  misc_feature 1..1038: note = variant of RNA ligase 2 from Klebsiella phage KP179
  source 1..1038: mol_type = other DNA
atgcatcaccatcaccatcacggtggcagcggtatgtttgcgtattattcaagtctggaaaaccattacaataataagttcattgagaagatccgtggtgcaggcttcgatatgcacaccgtggaatgggtagctcgcgagaagattcatggaacgaacttgagcgttatcattactccgaccgaaatcgtcccagccaaacgcacagggccgatcttggaaggcgagtcgttctttggtcacgaaattatcatgaaaaaatataaagactccttcgtgaaggtgcagaacatgctgaatgccatggatcttgttagcgtgcaaatctttggcgaatttgcgggtggtggcattcagaaaggcgtcgattacggagacaaagatttctatgtgtttgacatcctgtctgatagcgggaacgagaaagtttactgggatgactatcgcgtcgaatcgttttgcaccacgctcggtctgaaattagcgcctctgctgggacgtggtagtttcgctgaactgtcccagtacccaaacgatttcaaaagcattgtgaaccgttataatgaattggttgatacgacgggcctggaacatgccaataaacacgtctttggtccgcaagcgtcttctgaaactggcgtagcagaaggctacgttcttaaacccgtctatccgatcttctttaataatggtacacgcgtggcgattaaatgcaagaactccaaattttcggagaaagccaagagcgacaaaccaattaaagcgaaagtggaactgacggagaacgataaacgtgtgctcgaaatctttagcgagtatgttacctggaatcgcgtcagtaacgtactgtcacatattggctcagtgaccgcaaaagattttgggcgtgttatgggtctgacgatgaaagacatcattaatgaagcagcacgcgaaggccatgatatgttgttcgctgataacccgtcggcggtgaagaaagagctgaccattctcatccagaacacgattcgttccaaatggcacgaagttctggag

SEQ ID NO: 16 - protein, 346 aa, synthetic construct
  REGION 1..346: note = variant of RNA ligase 2 from Klebsiella phage KP179
MHHHHHHGGSGMFAYYSSLENHYNNKFIEKIRGAGFDMHTVEWVAREKIHGTNLSVIITPTEIVPAKRTGPILEGESFFGHEIIMKKYKDSFVKVQNMLNAMDLVSVQIFGEFAGGGIQKGVDYGDKDFYVFDILSDSGNEKVYWDDYRVESFCTTLGLKLAPLLGRGSFAELSQYPNDFKSIVNRYNELVDTTGLEHANKHVFGPQASSETGVAEGYVLKPVYPIFFNNGTRVAIKCKNSKFSEKAKSDKPIKAKVELTENDKRVLEIFSEYVTWNRVSNVLSHIGSVTAKDFGRVMGLTMKDIINEAAREGHDMLFADNPSAVKKELTILIQNTIRSKWHEVLE

SEQ ID NO: 17 - DNA, 1038 bp, synthetic construct
  misc_feature 1..1038: note = variant of RNA ligase 2 from Klebsiella phage KP179
  source 1..1038: mol_type = other DNA
atgcatcaccatcaccatcacggtggcagcggtatgtttgcgtattattcaagtctggaaaaccattacaataataagttcattgagaagatccgtggtgcaggcttcgatatgcacaccgtggaatgggtagctcgcgagaagattcatggaacgaactttagcgttatcattactccgaccgaaatcgtcccagccaaacgcacagggccgatcttggaaggcgagtcgttctttggtcacgaaattatcatgaaaaaatataaagactccttcgtgaaggtgcagaacatgctgaatgccatggatcttgttagcgtgcaaatctttggcgaatttgcgggtggtggcattcagaaaggcgtcgattacggagacaaagatttctatgtgtttgacatcctgtctgatagcgggaacgagaaagtttactgggatgactatcgcgtcgaatcgttttgcaccacgctcggtctgaaattagcgcctctgctgggacgtggtagtttcgctgaactgtcccagtacccaaacgatttcaaaagcattgtgaaccgttataatgaattggttgatacgacgggcctggaacatgccaataaacacgtctttggtccgcaagcgtcttctgaaactggcgtagcagaaggctacgttcttaaacccgtctatccgatcttctttaataatggtacacgcgtggcgattaaatgcaagaactccaaattttcggagaaagccaagagcgacaaaccaattaaagcgaaagtgatgctgacggagaacgataaacgtgtgctcgaaatctttagcgagtatgttacctggaatcgcgtcagtaacgtactgtcacatattggctcagtgaccgcaaaagattttgggcgtgttatgggtctgacgatgaaagacatcattaatgaagcagcacgcgaaggccatgatatgttgttcgctgataacccgtcggcggtgaagaaagagctgaccattctcatccagaacacgattcgttccaaatggcacgaagttctggag

SEQ ID NO: 18 - protein, 346 aa, synthetic construct
  REGION 1..346: note = variant of RNA ligase 2 from Klebsiella phage KP179
MHHHHHHGGSGMFAYYSSLENHYNNKFIEKIRGAGFDMHTVEWVAREKIHGTNFSVIITPTEIVPAKRTGPILEGESFFGHEIIMKKYKDSFVKVQNMLNAMDLVSVQIFGEFAGGGIQKGVDYGDKDFYVFDILSDSGNEKVYWDDYRVESFCTTLGLKLAPLLGRGSFAELSQYPNDFKSIVNRYNELVDTTGLEHANKHVFGPQASSETGVAEGYVLKPVYPIFFNNGTRVAIKCKNSKFSEKAKSDKPIKAKVMLTENDKRVLEIFSEYVTWNRVSNVLSHIGSVTAKDFGRVMGLTMKDIINEAAREGHDMLFADNPSAVKKELTILIQNTIRSKWHEVLE

SEQ ID NO: 19 - DNA, 1038 bp, synthetic construct
  misc_feature 1..1038: note = variant of RNA ligase 2 from Klebsiella phage KP179
  source 1..1038: mol_type = other DNA
atgcatcaccatcaccatcacggtggcagcggtatgtttgcgtattattcaagtctggaaaaccattacaataataagttcattgagaagatccgtggtgcaggcttcgatatgcacaccgtggaatgggtagctcgcgagaagattcatggaacgaactttagcgttatcattactccgaccgaaatcgtcccagccaaacgcacagggccgatcttggaaggcgagtcgttctttggtcacgaaattatcatgaaaaaatataaagactccttcgtgaaggtgcagaacatgctgaatgccatggatcttgttagcgtgcaaatctttggcgaatttgcgggtggtggcattcagaaaggcgtcgattacggagacaaagatttctatgtgtttgacatcctgtctgatagcgggaacgagaaagtttactgggatgactatcgcgtcgaatcgttttgcaccacgctcggtctgaaattagcgcctctgctgggacgtggtagtttcgctgaactgtcccagtacccaaacgatttcaaaagcattgtgaaccgttataatgaattggttgatacgacgggcctggaacatgccaataaacacgtctttggtccgcaagcgtcttctgaaactggcgtagcagaaggctacgttcttaaacccgtctatccgatcttctttaataatggttctcgcgtggcgattaaatgcaagaactccaaattttcggagaaagccaagagcgacaaaccaattaaagcgaaagtggaactgacggagaacgataaacgtgtgctcgaaatctttagcgagtatgttacctggaatcgcgtcagtaacgtactgtcacatattggctcagtgaccgcaaaagattttgggcgtgttatgggtctgacgatgaaagacatcattaatgaagcagcacgcgaaggccatgatatgttgttcgctgataacccgtcggcggtgaagaaagagctgaccattctcatccagaacacgattcgttccaaatggcacgaagttctggag

SEQ ID NO: 20 - protein, 346 aa, synthetic construct
  REGION 1..346: note = variant of RNA ligase 2 from Klebsiella phage KP179
MHHHHHHGGSGMFAYYSSLENHYNNKFIEKIRGAGFDMHTVEWVAREKIHGTNFSVIITPTEIVPAKRTGPILEGESFFGHEIIMKKYKDSFVKVQNMLNAMDLVSVQIFGEFAGGGIQKGVDYGDKDFYVFDILSDSGNEKVYWDDYRVESFCTTLGLKLAPLLGRGSFAELSQYPNDFKSIVNRYNELVDTTGLEHANKHVFGPQASSETGVAEGYVLKPVYPIFFNNGSRVAIKCKNSKFSEKAKSDKPIKAKVELTENDKRVLEIFSEYVTWNRVSNVLSHIGSVTAKDFGRVMGLTMKDIINEAAREGHDMLFADNPSAVKKELTILIQNTIRSKWHEVLE

SEQ ID NO: 21 - DNA, 1038 bp, synthetic construct
  misc_feature 1..1038: note = variant of RNA ligase 2 from Klebsiella phage KP179
  source 1..1038: mol_type = other DNA
atgcatcaccatcaccatcacggtggcagcggtatgtttgcgatgtattcaagtctggaaaaccattacaataataagttcattgagaagatccgtggtgcaggcttcgatatgcacaccgtggaatgggtagctcgcgagaagattcatggaacgaactttagcgttatcattactccgaccgaaatcgtcccagccaaacgcacagggccgatcttggaaggcgagtcgttctttggtcacgaaattatcatgaaaaaatataaagactccttcgtgaaggtgcagaacatgctgaatgccatggatcttgttagcgtgcaaatctttggcgaatttgcgggtggtggcattcagaaaggcgtcgattacggagacaaagatttctatgtgtttgacatcctgtctgatagcgggaacgagaaagtttactgggatgactatcgcgtcgaatcgttttgcaccacgctcggtctgaaattagcgcctctgctgggacgtggtagtttcgctgaactgtcccagtacccaaacgatttcaaaagcattgtgaaccgttataatgaattggttgatacgacgggcctggaacatgccaataaacacgtctttggtccgcaagcgtcttctgaaactggcgtagcagaaggctacgttcttaaacccgtctatccgatcttctttaataatggtacacgcgtggcgattaaatgcaagaactccaaattttcggagaaagccaagagcgacaaaccaattaaagcgaaagtggaactgacggagaacgataaacgtgtgctcgaaatctttagcgagtatgttacctggaatcgcgtcagtaacgtactgtcacatattggctcagtgaccgcaaaagattttgggcgtgttatgggtctgacgatgaaagacatcattaatgaagcagcacgcgaaggccatgatatgttgttcgctgataacccgtcggcggtgaagaaagagctgaccattctcatccagaacacgattcgttccaaatggcacgaagttctggag

SEQ ID NO: 22 - protein, 346 aa, synthetic construct
  REGION 1..346: note = variant of RNA ligase 2 from Klebsiella phage KP179
MHHHHHHGGSGMFAMYSSLENHYNNKFIEKIRGAGFDMHTVEWVAREKIHGTNFSVIITPTEIVPAKRTGPILEGESFFGHEIIMKKYKDSFVKVQNMLNAMDLVSVQIFGEFAGGGIQKGVDYGDKDFYVFDILSDSGNEKVYWDDYRVESFCTTLGLKLAPLLGRGSFAELSQYPNDFKSIVNRYNELVDTTGLEHANKHVFGPQASSETGVAEGYVLKPVYPIFFNNGTRVAIKCKNSKFSEKAKSDKPIKAKVELTENDKRVLEIFSEYVTWNRVSNVLSHIGSVTAKDFGRVMGLTMKDIINEAAREGHDMLFADNPSAVKKELTILIQNTIRSKWHEVLE

SEQ ID NO: 23 - DNA, 1038 bp, synthetic construct
  misc_feature 1..1038: note = variant of RNA ligase 2 from Klebsiella phage KP179
  source 1..1038: mol_type = other DNA
atgcatcaccatcaccatcacggtggcagcggtatgtttgcgtattattcaagtctggaaaaccattacaataataagttcattgagaagatccgtggtgcaggcttcgatatgcacaccgtggaatgggtagctcgcgagaagattcatggaacgaactttagcgttatcattactccgaccgaaatcgtcccagccaaacgcacagggactatcttggaaggcgagtcgttctttggtcacgaaattatcatgaaaaaatataaagactccttcgtgaaggtgcagaacatgctgaatgccatggatcttgttagcgtgcaaatctttggcgaatttgcgggtggtggcattcagaaaggcgtcgattacggagacaaagatttctatgtgtttgacatcctgtctgatagcgggaacgagaaagtttactgggatgactatcgcgtcgaatcgttttgcaccacgctcggtctgaaattagcgcctctgctgggacgtggtagtttcgctgaactgtcccagtacccaaacgatttcaaaagcattgtgaaccgttataatgaattggttgatacgacgggcctggaacatgccaataaacacgtctttggtccgcaagcgtcttctgaaactggcgtagcagaaggctacgttcttaaacccgtctatccgatcttctttaataatggtacacgcgtggcgattaaatgcaagaactccaaattttcggagaaagccaagagcgacaaaccaattaaagcgaaagtggaactgacggagaacgataaacgtgtgctcgaaatctttagcgagtatgttacctggaatcgcgtcagtaacgtactgtcacatattggctcagtgaccgcaaaagattttgggcgtgttatgggtctgacgatgaaagacatcattaatgaagcagcacgcgaaggccatgatatgttgttcgctgataacccgtcggcggtgaagaaagagctgaccattctcatccagaacacgattcgttccaaatggcacgaagttctggag

SEQ ID NO: 24 - protein, 346 aa, synthetic construct
  REGION 1..346: note = variant of RNA ligase 2 from Klebsiella phage KP179
MHHHHHHGGSGMFAYYSSLENHYNNKFIEKIRGAGFDMHTVEWVAREKIHGTNFSVIITPTEIVPAKRTGTILEGESFFGHEIIMKKYKDSFVKVQNMLNAMDLVSVQIFGEFAGGGIQKGVDYGDKDFYVFDILSDSGNEKVYWDDYRVESFCTTLGLKLAPLLGRGSFAELSQYPNDFKSIVNRYNELVDTTGLEHANKHVFGPQASSETGVAEGYVLKPVYPIFFNNGTRVAIKCKNSKFSEKAKSDKPIKAKVELTENDKRVLEIFSEYVTWNRVSNVLSHIGSVTAKDFGRVMGLTMKDIINEAAREGHDMLFADNPSAVKKELTILIQNTIRSKWHEVLE

SEQ ID NO: 25 - DNA, 1038 bp, synthetic construct
  misc_feature 1..1038: note = variant of RNA ligase 2 from Klebsiella phage KP179
  source 1..1038: mol_type = other DNA
atgcatcaccatcaccatcacggtggcagcggtatgtttgcgtattattcaagtctggaaaaccattacaataatctgttcattgagaagatccgtggtgcaggcttcgatatgcacaccgtggaatgggtagctcgcgagaagattcatggaacgaactttagcgttatcattactccgaccgaaatcgtcccagccaaacgcacagggccgatcttggaaggcgagtcgttctttggtcacgaaattatcatgaaaaaatataaagactccttcgtgaaggtgcagaacatgctgaatgccatggatcttgttagcgtgcaaatctttggcgaatttgcgggtggtggcattcagaaaggcgtcgattacggagacaaagatttctatgtgtttgacatcctgtctgatagcgggaacgagaaagtttactgggatgactatcgcgtcgaatcgttttgcaccacgctcggtctgaaattagcgcctctgctgggacgtggtagtttcgctgaactgtcccagtacccaaacgatttcaaaagcattgtgaaccgttataatgaattggttgatacgacgggcctggaacatgccaataaacacgtctttggtccgcaagcgtcttctgaaactggcgtagcagaaggctacgttcttaaacccgtctatccgatcttctttaataatggtacacgcgtggcgattaaatgcaagaactccaaattttcggagaaagccaagagcgacaaaccaattaaagcgaaagtggaactgacggagaacgataaacgtgtgctcgaaatctttagcgagtatgttacctggaatcgcgtcagtaacgtactgtcacatattggctcagtgaccgcaaaagattttgggcgtgttatgggtctgacgatgaaagacatcattaatgaagcagcacgcgaaggccatgatatgttgttcgctgataacccgtcggcggtgaagaaagagctgaccattctcatccagaacacgattcgttccaaatggcacgaagttctggag

SEQ ID NO: 26 - protein, 346 aa, synthetic construct
  REGION 1..346: note = variant of RNA ligase 2 from Klebsiella phage KP179
MHHHHHHGGSGMFAYYSSLENHYNNLFIEKIRGAGFDMHTVEWVAREKIHGTNFSVIITPTEIVPAKRTGPILEGESFFGHEIIMKKYKDSFVKVQNMLNAMDLVSVQIFGEFAGGGIQKGVDYGDKDFYVFDILSDSGNEKVYWDDYRVESFCTTLGLKLAPLLGRGSFAELSQYPNDFKSIVNRYNELVDTTGLEHANKHVFGPQASSETGVAEGYVLKPVYPIFFNNGTRVAIKCKNSKFSEKAKSDKPIKAKVELTENDKRVLEIFSEYVTWNRVSNVLSHIGSVTAKDFGRVMGLTMKDIINEAAREGHDMLFADNPSAVKKELTILIQNTIRSKWHEVLE

SEQ ID NO: 27 - DNA, 1038 bp, synthetic construct
  misc_feature 1..1038: note = variant of RNA ligase 2 from Klebsiella phage KP179
  source 1..1038: mol_type = other DNA
atgcatcaccatcaccatcacggtggcagcggtatgtttgcgtattattcaagtctggaaaaccattacaataataagttcattgagaagatccgtggtgcaggcttcgatatgcacaccgtggaatgggtagctcgcgagaagattcatggaacgaactttagcgttatcattactccgaccgaaatcgtcccagccaaacgcacagggccgatcttggaaggcgagtcgttctttggtcacgaaattatcatgaaaaaatataaagactccttcgtgaaggtgcagaacatgctgaatgccatggatcttgttagcgtgcaaatctttggcgaatttgcgggtggtggcattcagaaaggcgtcgattacggagacaaagatttctatgtgtttgacatcctgtctgatagcgggaacgagaaagtttactgggatgactatcgcgtcgaatcgttttgcaccacgctcggtctgaaattagcgcctctgctgggacgtggtagtttcgctgaactgtcccagtacccaaacgatttcaaaagcattgtgaaccgttataatgaattggttgatacgacgggcctggaacatgccaataaacacgtctttggtccgcaagcgtcttctgaaactggcgtagcagaaggctacgttcttaaacccgtctatccgatcttctttaataatggtatgcgcgtggcgattaaatgcaagaactccaaattttcggagaaagccaagagcgacaaaccaattaaagcgaaagtggaactgacggagaacgataaacgtgtgctcgaaatctttagcgagtatgttacctggaatcgcgtcagtaacgtactgtcacatattggctcagtgaccgcaaaagattttgggcgtgttatgggtctgacgatgaaagacatcattaatgaagcagcacgcgaaggccatgatatgttgttcgctgataacccgtcggcggtgaagaaagagctgaccattctcatccagaacacgattcgttccaaatggcacgaagttctggag

SEQ ID NO: 28 - protein, 346 aa, synthetic construct
  REGION 1..346: note = variant of RNA ligase 2 from Klebsiella phage KP179
MHHHHHHGGSGMFAYYSSLENHYNNKFIEKIRGAGFDMHTVEWVAREKIHGTNFSVIITPTEIVPAKRTGPILEGESFFGHEIIMKKYKDSFVKVQNMLNAMDLVSVQIFGEFAGGGIQKGVDYGDKDFYVFDILSDSGNEKVYWDDYRVESFCTTLGLKLAPLLGRGSFAELSQYPNDFKSIVNRYNELVDTTGLEHANKHVFGPQASSETGVAEGYVLKPVYPIFFNNGMRVAIKCKNSKFSEKAKSDKPIKAKVELTENDKRVLEIFSEYVTWNRVSNVLSHIGSVTAKDFGRVMGLTMKDIINEAAREGHDMLFADNPSAVKKELTILIQNTIRSKWHEVLE

SEQ ID NO: 29 - DNA, 1038 bp, synthetic construct
  misc_feature 1..1038: note = variant of RNA ligase 2 from Klebsiella phage KP179
  source 1..1038: mol_type = other DNA
atgcatcaccatcaccatcacggtggcagcggtatgtttgcgtattattcaagtctggaaaaccattacaataataagttcattgagaagatccgtggtgcaggcttcgatatgcacaccgtggaatgggtagctcgcgagaagattcatggaacgaactttagcgttatcattactccgaccgaaatcgtcccagccaaacgcacagggccgatcttggaaggcgagtcgttctttggtcacgaaattatcatgaaaaaatataaagactccttcgtgaaggtgcagaacatgctgaatgccatggatcttgttagcgtgcaaatctttggcgaatttgcgggtctgggcattcagaaaggcgtcgattacggagacaaagatttctatgtgtttgacatcctgtctgatagcgggaacgagaaagtttactgggatgactatcgcgtcgaatcgttttgcaccacgctcggtctgaaattagcgcctctgctgggacgtggtagtttcgctgaactgtcccagtacccaaacgatttcaaaagcattgtgaaccgttataatgaattggttgatacgacgggcctggaacatgccaataaacacgtctttggtccgcaagcgtcttctgaaactggcgtagcagaaggctacgttcttaaacccgtctatccgatcttctttaataatggtacacgcgtggcgattaaatgcaagaactccaaattttcggagaaagccaagagcgacaaaccaattaaagcgaaagtggaactgacggagaacgataaacgtgtgctcgaaatctttagcgagtatgttacctggaatcgcgtcagtaacgtactgtcacatattggctcagtgaccgcaaaagattttgggcgtgttatgggtctgacgatgaaagacatcattaatgaagcagcacgcgaaggccatgatatgttgttcgctgataacccgtcggcggtgaagaaagagctgaccattctcatccagaacacgattcgttccaaatggcacgaagttctggag

SEQ ID NO: 30 - protein, 346 aa, synthetic construct
  REGION 1..346: note = variant of RNA ligase 2 from Klebsiella phage KP179
MHHHHHHGGSGMFAYYSSLENHYNNKFIEKIRGAGFDMHTVEWVAREKIHGTNFSVIITPTEIVPAKRTGPILEGESFFGHEIIMKKYKDSFVKVQNMLNAMDLVSVQIFGEFAGLGIQKGVDYGDKDFYVFDILSDSGNEKVYWDDYRVESFCTTLGLKLAPLLGRGSFAELSQYPNDFKSIVNRYNELVDTTGLEHANKHVFGPQASSETGVAEGYVLKPVYPIFFNNGTRVAIKCKNSKFSEKAKSDKPIKAKVELTENDKRVLEIFSEYVTWNRVSNVLSHIGSVTAKDFGRVMGLTMKDIINEAAREGHDMLFADNPSAVKKELTILIQNTIRSKWHEVLE

SEQ ID NO: 31 - DNA, 1038 bp, synthetic construct
  misc_feature 1..1038: note = variant of RNA ligase 2 from Klebsiella phage KP179
  source 1..1038: mol_type = other DNA
atgcatcaccatcaccatcacggtggcagcggtatgtttgcgtattattcaagtctggaaaaccattacaataataagttcattgagaagatccgtggtgcaggcttcgatagtcacaccgtggaatgggtagctcgcgagaagattcatggaacgaactttagcgttatcattactccgaccgaaatcgtcccagccaaacgcacagggccgatcttggaaggcgagtcgttctttggtcacgaaattatcatgaaaaaatataaagactccttcgtgaaggtgcagaacatgctgaatgccatggatcttgttagcgtgcaaatctttggcgaatttgcgggtggtggcattcagaaaggcgtcgattacggagacaaagatttctatgtgtttgacatcctgtctgatagcgggaacgagaaagtttactgggatgactatcgcgtcgaatcgttttgcaccacgctcggtctgaaattagcgcctctgctgggacgtggtagtttcgctgaactgtcccagtacccaaacgatttcaaaagcattgtgaaccgttataatgaattggttgatacgacgggcctggaacatgccaataaacacgtctttggtccgcaagcgtcttctgaaactggcgtagcagaaggctacgttcttaaacccgtctatccgatcttctttaataatggtacacgcgtggcgattaaatgcaagaactccaaattttcggagaaagccaagagcgacaaaccaattaaagcgaaagtggaactgacggagaacgataaacgtgtgctcgaaatctttagcgagtatgttacctggaatcgcgtcagtaacgtactgtcacatattggctcagtgaccgcaaaagattttgggcgtgttatgggtctgacgatgaaagacatcattaatgaagcagcacgcgaaggccatgatatgttgttcgctgataacccgtcggcggtgaagaaagagctgaccattctcatccagaacacgattcgttccaaatggcacgaagttctggag

SEQ ID NO: 32 - protein, 346 aa, synthetic construct
  REGION 1..346: note = variant of RNA ligase 2 from Klebsiella phage KP179
MHHHHHHGGSGMFAYYSSLENHYNNKFIEKIRGAGFDSHTVEWVAREKIHGTNFSVIITPTEIVPAKRTGPILEGESFFGHEIIMKKYKDSFVKVQNMLNAMDLVSVQIFGEFAGGGIQKGVDYGDKDFYVFDILSDSGNEKVYWDDYRVESFCTTLGLKLAPLLGRGSFAELSQYPNDFKSIVNRYNELVDTTGLEHANKHVFGPQASSETGVAEGYVLKPVYPIFFNNGTRVAIKCKNSKFSEKAKSDKPIKAKVELTENDKRVLEIFSEYVTWNRVSNVLSHIGSVTAKDFGRVMGLTMKDIINEAAREGHDMLFADNPSAVKKELTILIQNTIRSKWHEVLE

SEQ ID NO: 33 - DNA, 1038 bp, synthetic construct
  misc_feature 1..1038: note = variant of RNA ligase 2 from Klebsiella phage KP179
  source 1..1038: mol_type = other DNA
atgcatcaccatcaccatcacggtggcagcggtatgtttgcgtattattcaagtctggaaaaccattacaataataagttcattgagaagatccgtggtgcaggcttcgatatgcacaccgtggaatgggtagctcgcgagaagattcatggaacgaactttagcgttatcattactccgaccgaaatcgtcccagccaaacgcacagggccgatcttggaaggcgagtcgttctttggtcacgaaattatcatgaaaaaatataaagactccttcgtgaaggtgcagaacatgctgaatgccatggatcttgttagcgtgcaaatctttggcgaatttgcgggtggtggcattcagaaaggcgtcgattacggagacaaagatttctatgtgtttgacatcctgtctgatagcgggaacgagaaagtttactgggatgactatcgcgtcgaatcgttttgcaccacgctcggtctgaaattagcgcctctgctgggacgtggtagtttcgctgaactgtcccagtacccaaacgatttcaaaagcattgtgaaccgttataatgaattggttgatacgacgggcctggaacatgccaataaacacgtctttggtccgcaagcgtcttctgaaactggcgtagcagaaggctacgttcttaaacccgtctatccgatcttctttaataatggtacacgcgtggcgattaaatgcaagaactccaaattttcggagaaagccaagagcgacctgccaattaaagcgaaagtggaactgacggagaacgataaacgtgtgctcgaaatctttagcgagtatgttacctggaatcgcgtcagtaacgtactgtcacatattggctcagtgaccgcaaaagattttgggcgtgttatgggtctgacgatgaaagacatcattaatgaagcagcacgcgaaggccatgatatgttgttcgctgataacccgtcggcggtgaagaaagagctgaccattctcatccagaacacgattcgttccaaatggcacgaagttctggag

SEQ ID NO: 34 - protein, 346 aa, synthetic construct
  REGION 1..346: note = variant of RNA ligase 2 from Klebsiella phage KP179
MHHHHHHGGSGMFAYYSSLENHYNNKFIEKIRGAGFDMHTVEWVAREKIHGTNFSVIITPTEIVPAKRTGPILEGESFFGHEIIMKKYKDSFVKVQNMLNAMDLVSVQIFGEFAGGGIQKGVDYGDKDFYVFDILSDSGNEKVYWDDYRVESFCTTLGLKLAPLLGRGSFAELSQYPNDFKSIVNRYNELVDTTGLEHANKHVFGPQASSETGVAEGYVLKPVYPIFFNNGTRVAIKCKNSKFSEKAKSDLPIKAKVELTENDKRVLEIFSEYVTWNRVSNVLSHIGSVTAKDFGRVMGLTMKDIINEAAREGHDMLFADNPSAVKKELTILIQNTIRSKWHEVLE

SEQ ID NO: 35 - DNA, 1038 bp, synthetic construct
  misc_feature 1..1038: note = variant of RNA ligase 2 from Klebsiella phage KP179
  source 1..1038: mol_type = other DNA
atgcatcaccatcaccatcacggtggcagcggtatgtttgcgtattattcaagtctggaaaaccattacaattcgaagttcattgagaagatccgtggtgcaggcttcgatatgcacaccgtggaatgggtagctcgcgagaagattcatggaacgaactttagcgttatcattactccgaccgaaatcgtcccagccaaacgcacagggccgatcttggaaggcgagtcgttctttggtcacgaaattatcatgaaaaaatataaagactccttcgtgaaggtgcagaacatgctgaatgccatggatcttgttagcgtgcaaatctttggcgaatttgcgggtggtggcattcagaaaggcgtcgattacggagacaaagatttctatgtgtttgacatcctgtctgatagcgggaacgagaaagtttactgggatgactatcgcgtcgaatcgttttgcaccacgctcggtctgaaattagcgcctctgctgggacgtggtagtttcgctgaactgtcccagtacccaaacgatttcaaaagcattgtgaaccgttataatgaattggttgatacgacgggcctggaacatgccaataaacacgtctttggtccgcaagcgtcttctgaaactggcgtagcagaaggctacgttcttaaacccgtctatccgatcttctttaataatggtacacgcgtggcgattaaatgcaagaactccaaattttcggagaaagccaagagcgacaaaccaattaaagcgaaagtggaactgacggagaacgataaacgtgtgctcgaaatctttagcgagtatgttacctggaatcgcgtcagtaacgtactgtcacatattggctcagtgaccgcaaaagattttgggcgtgttatgggtctgacgatgaaagacatcattaatgaagcagcacgcgaaggccatgatatgttgttcgctgataacccgtcggcggtgaagaaagagctgaccattctcatccagaacacgattcgttccaaatggcacgaagttctggag

SEQ ID NO: 36 - protein, 346 aa, synthetic construct
  REGION 1..346: note = variant of RNA ligase 2 from Klebsiella phage KP179
MHHHHHHGGSGMFAYYSSLENHYNSKFIEKIRGAGFDMHTVEWVAREKIHGTNFSVIITPTEIVPAKRTGPILEGESFFGHEIIMKKYKDSFVKVQNMLNAMDLVSVQIFGEFAGGGIQKGVDYGDKDFYVFDILSDSGNEKVYWDDYRVESFCTTLGLKLAPLLGRGSFAELSQYPNDFKSIVNRYNELVDTTGLEHANKHVFGPQASSETGVAEGYVLKPVYPIFFNNGTRVAIKCKNSKFSEKAKSDKPIKAKVELTENDKRVLEIFSEYVTWNRVSNVLSHIGSVTAKDFGRVMGLTMKDIINEAAREGHDMLFADNPSAVKKELTILIQNTIRSKWHEVLE

SEQ ID NO: 37 - DNA, 1038 bp, synthetic construct
  misc_feature 1..1038: note = variant of RNA ligase 2 from Klebsiella phage KP179
  source 1..1038: mol_type = other DNA
atgcatcaccatcaccatcacggtggcagcggtatgtttgcgtattattcaagtctggaaaaccattacaataataagttcattgagaagatccgtggtgcaggcttcgatatgcacaccgtggaatgggtagctcgcgagaagattcatggaacgaactttagcgttatcattactccgaccgaaatcgtcccagccaaacgcacagggccgatcttggaaggcgagtcgttctttggtcacgaaattatcatgaaaaaatataaagactccttcgtgaaggtgcagaacatgctgaatgccatggatcttgttggcgtgcaaatctttggcgaatttgcgggtggtggcattcagaaaggcgtcgattacggagacaaagatttctatgtgtttgacatcctgtctgatagcgggaacgagaaagtttactgggatgactatcgcgtcgaatcgttttgcaccacgctcggtctgaaattagcgcctctgctgggacgtggtagtttcgctgaactgtcccagtacccaaacgatttcaaaagcattgtgaaccgttataatgaattggttgatacgacgggcctggaacatgccaataaacacgtctttggtccgcaagcgtcttctgaaactggcgtagcagaaggctacgttcttaaacccgtctatccgatcttctttaataatggtacacgcgtggcgattaaatgcaagaactccaaattttcggagaaagccaagagcgactttccaattaaagcgaaagtggaactgacggagaacgataaacgtgtgctcgaaatctttagcgagtatgttacctggaatcgcgtcagtaacgtactgtcacatattggctcagtgaccgcaaaagattttgggcgtgttatgggtctgacgatgaaagacatcattaatgaagcagcacgcgaaggccatgatatgttgttcgctgataacccgtcggcggtgaagaaagagctgaccattctcatccagaacacgattcgttccaaatggcacgaagttctggag

SEQ ID NO: 38 - protein, 346 aa, synthetic construct
  REGION 1..346: note = variant of RNA ligase 2 from Klebsiella phage KP179
MHHHHHHGGSGMFAYYSSLENHYNNKFIEKIRGAGFDMHTVEWVAREKIHGTNFSVIITPTEIVPAKRTGPILEGESFFGHEIIMKKYKDSFVKVQNMLNAMDLVGVQIFGEFAGGGIQKGVDYGDKDFYVFDILSDSGNEKVYWDDYRVESFCTTLGLKLAPLLGRGSFAELSQYPNDFKSIVNRYNELVDTTGLEHANKHVFGPQASSETGVAEGYVLKPVYPIFFNNGTRVAIKCKNSKFSEKAKSDFPIKAKVELTENDKRVLEIFSEYVTWNRVSNVLSHIGSVTAKDFGRVMGLTMKDIINEAAREGHDMLFADNPSAVKKELTILIQNTIRSKWHEVLE

SEQ ID NO: 39 - DNA, 1038 bp, synthetic construct
  misc_feature 1..1038: note = variant of RNA ligase 2 from Klebsiella phage KP179
  source 1..1038: mol_type = other DNA
atgcatcaccatcaccatcacggtggcagcggtatgtttgcgtattattcaagtctggaaaaccattacaataataagttcattgagaagatccgtggtgcaggcttcgatatgcacaccgtggaatgggtagctcgcgagaagattcatggatgtaactttagcgttatcattactccgaccgaaatcgtcccagccaaacgcacagggccgatcttggaaggcgagtcgttctttggtcacgaaattatcatgaaaaaatataaagactccttcgtgaaggtgcagaacatgctgaatgccatggatcttgttagcgtgcaaatctttggcgaatttgcgggtggtggcattcagaaaggcgtcgattacggagacaaagatttctatgtgtttgacatcctgtctgatagcgggaacgagaaagtttactgggatgactatcgcgtcgaatcgttttgcaccacgctcggtctgaaattagcgcctctgctgggacgtggtagtttcgctgaactgtcccagtacccaaacgatttcaaaagcattgtgaaccgttataatgaattggttgatacgacgggcctggaacatgccaataaacacgtctttggtccgcaagcgtcttctgaaactggcgtagcagaaggctacgttcttaaacccgtctatccgatcttctttaataatggtacacgcgtggcgattaaatgcaagaactccaaattttcggagaaagccaagagcgacaaaccaattaaagcgaaagtggaactgacggagaacgataaacgtgtgctcgaaatctttagcgagtatgttacctggaatcgcgtcagtaacgtactgtcacatattggctcagtgaccgcaaaagattttgggcgtgttatgggtctgacgatgaaagacatcattaatgaagcagcacgcgaaggccatgatatgttgttcgctgataacccgtcggcggtgaagaaagagctgaccattctcatccagaacacgattcgttccaaatggcacgaagttctggag

SEQ ID NO: 40 - protein, 346 aa, synthetic construct
  REGION 1..346: note = variant of RNA ligase 2 from Klebsiella phage KP179
MHHHHHHGGSGMFAYYSSLENHYNNKFIEKIRGAGFDMHTVEWVAREKIHGCNFSVIITPTEIVPAKRTGPILEGESFFGHEIIMKKYKDSFVKVQNMLNAMDLVSVQIFGEFAGGGIQKGVDYGDKDFYVFDILSDSGNEKVYWDDYRVESFCTTLGLKLAPLLGRGSFAELSQYPNDFKSIVNRYNELVDTTGLEHANKHVFGPQASSETGVAEGYVLKPVYPIFFNNGTRVAIKCKNSKFSEKAKSDKPIKAKVELTENDKRVLEIFSEYVTWNRVSNVLSHIGSVTAKDFGRVMGLTMKDIINEAAREGHDMLFADNPSAVKKELTILIQNTIRSKWHEVLE

SEQ ID NO: 41 - DNA, 1038 bp, synthetic construct
  misc_feature 1..1038: note = variant of RNA ligase 2 from Klebsiella phage KP179
  source 1..1038: mol_type = other DNA
atgcatcaccatcaccatcacggtggcagcggtatgtttgcgtattattcaagtctggaaaaccattacaataataagttcattgagaagatccgtcttgcaggcttcgatatgcacaccgtggaatgggtagctcgcgagaagattcatggaacgaactttagcgttatcattactccgaccgaaatcgtcccagccaaacgcacagggccgatcttggaaggcgagtcgttctttggtcacgaaattatcatgaaaaaatataaagactccttcgtgaaggtgcagaacatgctgaatgccatggatcttgttagcgtgcaaatctttggcgaatttgcgggtggtggcattcagaaaggcgtcgattacggagacaaagatttctatgtgtttgacatcctgtctgatagcgggaacgagaaagtttactgggatgactatcgcgtcgaatcgttttgcaccacgctcggtctgaaattagcgcctctgctgggacgtggtagtttcgctgaactgtcccagtacccaaacgatttcaaaagcattgtgaaccgttataatgaattggttgatacgacgggcctggaacatgccaataaacacgtctttggtccgcaagcgtcttctgaaactggcgtagcagaaggctacgttcttaaacccgtctatccgatcttctttaataatggtacacgcgtggcgattaaatgcaagaactccaaattttcggagaaagccaagagcgacaaaccaattaaagcgaaagtggaactgacggagaacgataaacgtgtgctcgaaatctttagcgagtatgttacctggaatcgcgtcagtaacgtactgtcacatattggctcagtgaccgcaaaagattttgggcgtgttatgggtctgacgatgaaagacatcattaatgaagcagcacgcgaaggccatgatatgttgttcgctgataacccgtcggcggtgaagaaagagctgaccattctcatccagaacacgattcgttccaaatggcacgaagttctggag

SEQ ID NO: 42 - protein, 346 aa, synthetic construct
  REGION 1..346: note = variant of RNA ligase 2 from Klebsiella phage KP179
MHHHHHHGGSGMFAYYSSLENHYNNKFIEKIRLAGFDMHTVEWVAREKIHGTNFSVIITPTEIVPAKRTGPILEGESFFGHEIIMKKYKDSFVKVQNMLNAMDLVSVQIFGEFAGGGIQKGVDYGDKDFYVFDILSDSGNEKVYWDDYRVESFCTTLGLKLAPLLGRGSFAELSQYPNDFKSIVNRYNELVDTTGLEHANKHVFGPQASSETGVAEGYVLKPVYPIFFNNGTRVAIKCKNSKFSEKAKSDKPIKAKVELTENDKRVLEIFSEYVTWNRVSNVLSHIGSVTAKDFGRVMGLTMKDIINEAAREGHDMLFADNPSAVKKELTILIQNTIRSKWHEVLE

SEQ ID NO: 43 - DNA, 1038 bp, synthetic construct
  misc_feature 1..1038: note = variant of RNA ligase 2 from Klebsiella phage KP179
  source 1..1038: mol_type = other DNA
atgcatcaccatcaccatcacggtggcagcggtatgtttgcgtattattcaagtctggaaaaccattacaataataagttcattgagaagatccgtggtgcaggcttcgatatgcacaccgtggaatgggtagctcgcgagaagattcatggaacgaactttagcgttatcattactccgaccgaaatcgtcccagccaaacgcacagggccgatcttggaaggcgagtcgttctttggtcacgaaattatcatgaaaaaatataaagactccttcgtgaaggtgcagaacatgctgaatgccatggatcttgttagcgtgcaaatctttggcgaatttgcgggtggtggcattcagaaaggcgtcgattacggagacaaagatttctatgtgtttgacatcctgtctgatagcgggaacgagaaagtttactgggatgactatcgcgtcgaatcgttttgcaccacgctcggtctgaaattagcgcctctgctgggacgtggtagtttcgctgaactgtcccagtacccaaacgatttcaaaagcattgtgaaccgttataatgaattggttgatacgacgggcctggaacatgccaataaacacgtctttggtccgcaagcgtcttctgaaactggcgtagcagaaggctacgttcttaaacccgtctatccgatcttctttaataatggtacacgcgtggcgattaaatgcaagaactccaaattttcggagaaagccaagagcgacgggccaattaaagcgaaagtggaactgacggagaacgataaacgtgtgctcgaaatctttagcgagtatgttacctggaatcgcgtcagtaacgtactgtcacatattggctcagtgaccgcaaaagattttgggcgtgttatgggtctgacgatgaaagacatcattaatgaagcagcacgcgaaggccatgatatgttgttcgctgataacccgtcggcggtgaagaaagagctgaccattctcatccagaacacgattcgttccaaatggcacgaagttctggag

SEQ ID NO: 44 - protein, 346 aa, synthetic construct
  REGION 1..346: note = variant of RNA ligase 2 from Klebsiella phage KP179
MHHHHHHGGSGMFAYYSSLENHYNNKFIEKIRGAGFDMHTVEWVAREKIHGTNFSVIITPTEIVPAKRTGPILEGESFFGHEIIMKKYKDSFVKVQNMLNAMDLVSVQIFGEFAGGGIQKGVDYGDKDFYVFDILSDSGNEKVYWDDYRVESFCTTLGLKLAPLLGRGSFAELSQYPNDFKSIVNRYNELVDTTGLEHANKHVFGPQASSETGVAEGYVLKPVYPIFFNNGTRVAIKCKNSKFSEKAKSDGPIKAKVELTENDKRVLEIFSEYVTWNRVSNVLSHIGSVTAKDFGRVMGLTMKDIINEAAREGHDMLFADNPSAVKKELTILIQNTIRSKWHEVLE

SEQ ID NO: 45 - DNA, 1038 bp, synthetic construct
  misc_feature 1..1038: note = variant of RNA ligase 2 from Klebsiella phage KP179
  source 1..1038: mol_type = other DNA
atgcatcaccatcaccatcacggtggcagcggtatgtttgcgtattattcaagtctggaaaaccattacaataataagttcattgagaagatccgtggtgcaggcttcgatatgcacaccgtggaatgggtagctcgcgagaagattcatggaacgaactttagcgttatcattactccgaccgaaatcgtcccagccaaacgcacagggccgatcttggaaggcgagtcgttctttggtcacgaaattatcatgaaaaaatataaagactccttcgtgaaggtgcagaacatgctgaatgccatggatcttgttagcgtgcaaatctttggcgaatttgcgggtggtggcattcagaaaggcgtcgattacggagacaaagatttctatgtgtttgacatcctgtctgatagcgggaacgagaaagtttactgggatgactatcgcgtcgaatcgttttgcaccacgctcggtctgaaattagcgcctctgctgggacgtggtagtttcgctgaactgtcccagtacccaaacgatttcaaaagcattgtgaaccgttataatgaattggttgatacgacgggcctggaacatgccaataaacacgtctttggtccgcaagcgtcttctgaaactggcgtagcagaaggctacgttcttaaacccgtctatccgatcttctttaataatggtacacgcgtggcgattaaatgcaagaactccaaattttcggagaaagccaagagcgacaaaccaattaaagcgtcggtggaactgacggagaacgataaacgtgtgctcgaaatctttagcgagtatgttacctggaatcgcgtcagtaacgtactgtcacatattggctcagtgaccgcaaaagattttgggcgtgttatgggtctgacgatgaaagacatcattaatgaagcagcacgcgaaggccatgatatgttgttcgctgataacccgtcggcggtgaagaaagagctgaccattctcatccagaacacgattcgttccaaatggcacgaagttctggag

SEQ ID NO: 46 - protein, 346 aa, synthetic construct
  REGION 1..346: note = variant of RNA ligase 2 from Klebsiella phage KP179
MHHHHHHGGSGMFAYYSSLENHYNNKFIEKIRGAGFDMHTVEWVAREKIHGTNFSVIITPTEIVPAKRTGPILEGESFFGHEIIMKKYKDSFVKVQNMLNAMDLVSVQIFGEFAGGGIQKGVDYGDKDFYVFDILSDSGNEKVYWDDYRVESFCTTLGLKLAPLLGRGSFAELSQYPNDFKSIVNRYNELVDTTGLEHANKHVFGPQASSETGVAEGYVLKPVYPIFFNNGTRVAIKCKNSKFSEKAKSDKPIKASVELTENDKRVLEIFSEYVTWNRVSNVLSHIGSVTAKDFGRVMGLTMKDIINEAAREGHDMLFADNPSAVKKELTILIQNTIRSKWHEVLE

SEQ ID NO: 47 - DNA, 1038 bp, synthetic construct
  misc_feature 1..1038: note = variant of RNA ligase 2 from Klebsiella phage KP179
  source 1..1038: mol_type = other DNA
atgcatcaccatcaccatcacggtggcagcggtatgtttgcgtattattcaagtctggaaaaccattacaataataagttcattgagaagatccgtggtgcaggcttcgatatgcacaccgtggaatgggtagctcgcgagaagattcatggaacgaactttagcgttatcattactccgaccgaaatcgtcccagccaaacgcacagggccgatcttggaaggcgagtcgttctttggtcacgaaattatcatgaaaaaatataaagactccttcgtgaaggtgcagaacatgctgaatgccatggatcttgttagcgtgcaaatctttggcgaatttgcgggtggtggcattcagaaaggcgtcgattacggagacaaagatttctatgtgtttgacatcctgtctgatagcgggaacgagaaagtttactgggatgactatcgcgtcgaatcgttttgcaccacgctcggtctgaaattagcgcctctgctgggacgtggtagtttcgctgaactgtcccagtacccaaacgatttcaaaagcattgtgaaccgttataatgaattggttgatacgacgggcctggaacatgccaataaacacgtctttggtccgcaagcgtcttctgaaactggcgtagcagaaggctacgttcttaaacccgtctatccgatcttctttaataatggtacacgcgtggcgattaaatgcaagaactccaaattttcggagaaattgaagagcgacaaaccaattaaagcgaaagtggaactgacggagaacgataaacgtgtgctcgaaatctttagcgagtatgttacctggaatcgcgtcagtaacgtactgtcacatattggctcagtgaccgcaaaagattttgggcgtgttatgggtctgacgatgaaagacatcattaatgaagcagcacgcgaaggccatgatatgttgttcgctgataacccgtcggcggtgaagaaagagctgaccattctcatccagaacacgattcgttccaaatggcacgaagttctggag

SEQ ID NO: 48 - protein, 346 aa, synthetic construct
  REGION 1..346: note = variant of RNA ligase 2 from Klebsiella phage KP179
MHHHHHHGGSGMFAYYSSLENHYNNKFIEKIRGAGFDMHTVEWVAREKIHGTNFSVIITPTEIVPAKRTGPILEGESFFGHEIIMKKYKDSFVKVQNMLNAMDLVSVQIFGEFAGGGIQKGVDYGDKDFYVFDILSDSGNEKVYWDDYRVESFCTTLGLKLAPLLGRGSFAELSQYPNDFKSIVNRYNELVDTTGLEHANKHVFGPQASSETGVAEGYVLKPVYPIFFNNGTRVAIKCKNSKFSEKLKSDKPIKAKVELTENDKRVLEIFSEYVTWNRVSNVLSHIGSVTAKDFGRVMGLTMKDIINEAAREGHDMLFADNPSAVKKELTILIQNTIRSKWHEVLE

SEQ ID NO: 49 - DNA, 1038 bp, synthetic construct
  misc_feature 1..1038: note = variant of RNA ligase 2 from Klebsiella phage KP179
  source 1..1038: mol_type = other DNA
atgcatcaccatcaccatcacggtggcagcggtatgtttgcgtattattcaagtctggaaaaccattacaataataagttcattgagaagatccgtggtgcaggcttcctgatgcacaccgtggaatgggtagctcgcgagaagattcatggaacgaactttagcgttatcattactccgaccgaaatcgtcccagccaaacgcacagggccgatcttggaaggcgagtcgttctttggtcacgaaattatcatgaaaaaatataaagactccttcgtgaaggtgcagaacatgctgaatgccatggatcttgttagcgtgcaaatctttggcgaatttgcgggtggtggcattcagaaaggcgtcgattacggagacaaagatttctatgtgtttgacatcctgtctgatagcgggaacgagaaagtttactgggatgactatcgcgtcgaatcgttttgcaccacgctcggtctgaaattagcgcctctgctgggacgtggtagtttcgctgaactgtcccagtacccaaacgatttcaaaagcattgtgaaccgttataatgaattggttgatacgacgggcctggaacatgccaataaacacgtctttggtccgcaagcgtcttctgaaactggcgtagcagaaggctacgttcttaaacccgtctatccgatcttctttaataatggtacgcgcgtggcgattaaatgcaagaactccaaattttcggagaaagccaagcgtgacaaaccaattaaagcgaaagtggaactgacggagaacgataaacgtctgctcgaaatctttagcgagtatgttacctggaatcgcgtcagtaacgtactgtcacatattggctcagtgaccgcaaaagattttgggcgtgttatgggtctgacgatgaaagacatcattaatgaagcagcacgcgaaggccatgatctgttgttcgctgataacccgtcggcggtgaagaaagagctgcgcattctcatccgccacacgattcgttccaaatggcacgaagttctggag

SEQ ID NO: 50 - protein, 346 aa, synthetic construct
  REGION 1..346: note = variant of RNA ligase 2 from Klebsiella phage KP179
MHHHHHHGGSGMFAYYSSLENHYNNKFIEKIRGAGFLMHTVEWVAREKIHGTNFSVIITPTEIVPAKRTGPILEGESFFGHEIIMKKYKDSFVKVQNMLNAMDLVSVQIFGEFAGGGIQKGVDYGDKDFYVFDILSDSGNEKVYWDDYRVESFCTTLGLKLAPLLGRGSFAELSQYPNDFKSIVNRYNELVDTTGLEHANKHVFGPQASSETGVAEGYVLKPVYPIFFNNGTRVAIKCKNSKFSEKAKRDKPIKAKVELTENDKRLLEIFSEYVTWNRVSNVLSHIGSVTAKDFGRVMGLTMKDIINEAAREGHDLLFADNPSAVKKELRILIRHTIRSKWHEVLE

SEQ ID NO: 51 - DNA, 1038 bp, synthetic construct
  misc_feature 1..1038: note = variant of RNA ligase 2 from Klebsiella phage KP179
  source 1..1038: mol_type = other DNA
atgcatcaccatcaccatcacggtggcagcggtatgtttgcgtattattcaagtctggaaagtcattacaataataagttcattgagaagatccgtggtgcaggcttcgatatgcacaccgtggaatgggtagctcgcgagaagattcatggaacgaactttagcgttatcattactccgaccgaaatcgtcccagccaaacgcacagggccgatcttggaaggcgagtcgttctttggtcacgaaattatcatgaaaaaatataaagactccttcgtgaaggtgcagaacatgctgaatgccatggatcttgttagcgtgcaaatctttggcgaatttgcgggtggtggcattcagaaaggcgtcgattacggagacaaagatttctatgtgtttgacatcctgtctgatagcgggaacgagaaagtttactgggatgactatcgcgtcgaatcgttttgcaccacgctcggtctgaaattagcgcctctgctgggacgtggtagtttcgctgaactgtcccagtacccaaacgatttcaaaagcattgtgaaccgttataatgaattggttgatacgacgggcctggaacatgccaataaacacgtctttggtccgcaagcgtcttctgaaactggcgtagcagaaggctacgttcttaaacccgtctatccgatcttctttaataatggtacacgcgtggcgattaaatgcaagaactccaaattttcggagaaagccaagagcgacaaaccaattaaagcgaaagtggaactgacggagaacgataaacgtgtgctcgaaatctttagcgagtatgttacctggaatcgcgtcagtaacgtactgtcacatattggctcagtgaccgcaaaagattttgggcgtgttatgggtctgacgatgaaagacatcattaatgaagcagcacgcgaaggccatgatatgttgttcgctgataacccgtcggcggtgaagaaagagctgaccattctcatccagaacacgattcgttccaaatggcacgaagttctggag

SEQ ID NO: 52 - protein, 346 aa, synthetic construct
  REGION 1..346: note = variant of RNA ligase 2 from Klebsiella phage KP179
MHHHHHHGGSGMFAYYSSLESHYNNKFIEKIRGAGFDMHTVEWVAREKIHGTNFSVIITPTEIVPAKRTGPILEGESFFGHEIIMKKYKDSFVKVQNMLNAMDLVSVQIFGEFAGGGIQKGVDYGDKDFYVFDILSDSGNEKVYWDDYRVESFCTTLGLKLAPLLGRGSFAELSQYPNDFKSIVNRYNELVDTTGLEHANKHVFGPQASSETGVAEGYVLKPVYPIFFNNGTRVAIKCKNSKFSEKAKSDKPIKAKVELTENDKRVLEIFSEYVTWNRVSNVLSHIGSVTAKDFGRVMGLTMKDIINEAAREGHDMLFADNPSAVKKELTILIQNTIRSKWHEVLE

SEQ ID NO: 53 - DNA, 1038 bp, synthetic construct
  misc_feature 1..1038: note = variant of RNA ligase 2 from Klebsiella phage KP179
  source 1..1038: mol_type = other DNA
atgcatcaccatcaccatcacggtggcagcaacatgtttgcgtattattcaagtctggaaaaccattacaataataagttcattgagaagatccgtggtgcaggcttcctgatgcacaccgtggaatgggtagctcgcgagaagattcatggaacgaactttagcgttatcattactccgaccgaaatcgtcccagccaaacgcacagggccgatcttggaaggcgagtcgttctttggtcacgaaattatcatgaaaaaatataaagactccttcgtgaaggtgcagaacatgctgaatgccatggatcttgttagcgtgcaaatctttggcgaatttgcgggtggtggcattcagaaaggcgtcgattacggagacaaagatttctatgtgtttgacatcctgtctgatagcgggaacgagaaagtttactgggatgactatcgcgtcgaatcgttttgcaccacgctcggtctgaaattagcgcctctgctgggacgtggtagtttcgctgaactgtcccagtacccaaacgatttcaaaagcattgtgaaccgttataatgaattggttgatacgacgggcctggaacatgccaataaacacgtctttggtccgcaagcgtcttctgaaactggcgtagcagaaggctacgttcttaaacccgtctatccgatcttctttaataatggtacgcgcgtggcgattaaatgcaagaactccaaattttcggagaaagccaagctggacaaaccaattaaagcgaaagtggaactgacggagaacgataaacgtctgctcgaaatctttagcgagtatgttacctggaatcgcgtcagtaacgtactgtcacatattggctcagtgaccgcaaaagattttgggcgtgttatgggtctgacgatgaaagacatcattaatgaagcagcacgcgaaggccatgatctgttgttcgctgataacccgtcggcggtgaagaaagagctgaccattctcatccagaacacgattcgttccaaatggcacgaagttctggag

SEQ ID NO: 54 - protein, 346 aa, synthetic construct
  REGION 1..346: note = variant of RNA ligase 2 from Klebsiella phage KP179
MHHHHHHGGSNMFAYYSSLENHYNNKFIEKIRGAGFLMHTVEWVAREKIHGTNFSVIITPTEIVPAKRTGPILEGESFFGHEIIMKKYKDSFVKVQNMLNAMDLVSVQIFGEFAGGGIQKGVDYGDKDFYVFDILSDSGNEKVYWDDYRVESFCTTLGLKLAPLLGRGSFAELSQYPNDFKSIVNRYNELVDTTGLEHANKHVFGPQASSETGVAEGYVLKPVYPIFFNNGTRVAIKCKNSKFSEKAKLDKPIKAKVELTENDKRLLEIFSEYVTWNRVSNVLSHIGSVTAKDFGRVMGLTMKDIINEAAREGHDLLFADNPSAVKKELTILIQNTIRSKWHEVLE

SEQ ID NO: 55 - DNA, 1038 bp, synthetic construct
  misc_feature 1..1038: note = variant of RNA ligase 2 from Klebsiella phage KP179
  source 1..1038: mol_type = other DNA
atgcatcaccatcaccatcacggtggcagcggtatgtttgcgtattattcaagtctggaaaaccattacaataataagttcattgagaagatccgtggtgcaggcttcgatatgcacaccgtggaatgggtagctcgcgagaagattcatggaacgaactttagcgttatcattactccgaccgaaatcgtcccagccaaacgcacagggccgatcttggaaggcgagtcgttctttggtcacgaaattatcatgaaaaaatataaagactccttcgtgaaggtgcagaacatgctgaatgccatggatcttgttagcgtgcaaatctttggcgaatttgcgggtggtggcattcagaaaggcgtcgattacggagacaaagatttctatgtgtttgacatcctgtctgatagcgggaacgagaaagtttactgggatgactatcgcgtcgaatcgttttgcaccacgctcggtctgaaattagcgcctctgctgggacgtggtagtttcgctgaactgtcccagtacccaaacgatttcaaaagcattgtgaaccgttataatgaattggttgatacgacgggcctggaacatgccaataaacacgtctttggtccgcaagcgtcttctgaaactggcgtagcagaaggctacgttcttaaacccgtctatccgatcttctttaataatggtacacgcgtggcgattaaatgcaagaactccaaattttcggagaaagccaagagcgacaaaccaattaaagcgaaagtggaactgacgcctaacgataaacgtgtgctcgaaatctttagcgagtatgttacctggaatcgcgtcagtaacgtactgtcacatattggctcagtgaccgcaaaagattttgggcgtgttatgggtctgacgatgaaagacatcattaatgaagcagcacgcgaaggccatgatatgttgttcgctgataacccgtcggcggtgaagaaagagctgaccattctcatccagaacacgattcgttccaaatggcacgaagttctggag

SEQ ID NO: 56 - protein, 346 aa, synthetic construct
  REGION 1..346: note = variant of RNA ligase 2 from Klebsiella phage KP179
MHHHHHHGGSGMFAYYSSLENHYNNKFIEKIRGAGFDMHTVEWVAREKIHGTNFSVIITPTEIVPAKRTGPILEGESFFGHEIIMKKYKDSFVKVQNMLNAMDLVSVQIFGEFAGGGIQKGVDYGDKDFYVFDILSDSGNEKVYWDDYRVESFCTTLGLKLAPLLGRGSFAELSQYPNDFKSIVNRYNELVDTTGLEHANKHVFGPQASSETGVAEGYVLKPVYPIFFNNGTRVAIKCKNSKFSEKAKSDKPIKAKVELTPNDKRVLEIFSEYVTWNRVSNVLSHIGSVTAKDFGRVMGLTMKDIINEAAREGHDMLFADNPSAVKKELTILIQNTIRSKWHEVLE

SEQ ID NO: 57 - DNA, 1038 bp, synthetic construct
  misc_feature 1..1038: note = variant of RNA ligase 2 from Klebsiella phage KP179
  source 1..1038: mol_type = other DNA
atgcatcaccatcaccatcacggtggcagcaacatgtttgcgtattattcaagtctggaaaaccattacaataataagttcattgagaagatccgtggtgcaggcttcgacatgcacaccgtggaatgggtagctcgcgagaagattcatggaacgaactttagcgttatcattactccgaccgaaatcgtcccagccaaacgcacagggccgatcttggaaggcgagtcgttctttggtcacgaaattatcatgaaaaaatataaagactccttcgtgaaggtgcagaacatgctgaatgccatggatcttgttagcgtgcaaatctttggcgaatttgcgggtggtggcattcagaaaggcgtcgattacggagacaaagatttctatgtgtttgacatcctgtctgatagcgggaacgagaaagtttactgggatgactatcgcgtcgaatcgttttgcaccacgctcggtctgaaattagcgcctctgctgggacgtggtagtttcgctgaactgtcccagtacccaaacgatttcaaaagcattgtgaaccgttataatgaattggttgatacgacgggcctggaacatgccaataaacacgtctttggtccgcaagcgtcttctgaaactggcgtagcagaaggctacgttcttaaacccgtctatccgatcttctttaataatggtacacgcgtggcgattaaatgcaagaactccaaattttcggagaaagccaagagcgacaaaccaattaaagcgaaagtggaactgacggagaacgataaacgtctgctcgaaatctttagcgagtatgttacctggaatcgcgtcagtaacgtactgtcacatattggctcagtgaccgcaaaagattttgggcgtgttatgggtctgacgatgaaagacatcattaatgaagcagcacgcgaaggccatgatctgttgttcgctgataacccgtcggcggtgaagaaagagctgaccattctcatccagaacacgattcgttccaaatggcacgaagttctggag

SEQ ID NO: 58 - protein, 346 aa, synthetic construct
  REGION 1..346: note = variant of RNA ligase 2 from Klebsiella phage KP179
MHHHHHHGGSNMFAYYSSLENHYNNKFIEKIRGAGFDMHTVEWVAREKIHGTNFSVIITPTEIVPAKRTGPILEGESFFGHEIIMKKYKDSFVKVQNMLNAMDLVSVQIFGEFAGGGIQKGVDYGDKDFYVFDILSDSGNEKVYWDDYRVESFCTTLGLKLAPLLGRGSFAELSQYPNDFKSIVNRYNELVDTTGLEHANKHVFGPQASSETGVAEGYVLKPVYPIFFNNGTRVAIKCKNSKFSEKAKSDKPIKAKVELTENDKRLLEIFSEYVTWNRVSNVLSHIGSVTAKDFGRVMGLTMKDIINEAAREGHDLLFADNPSAVKKELTILIQNTIRSKWHEVLE

SEQ ID NO: 59 - DNA, 1038 bp, synthetic construct
  misc_feature 1..1038: note = variant of RNA ligase 2 from Klebsiella phage KP179
  source 1..1038: mol_type = other DNA
atgcatcaccatcaccatcacggtggcagcaacatgtttgcgtattattcaagtctggaaaaccattacaataataagttcattgagaagatccgtggtgcaggcttcgacatgcacaccgtggaatgggtagctcgcgagaagattcatggaacgaactttagcgttatcattactccgaccgaaatcgtcccagccaaacgcacagggccgatcttggaaggcgagtcgttctttggtcacgaaattatcatgaaaaaatataaagactccttcgtgaaggtgcagaacatgctgaatgccatggatcttgttagcgtgcaaatctttggcgaatttgcgggtggtggcattcagaaaggcgtcgattacggagacaaagatttctatgtgtttgacatcctgtctgatagcgggaacgagaaagtttactgggatgactatcgcgtcgaatcgttttgcaccacgctcggtctgaaattagcgcctctgctgggacgtggtagtttcgctgaactgtcccagtacccaaacgatttcaaaagcattgtgaaccgttataatgaattggttgatacgacgggcctggaacatgccaataaacacgtctttggtccgcaagcgtcttctgaaactggcgtagcagaaggctacgttcttaaacccgtctatccgatcttctttaataatggtacgcgcgtggcgattaaatgcaagaactccaaattttcggagaaagccacgcgtgacaaaccaattaaagcgaaagtggaactgacggagaacgataaacgtctgctcgaaatctttagcgagtatgttacctggaatcgcgtcagtaacgtactgtcacatattggctcagtgaccgcaaaagattttgggcgtgttatgggtctgacgatgaaagacatcattaatgaagcagcacgcgaaggccatgatatgttgttcgctgataacccgtcggcggtgaagaaagagctgacgattctcatccagaacacgattcgttccaaatggcacgaagttctggag

SEQ ID NO: 60 - protein, 346 aa, synthetic construct
  REGION 1..346: note = variant of RNA ligase 2 from Klebsiella phage KP179
MHHHHHHGGSNMFAYYSSLENHYNNKFIEKIRGAGFDMHTVEWVAREKIHGTNFSVIITPTEIVPAKRTGPILEGESFFGHEIIMKKYKDSFVKVQNMLNAMDLVSVQIFGEFAGGGIQKGVDYGDKDFYVFDILSDSGNEKVYWDDYRVESFCTTLGLKLAPLLGRGSFAELSQYPNDFKSIVNRYNELVDTTGLEHANKHVFGPQASSETGVAEGYVLKPVYPIFFNNGTRVAIKCKNSKFSEKATRDKPIKAKVELTENDKRLLEIFSEYVTWNRVSNVLSHIGSVTAKDFGRVMGLTMKDIINEAAREGHDMLFADNPSAVKKELTILIQNTIRSKWHEVLE

SEQ ID NO: 61 - DNA, 1038 bp, synthetic construct
  misc_feature 1..1038: note = variant of RNA ligase 2 from Klebsiella phage KP179
  source 1..1038: mol_type = other DNA
atgcatcaccatcaccatcacggtggcagcggtatgtttgcgtattattcaagtctggaaaaccattacaataataagttcattgagaagatccgtggtgcaggcttcgatatgcacaccgtggaatgggtagctcgcgagaagattcatggaacgaactttagcgttatcattactccgaccgaaatcgtcccagccaaacgcacagggccgatcttggaaggcgagtcgttctttggtcacgaaattatcatgaaaaaatataaagactccttcgtgaaggtgcagaacatgctgaatgccatggatcttgttagcgtgcaaatctttggcgaatttgcgggtggtggcattcagaaaggcgtcgattacggagacaaagatttctatgtgtttgacatcctgtctgatagcgggaacgagaaagtttactgggatgactatcgcgtcgaatcgttttgcaccacgctcggtctgaaattagcgcctctgctgggacgtggtagtttcgctgaactgtcccagtacccaaacgatttcaaaagcattgtgaaccgttataatgaattggttgatacgacgggcctggaacatgccaataaacacgtctttggtccgcaagcgtcttctgaaactggcgtagcagaaggctacgttcttaaacccgtctatccgatcttctttaataatggtacacgcgtggcgattaaatgcaagaactccaaattttcggagaaagccaagagcgacaaaccaattaaagcgaaagtggaactgacggagaacgataaacgtgtgctcgaaatctttagcgagtatgttacctggaatcgcgtcagtaacgtactgtcacatattggctcagtgaccgcaaaagattttgggcgtgttatgggtctgacgatgaaagacatcattaatgaagcagcacgcgaaggccatgatatgttgttcgctgataacccgtcggcggtgaagaaagagctgaccgatctcatccagaacacgattcgttccaaatggcacgaagttctggag

SEQ ID NO: 62 - protein, 346 aa, synthetic construct
  REGION 1..346: note = variant of RNA ligase 2 from Klebsiella phage KP179
MHHHHHHGGSGMFAYYSSLENHYNNKFIEKIRGAGFDMHTVEWVAREKIHGTNFSVIITPTEIVPAKRTGPILEGESFFGHEIIMKKYKDSFVKVQNMLNAMDLVSVQIFGEFAGGGIQKGVDYGDKDFYVFDILSDSGNEKVYWDDYRVESFCTTLGLKLAPLLGRGSFAELSQYPNDFKSIVNRYNELVDTTGLEHANKHVFGPQASSETGVAEGYVLKPVYPIFFNNGTRVAIKCKNSKFSEKAKSDKPIKAKVELTENDKRVLEIFSEYVTWNRVSNVLSHIGSVTAKDFGRVMGLTMKDIINEAAREGHDMLFADNPSAVKKELTDLIQNTIRSKWHEVLE

SEQ ID NO: 63 - DNA, 1038 bp, synthetic construct
  misc_feature 1..1038: note = variant of RNA ligase 2 from Klebsiella phage KP179
  source 1..1038: mol_type = other DNA
atgcatcaccatcaccatcacggtggcagcaacatgtttgcgtattattcaagtctggaaaaccattacaataataagttcattgagaagatccgtggtgcaggcttcgacatgcacaccgtggaatgggtagctcgcgagaagattcatggaacgaactttagcgttatcattactccgaccgaaatcgtcccagccaaacgcacagggccgatcttggaaggcgagtcgttctttggtcacgaaattatcatgaaaaaatataaagactccttcgtgaaggtgcagaacatgctgaatgccatggatcttgttagcgtgcaaatctttggcgaatttgcgggtggtggcattcagaaaggcgtcgattacggagacaaagatttctatgtgtttgacatcctgtctgatagcgggaacgagaaagtttactgggatgactatcgcgtcgaatcgttttgcaccacgctcggtctgaaattagcgcctctgctgggacgtggtagtttcgctgaactgtcccagtacccaaacgatttcaaaagcattgtgaaccgttataatgaattggttgatacgacgggcctggaacatgccaataaacacgtctttggtccgcaagcgtcttctgaaactggcgtagcagaaggctacgttcttaaacccgtctatccgatcttctttaataatggtacgcgcgtggcgattaaatgcaagaactccaaattttcggagaaagccacgctggacaaaccaattaaagcgaaagtggaactgacggagaacgataaacgtgtgctcgaaatctttagcgagtatgttacctggaatcgcgtcagtaacgtactgtcacatattggctcagtgaccgcaaaagattttgggcgtgttatgggtctgacgatgaaagacatcattaatgaagcagcacgcgaaggccatgatatgttgttcgctgataacccgtcggcggtgaagaaagagctgaccattctcatccagaacacgattcgttccaaatggcacgaagttctggag

SEQ ID NO: 64 - protein, 346 aa, synthetic construct
  REGION 1..346: note = variant of RNA ligase 2 from Klebsiella phage KP179
MHHHHHHGGSNMFAYYSSLENHYNNKFIEKIRGAGFDMHTVEWVAREKIHGTNFSVIITPTEIVPAKRTGPILEGESFFGHEIIMKKYKDSFVKVQNMLNAMDLVSVQIFGEFAGGGIQKGVDYGDKDFYVFDILSDSGNEKVYWDDYRVESFCTTLGLKLAPLLGRGSFAELSQYPNDFKSIVNRYNELVDTTGLEHANKHVFGPQASSETGVAEGYVLKPVYPIFFNNGTRVAIKCKNSKFSEKATLDKPIKAKVELTENDKRVLEIFSEYVTWNRVSNVLSHIGSVTAKDFGRVMGLTMKDIINEAAREGHDMLFADNPSAVKKELTILIQNTIRSKWHEVLE

SEQ ID NO: 65 - DNA, 1038 bp, synthetic construct
  misc_feature 1..1038: note = variant of RNA ligase 2 from Klebsiella phage KP179
  source 1..1038: mol_type = other DNA
atgcatcaccatcaccatcacggtggcagcggtatgtttgcgtattattcaagtctggaaaaccattacaataataagttcattgagaagatccgtggtgcaggcttctttatgcacaccgtggaatgggtagctcgcgagaagattcatggaacgaactttagcgttatcattactccgaccgaaatcgtcccagccaaacgcacagggccgatcttggaaggcgagtcgttctttggtcacgaaattatcatgaaaaaatataaagactccttcgtgaaggtgcagaacatgctgaatgccatggatcttgttagcgtgcaaatctttggcgaatttgcgggtggtggcattcagaaaggcgtcgattacggagacaaagatttctatgtgtttgacatcctgtctgatagcgggaacgagaaagtttactgggatgactatcgcgtcgaatcgttttgcaccacgctcggtctgaaattagcgcctctgctgggacgtggtagtttcgctgaactgtcccagtacccaaacgatttcaaaagcattgtgaaccgttataatgaattggttgatacgacgggcctggaacatgccaataaacacgtctttggtccgcaagcgtcttctgaaactggcgtagcagaaggctacgttcttaaacccgtctatccgatcttctttaataatggtacacgcgtggcgattaaatgcaagaactccaaattttcggagaaagccaagagcgacaaaccaattaaagcgaaagtggaactgacggagaacgataaacgtgtgctcgaaatctttagcgagtatgttacctggaatcgcgtcagtaacgtactgtcacatattggctcagtgaccgcaaaagattttgggcgtgttatgggtctgacgatgaaagacatcattaatgaagcagcacgcgaaggccatgatatgttgttcgctgataacccgtcggcggtgaagaaagagctgaccattctcatccagaacacgattcgttccaaatggcacgaagttctggag

SEQ ID NO: 66 - protein, 346 aa, synthetic construct
  REGION 1..346: note = variant of RNA ligase 2 from Klebsiella phage KP179
MHHHHHHGGSGMFAYYSSLENHYNNKFIEKIRGAGFFMHTVEWVAREKIHGTNFSVIITPTEIVPAKRTGPILEGESFFGHEIIMKKYKDSFVKVQNMLNAMDLVSVQIFGEFAGGGIQKGVDYGDKDFYVFDILSDSGNEKVYWDDYRVESFCTTLGLKLAPLLGRGSFAELSQYPNDFKSIVNRYNELVDTTGLEHANKHVFGPQASSETGVAEGYVLKPVYPIFFNNGTRVAIKCKNSKFSEKAKSDKPIKAKVELTENDKRVLEIFSEYVTWNRVSNVLSHIGSVTAKDFGRVMGLTMKDIINEAAREGHDMLFADNPSAVKKELTILIQNTIRSKWHEVLE

SEQ ID NO: 67 - DNA, 1038 bp, synthetic construct
  misc_feature 1..1038: note = variant of RNA ligase 2 from Klebsiella phage KP179
  source 1..1038: mol_type = other DNA
atgcatcaccatcaccatcacggtggcagcggtatgtttgcgtattattcaagtctggaaaaccattacaataataagttcattgagaagatccgtggtgcaggcttcgatatgcacaccgtggaatgggtagctcgcgagaagattcatggaacgaactttagcgttatcattactccgaccgaaatcgtcccagccaaacgcacagggccgatcttggaaggcgagtcgttctttggtcacgaaattatcatgaaaaaatataaagactccttcgtgaaggtgcagaacatgctgaatgccatggatcttgttagcgtgcaaatctttggcgaatttgcgggtggtggcattcagaaaggcgtcgattacggagacaaagatttctatgtgtttgacatcctgtctgatagcgggaacgagaaagtttactgggatgactatcgcgtcgaatcgttttgcaccacgctcggtctgaaattagcgcctctgctgggacgtggtagtttcgctgaactgtcccagtacccaaacgatttcaaaagcattgtgaaccgttataatgaattggttgatacgacgggcctggaacatgccaataaacacgtctttggtccgcaagcgtcttctgaaactggcgtagcagaaggctacgttcttaaacccgtctatccgatcttctttaataatggtacacgcgtggcgattaaatgcaagaactccaaattttcggagaaagccaagagcgacaaaccaattaaagttaaagtggaactgacggagaacgataaacgtgtgctcgaaatctttagcgagtatgttacctggaatcgcgtcagtaacgtactgtcacatattggctcagtgaccgcaaaagattttgggcgtgttatgggtctgacgatgaaagacatcattaatgaagcagcacgcgaaggccatgatatgttgttcgctgataacccgtcggcggtgaagaaagagctgaccattctcatccagaacacgattcgttccaaatggcacgaagttctggag

SEQ ID NO: 68 - protein, 346 aa, synthetic construct
  REGION 1..346: note = variant of RNA ligase 2 from Klebsiella phage KP179
MHHHHHHGGSGMFAYYSSLENHYNNKFIEKIRGAGFDMHTVEWVAREKIHGTNFSVIITPTEIVPAKRTGPILEGESFFGHEIIMKKYKDSFVKVQNMLNAMDLVSVQIFGEFAGGGIQKGVDYGDKDFYVFDILSDSGNEKVYWDDYRVESFCTTLGLKLAPLLGRGSFAELSQYPNDFKSIVNRYNELVDTTGLEHANKHVFGPQASSETGVAEGYVLKPVYPIFFNNGTRVAIKCKNSKFSEKAKSDKPIKVKVELTENDKRVLEIFSEYVTWNRVSNVLSHIGSVTAKDFGRVMGLTMKDIINEAAREGHDMLFADNPSAVKKELTILIQNTIRSKWHEVLE

SEQ ID NO: 69 - DNA, 1038 bp, synthetic construct
  misc_feature 1..1038: note = variant of RNA ligase 2 from Klebsiella phage KP179
  source 1..1038: mol_type = other DNA
atgcatcaccatcaccatcacggtggcagcggtatgtttgcgtattattcaagtctggaaaaccattacaataataagttcattgagaagatccgtggtgcaggcttcctgatgcacaccgtggaatgggtagctcgcgagaagattcatggaacgaactttagcgttatcattactccgaccgaaatcgtcccagccaaacgcacagggccgatcttggaaggcgagtcgttctttggtcacgaaattatcatgaaaaaatataaagactccttcgtgaaggtgcagaacatgctgaatgccatggatcttgttagcgtgcaaatctttggcgaatttgcgggtggtggcattcagaaaggcgtcgattacggagacaaagatttctatgtgtttgacatcctgtctgatagcgggaacgagaaagtttactgggatgactatcgcgtcgaatcgttttgcaccacgctcggtctgaaattagcgcctctgctgggacgtggtagtttcgctgaactgtcccagtacccaaacgatttcaaaagcattgtgaaccgttataatgaattggttgatacgacgggcctggaacatgccaataaacacgtctttggtccgcaagcgtcttctgaaactggcgtagcagaaggctacgttcttaaacccgtctatccgatcttctttaataatggtacacgcgtggcgattaaatgcaagaactccaaattttcggagaaagccaagcgtgacaaaccaattaaagcgaaagtggaactgacggagaacgataaacgtctgctcgaaatctttagcgagtatgttacctggaatcgcgtcagtaacgtactgtcacatattggctcagtgaccgcaaaagattttgggcgtgttatgggtctgacgatgaaagacatcattaatgaagcagcacgcgaaggccatgatctgttgttcgctgataacccgtcggcggtgaagaaagagctgacgattctcatccgcaacacgattcgttccaaatggcacgaagttctggag

SEQ ID NO: 70 - protein, 346 aa, synthetic construct
  REGION 1..346: note = variant of RNA ligase 2 from Klebsiella phage KP179
MHHHHHHGGSGMFAYYSSLENHYNNKFIEKIRGAGFLMHTVEWVAREKIHGTNFSVIITPTEIVPAKRTGPILEGESFFGHEIIMKKYKDSFVKVQNMLNAMDLVSVQIFGEFAGGGIQKGVDYGDKDFYVFDILSDSGNEKVYWDDYRVESFCTTLGLKLAPLLGRGSFAELSQYPNDFKSIVNRYNELVDTTGLEHANKHVFGPQASSETGVAEGYVLKPVYPIFFNNGTRVAIKCKNSKFSEKAKRDKPIKAKVELTENDKRLLEIFSEYVTWNRVSNVLSHIGSVTAKDFGRVMGLTMKDIINEAAREGHDLLFADNPSAVKKELTILIRNTIRSKWHEVLE

SEQ ID NO: 71 - DNA, 1038 bp, synthetic construct
  misc_feature 1..1038: note = variant of RNA ligase 2 from Klebsiella phage KP179
  source 1..1038: mol_type = other DNA
atgcatcaccatcaccatcacggtggcagcggtatgtttgcgtattattcaagtctggaaaaccattacaataataagttcattgagaagatccgtggtgcaggcttcgatctgcacaccgtggaatgggtagctcgcgagaagattcatggaacgaactttagcgttatcattactccgaccgaaatcgtcccagccaaacgcacagggccgatcttggaaggcgagtcgttctttggtcacgaaattatcatgaaaaaatataaagactccttcgtgaaggtgcagaacatgctgaatgccatggatcttgttagcgtgcaaatctttggcgaatttgcgggtggtggcattcagaaaggcgtcgattacggagacaaagatttctatgtgtttgacatcctgtctgatagcgggaacgagaaagtttactgggatgactatcgcgtcgaatcgttttgcaccacgctcggtctgaaattagcgcctctgctgggacgtggtagtttcgctgaactgtcccagtacccaaacgatttcaaaagcattgtgaaccgttataatgaattggttgatacgacgggcctggaacatgccaataaacacgtctttggtccgcaagcgtcttctgaaactggcgtagcagaaggctacgttcttaaacccgtctatccgatcttctttaataatggtacacgcgtggcgattaaatgcaagaactccaaattttcggagaaagccaagagcgacaaaccaattaaagcgaaagtggaactgacggagaacgataaacgtgtgctcgaaatctttagcgagtatgttacctggaatcgcgtcagtaacgtactgtcacatattggctcagtgaccgcaaaagattttgggcgtgttatgggtctgacgatgaaagacatcattaatgaagcagcacgcgaaggccatgatatgttgttcgctgataacccgtcggcggtgaagaaagagctgaccattctcatccagaacacgattcgttccaaatggcacgaagttctggag

SEQ ID NO: 72 - protein, 346 aa, synthetic construct
  REGION 1..346: note = variant of RNA ligase 2 from Klebsiella phage KP179
MHHHHHHGGSGMFAYYSSLENHYNNKFIEKIRGAGFDLHTVEWVAREKIHGTNFSVIITPTEIVPAKRTGPILEGESFFGHEIIMKKYKDSFVKVQNMLNAMDLVSVQIFGEFAGGGIQKGVDYGDKDFYVFDILSDSGNEKVYWDDYRVESFCTTLGLKLAPLLGRGSFAELSQYPNDFKSIVNRYNELVDTTGLEHANKHVFGPQASSETGVAEGYVLKPVYPIFFNNGTRVAIKCKNSKFSEKAKSDKPIKAKVELTENDKRVLEIFSEYVTWNRVSNVLSHIGSVTAKDFGRVMGLTMKDIINEAAREGHDMLFADNPSAVKKELTILIQNTIRSKWHEVLE

SEQ ID NO: 73 - DNA, 1038 bp, synthetic construct
  misc_feature 1..1038: note = variant of RNA ligase 2 from Klebsiella phage KP179
  source 1..1038: mol_type = other DNA
atgcatcaccatcaccatcacggtggcagcggtatgtttgcgtattattcaagtctggaaaaccattacaataataagttcattgagaagatccgtggtgcaggcttcgacatgcacaccgtggaatgggtagctcgcgagaagattcatggaacgaactttagcgttatcattactccgaccgaaatcgtcccagccaaacgcacagggccgatcttggaaggcgagtcgttctttggtcacgaaattatcatgaaaaaatataaagactccttcgtgaaggtgcagaacatgctgaatgccatggatcttgttagcgtgcaaatctttggcgaatttgcgggtggtggcattcagaaaggcgtcgattacggagacaaagatttctatgtgtttgacatcctgtctgatagcgggaacgagaaagtttactgggatgactatcgcgtcgaatcgttttgcaccacgctcggtctgaaattagcgcctctgctgggacgtggtagtttcgctgaactgtcccagtacccaaacgatttcaaaagcattgtgaaccgttataatgaattggttgatacgacgggcctggaacatgccaataaacacgtctttggtccgcaagcgtcttctgaaactggcgtagcagaaggctacgttcttaaacccgtctatccgatcttctttaataatggtacgcgcgtggcgattaaatgcaagaactccaaattttcggagaaagccaagagcgacaaaccaattaaagcgaaagtggaactgacggagaacgataaacgtctgctcgaaatctttagcgagtatgttacctggaatcgcgtcagtaacgtactgtcacatattggctcagtgaccgcaaaagattttgggcgtgttatgggtctgacgatgaaagacatcattaatgaagcagcacgcgaaggccatgatatgttgttcgctgataacccgtcggcggtgaagaaagagctgaccattctcatccagaacacgattcgttccaaatggcacgaagttctggag

SEQ ID NO: 74 - protein, 346 aa, synthetic construct
  REGION 1..346: note = variant of RNA ligase 2 from Klebsiella phage KP179
MHHHHHHGGSGMFAYYSSLENHYNNKFIEKIRGAGFDMHTVEWVAREKIHGTNFSVIITPTEIVPAKRTGPILEGESFFGHEIIMKKYKDSFVKVQNMLNAMDLVSVQIFGEFAGGGIQKGVDYGDKDFYVFDILSDSGNEKVYWDDYRVESFCTTLGLKLAPLLGRGSFAELSQYPNDFKSIVNRYNELVDTTGLEHANKHVFGPQASSETGVAEGYVLKPVYPIFFNNGTRVAIKCKNSKFSEKAKSDKPIKAKVELTENDKRLLEIFSEYVTWNRVSNVLSHIGSVTAKDFGRVMGLTMKDIINEAAREGHDMLFADNPSAVKKELTILIQNTIRSKWHEVLE

SEQ ID NO: 75 - DNA, 1038 bp, synthetic construct
  misc_feature 1..1038: note = variant of RNA ligase 2 from Klebsiella phage KP179
  source 1..1038: mol_type = other DNA
atgcatcaccatcaccatcacggtggcagcggtatgtttgcgtattattcaagtctggaaaaccattacaataataagttcattgagaagatccgtggtgcaggcttcgatatgcacaccgtggaatgggtagctcgcgagaagattcatggaacgaactttagcgttatcattactccgaccgaaatcgtcccagccaaacgcacagggccgatcttggaaggcgagtcgttctttggtcacgaaattatcatgaaaaaatataaagactccttcgtgaaggtgcagaacatgctgaatgccatggatcttgttagcgtgcaaatctttggcgaatttgcgggtggtggcattcagaaaggcgtcgattacggagacaaagatttctatgtgtttgacatcctgtctgatagcgggaacgagaaagtttactgggatgactatcgcgtcgaatcgttttgcaccacgctcggtctgaaattagcgcctctgctgggacgtggtagtttcgctgaactgtcccagtacccaaacgatttcaaaagcattgtgaaccgttataatgaattggttgatacgacgggcctggaacatgccaataaacacgtctttggtccgcaagcgtcttctgaaactggcgtagcagaaggctacgttcttaaacccgtctatccgatcttctttaataatggtaggcgcgtggcgattaaatgcaagaactccaaattttcggagaaagccaagagcgacaaaccaattaaagcgaaagtggaactgacggagaacgataaacgtgtgctcgaaatctttagcgagtatgttacctggaatcgcgtcagtaacgtactgtcacatattggctcagtgaccgcaaaagattttgggcgtgttatgggtctgacgatgaaagacatcattaatgaagcagcacgcgaaggccatgatatgttgttcgctgataacccgtcggcggtgaagaaagagctgaccattctcatccagaacacgattcgttccaaatggcacgaagttctggag

SEQ ID NO: 76 - protein, 346 aa, synthetic construct
  REGION 1..346: note = variant of RNA ligase 2 from Klebsiella phage KP179
MHHHHHHGGSGMFAYYSSLENHYNNKFIEKIRGAGFDMHTVEWVAREKIHGTNFSVIITPTEIVPAKRTGPILEGESFFGHEIIMKKYKDSFVKVQNMLNAMDLVSVQIFGEFAGGGIQKGVDYGDKDFYVFDILSDSGNEKVYWDDYRVESFCTTLGLKLAPLLGRGSFAELSQYPNDFKSIVNRYNELVDTTGLEHANKHVFGPQASSETGVAEGYVLKPVYPIFFNNGRRVAIKCKNSKFSEKAKSDKPIKAKVELTENDKRVLEIFSEYVTWNRVSNVLSHIGSVTAKDFGRVMGLTMKDIINEAAREGHDMLFADNPSAVKKELTILIQNTIRSKWHEVLE

SEQ ID NO: 77 - DNA, 1038 bp, synthetic construct
  misc_feature 1..1038: note = variant of RNA ligase 2 from Klebsiella phage KP179
  source 1..1038: mol_type = other DNA
atgcatcaccatcaccatcacggtggcagcaacatgtttgcgtattattcaagtctggaaaaccattacaataataagttcattgagaagatccgtggtgcaggcttcctgatgcacaccgtggaatgggtagctcgcgagaagattcatggaacgaactttagcgttatcattactccgaccgaaatcgtcccagccaaacgcacagggccgatcttggaaggcgagtcgttctttggtcacgaaattatcatgaaaaaatataaagactccttcgtgaaggtgcagaacatgctgaatgccatggatcttgttagcgtgcaaatctttggcgaatttgcgggtggtggcattcagaaaggcgtcgattacggagacaaagatttctatgtgtttgacatcctgtctgatagcgggaacgagaaagtttactgggatgactatcgcgtcgaatcgttttgcacccaactcggtctgaaattagcgcctctgctgggacgtggtagtttcgctgaactgtcccagtacccaaacgatttcaaaagcattgtgaaccgttataatgaattggttgatacgacgggcctggaacatgccaataaacacgtctttggtccgcaagcgtcttctgaaactggcgtagcagaaggctacgttcttaaacccgtctatccgatcttctttaataatggtacgcgcgtggcgattaaatgcaagaactccaaattttcggagaaagccaagcgtgacaaaccaattaaagcgaaagtggaactgacggagaacgataaacgtgtgctcgaaatctttagcgagtatgttacctggaatcgcgtcagtaacgtactgtcacatattggctcagtgaccgcaaaagattttgggcgtgttatgggtctgacgatgaaagacatcattaatgaagcagcacgcgaaggccatgatatgttgttcgctgataacccgtcggcggtgaagaaagagctgacgattctcatccagcacacgattcgttccaaatggcacgaagttctggag

SEQ ID NO: 78 - protein, 346 aa, synthetic construct
  REGION 1..346: note = variant of RNA ligase 2 from Klebsiella phage KP179
MHHHHHHGGSNMFAYYSSLENHYNNKFIEKIRGAGFLMHTVEWVAREKIHGTNFSVIITPTEIVPAKRTGPILEGESFFGHEIIMKKYKDSFVKVQNMLNAMDLVSVQIFGEFAGGGIQKGVDYGDKDFYVFDILSDSGNEKVYWDDYRVESFCTQLGLKLAPLLGRGSFAELSQYPNDFKSIVNRYNELVDTTGLEHANKHVFGPQASSETGVAEGYVLKPVYPIFFNNGTRVAIKCKNSKFSEKAKRDKPIKAKVELTENDKRVLEIFSEYVTWNRVSNVLSHIGSVTAKDFGRVMGLTMKDIINEAAREGHDMLFADNPSAVKKELTILIQHTIRSKWHEVLE

SEQ ID NO: 79 - DNA, 1038 bp, synthetic construct
  misc_feature 1..1038: note = variant of RNA ligase 2 from Klebsiella phage KP179
  source 1..1038: mol_type = other DNA
atgcatcaccatcaccatcacggtggcagcggtatgtttgcgtattattcaagtctggaaaaccattacaataataagttcattgagaagatccgtggtgcaggcttcctgatgcacaccgtggaatgggtagctcgcgagaagattcatggaacgaactttagcgttatcattactccgaccgaaatcgtcccagccaaacgcacagggccgatcttggaaggcgagtcgttctttggtcacgaaattatcatgaaaaaatataaagactccttcgtgaaggtgcagaacatgctgaatgccatggatcttgttagcgtgcaaatctttggcgaatttgcgggtggtggcattcagaaaggcgtcgattacggagacaaagatttctatgtgtttgacatcctgtctgatagcgggaacgagaaagtttactgggatgactatcgcgtcgaatcgttttgcacccaactcggtctgaaattagcgcctctgctgggacgtggtagtttcgctgaactgtcccagtacccaaacgatttcaaaagcattgtgaaccgttataatgaattggttgatacgacgggcctggaacatgccaataaacacgtctttggtccgcaagcgtcttctgaaactggcgtagcagaaggctacgttcttaaacccgtctatccgatcttctttaataatggtacgcgcgtggcgattaaatgcaagaactccaaattttcggagaaagccacgcgtgacaaaccaattaaagcgaaagtggaactgacggagaacgataaacgtctgctcgaaatctttagcgagtatgttacctggaatcgcgtcagtaacgtactgtcacatattggctcagtgaccgcaaaagattttgggcgtgttatgggtctgacgatgaaagacatcattaatgaagcagcacgcgaaggccatgatatgttgttcgctgataacccgtcggcggtgaagaaagagctgacgattctcatccgcaacacgattcgttccaaatggcacgaagttctggag

SEQ ID NO: 80 - protein, 346 aa, synthetic construct
  REGION 1..346: note = variant of RNA ligase 2 from Klebsiella phage KP179
MHHHHHHGGSGMFAYYSSLENHYNNKFIEKIRGAGFLMHTVEWVAREKIHGTNFSVIITPTEIVPAKRTGPILEGESFFGHEIIMKKYKDSFVKVQNMLNAMDLVSVQIFGEFAGGGIQKGVDYGDKDFYVFDILSDSGNEKVYWDDYRVESFCTQLGLKLAPLLGRGSFAELSQYPNDFKSIVNRYNELVDTTGLEHANKHVFGPQASSETGVAEGYVLKPVYPIFFNNGTRVAIKCKNSKFSEKATRDKPIKAKVELTENDKRLLEIFSEYVTWNRVSNVLSHIGSVTAKDFGRVMGLTMKDIINEAAREGHDMLFADNPSAVKKELTILIRNTIRSKWHEVLE

SEQ ID NO: 81 - DNA, 1038 bp, synthetic construct
  misc_feature 1..1038: note = variant of RNA ligase 2 from Klebsiella phage KP179
  source 1..1038: mol_type = other DNA
atgcatcaccatcaccatcacggtggcagcggtatgtttgcgtattattcaagtctggaaaaccattacaataataagttcattgagaagatccgtggtgcaggcttcgatatgcacaccgtggaatgggtagctcgcgagaagattcatggaacgaactttagcgttatcattactccgaccgaaatcgtcccagccaaacgcacagggccgatcttggaaggcgagtcgttctttggtcacgaaattatcatgaaaaaatataaagactccttcgtgaaggtgcagaacatgctgaatgccatggatcttgttagcgtgcaaatctttggcgaatttgcgggtggtggcattcagaaaggcgtcgattacggagacaaagatttctatgtgtttgacatcctgtctgatagcgggaacgagaaagtttactgggatgactatcgcgtcgaatcgttttgcaccacgctcggtctgaaattagcgcctctgctgggacgtggtagtttcgctgaactgtcccagtacccaaacgatttcaaaagcattgtgaaccgttataatgaattggttgatacgacgggcctggaacatgccaataaacacgtctttggtccgcaagcgtcttctgaaactggcgtagcagaaggctacgttcttaaacccgtctatccgatcttctttaataatggtacacgcgtggcgattaaatgcaagaactccaaattttcggagaaagccaagagcgacaaaccaattaaagcgaaagtggaactgacggagaacgataaacgtgtgctcgaaatctttagcgagtatgttacctggaatcgcgtcagtaacgtactgtcacatattggctcagtgaccgcaaaagattttgggcgtgttatgggtctgacgatgaaagacatcattaatgaagcagcacgcgaaggccatgatatgttgttcgctgataacccgtcggcggtgaagaaagagctgaccattctcatcgagaacacgattcgttccaaatggcacgaagttctggag

SEQ ID NO: 82 - protein, 346 aa, synthetic construct
  REGION 1..346: note = variant of RNA ligase 2 from Klebsiella phage KP179
MHHHHHHGGSGMFAYYSSLENHYNNKFIEKIRGAGFDMHTVEWVAREKIHGTNFSVIITPTEIVPAKRTGPILEGESFFGHEIIMKKYKDSFVKVQNMLNAMDLVSVQIFGEFAGGGIQKGVDYGDKDFYVFDILSDSGNEKVYWDDYRVESFCTTLGLKLAPLLGRGSFAELSQYPNDFKSIVNRYNELVDTTGLEHANKHVFGPQASSETGVAEGYVLKPVYPIFFNNGTRVAIKCKNSKFSEKAKSDKPIKAKVELTENDKRVLEIFSEYVTWNRVSNVLSHIGSVTAKDFGRVMGLTMKDIINEAAREGHDMLFADNPSAVKKELTILIENTIRSKWHEVLE

SEQ ID NO: 83 - DNA, 1038 bp, synthetic construct
  misc_feature 1..1038: note = variant of RNA ligase 2 from Klebsiella phage KP179
  source 1..1038: mol_type = other DNA
atgcatcaccatcaccatcacggtggcagcggtatgtttgcgtattattcaagtctggaaaaccattacaataataagttcattgagaagatccgtggtgcaggcttcgatatgcacaccgtggaatgggtagctcgcgagaagattcatggaacgaactttagcgttatcattactccgaccgaaatcgtcccagccaaacgcacagggccgatcttggaaggcgagtcgttctttggtcacgaaattatcatgaaaaaatataaagactccttcgtgaaggtgcagaacatgctgaatgccatggatcttgttagcgtgcaaatctttggcgaatttgcgggtggtggcattcagaaaggcgtcgattacggagacaaagatttctatgtgtttgacatcctgtctgatagcgggaacgagaaagtttactgggatgactatcgcgtcgaatcgttttgcacccaactcggtctgaaattagcgcctctgctgggacgtggtagtttcgctgaactgtcccagtacccaaacgatttcaaaagcattgtgaaccgttataatgaattggttgatacgacgggcctggaacatgccaataaacacgtctttggtccgcaagcgtcttctgaaactggcgtagcagaaggctacgttcttaaacccgtctatccgatcttctttaataatggtacgcgcgtggcgattaaatgcaagaactccaaattttcggagaaagccaagagcgacaaaccaattaaagcgaaagtggaactgacggagaacgataaacgtgtgctcgaaatctttagcgagtatgttacctggaatcgcgtcagtaacgtactgtcacatattggctcagtgaccgcaaaagattttgggcgtgttatgggtctgacgatgaaagacatcattaatgaagcagcacgcgaaggccatgatatgttgttcgctgataacccgtcggcggtgaagaaagagctgaccattctcatccagaacacgattcgttccaaatggcacgaagttctggag

SEQ ID NO: 84 - protein, 346 aa, synthetic construct
  REGION 1..346: note = variant of RNA ligase 2 from Klebsiella phage KP179
MHHHHHHGGSGMFAYYSSLENHYNNKFIEKIRGAGFDMHTVEWVAREKIHGTNFSVIITPTEIVPAKRTGPILEGESFFGHEIIMKKYKDSFVKVQNMLNAMDLVSVQIFGEFAGGGIQKGVDYGDKDFYVFDILSDSGNEKVYWDDYRVESFCTQLGLKLAPLLGRGSFAELSQYPNDFKSIVNRYNELVDTTGLEHANKHVFGPQASSETGVAEGYVLKPVYPIFFNNGTRVAIKCKNSKFSEKAKSDKPIKAKVELTENDKRVLEIFSEYVTWNRVSNVLSHIGSVTAKDFGRVMGLTMKDIINEAAREGHDMLFADNPSAVKKELTILIQNTIRSKWHEVLE

SEQ ID NO: 85 - DNA, 1038 bp, synthetic construct
  misc_feature 1..1038: note = variant of RNA ligase 2 from Klebsiella phage KP179
  source 1..1038: mol_type = other DNA
atgcatcaccatcaccatcacggtggcagcaacatgtttgcgtattattcaagtctggaaaaccattacaataataagttcattgagaagatccgtggtgcaggcttcgacatgcacaccgtggaatgggtagctcgcgagaagattcatggaacgaactttagcgttatcattactccgaccgaaatcgtcccagccaaacgcacagggccgatcttggaaggcgagtcgttctttggtcacgaaattatcatgaaaaaatataaagactccttcgtgaaggtgcagaacatgctgaatgccatggatcttgttagcgtgcaaatctttggcgaatttgcgggtggtggcattcagaaaggcgtcgattacggagacaaagatttctatgtgtttgacatcctgtctgatagcgggaacgagaaagtttactgggatgactatcgcgtcgaatcgttttgcaccacgctcggtctgaaattagcgcctctgctgggacgtggtagtttcgctgaactgtcccagtacccaaacgatttcaaaagcattgtgaaccgttataatgaattggttgatacgacgggcctggaacatgccaataaacacgtctttggtccgcaagcgtcttctgaaactggcgtagcagaaggctacgttcttaaacccgtctatccgatcttctttaataatggtacacgcgtggcgattaaatgcaagaactccaaattttcggagaaagccaagagcgacaaaccaattaaagcgaaagtggaactgacggagaacgataaacgtctgctcgaaatctttagcgagtatgttacctggaatcgcgtcagtaacgtactgtcacatattggctcagtgaccgcaaaagattttgggcgtgttatgggtctgacgatgaaagacatcattaatgaagcagcacgcgaaggccatgatctgttgttcgctgataacccgtcggcggtgaagaaagagctgacgattctcatccgcaacacgattcgttccaaatggcacgaagttctggag

SEQ ID NO: 86 - protein, 346 aa, synthetic construct
  REGION 1..346: note = variant of RNA ligase 2 from Klebsiella phage KP179
MHHHHHHGGSNMFAYYSSLENHYNNKFIEKIRGAGFDMHTVEWVAREKIHGTNFSVIITPTEIVPAKRTGPILEGESFFGHEIIMKKYKDSFVKVQNMLNAMDLVSVQIFGEFAGGGIQKGVDYGDKDFYVFDILSDSGNEKVYWDDYRVESFCTTLGLKLAPLLGRGSFAELSQYPNDFKSIVNRYNELVDTTGLEHANKHVFGPQASSETGVAEGYVLKPVYPIFFNNGTRVAIKCKNSKFSEKAKSDKPIKAKVELTENDKRLLEIFSEYVTWNRVSNVLSHIGSVTAKDFGRVMGLTMKDIINEAAREGHDLLFADNPSAVKKELTILIRNTIRSKWHEVLE

SEQ ID NO: 87 - DNA, 1038 bp, synthetic construct
  misc_feature 1..1038: note = variant of RNA ligase 2 from Klebsiella phage KP179
  source 1..1038: mol_type = other DNA
atgcatcaccatcaccatcacggtggcagcaacatgtttgcgtattattcaagtctggaaaaccattacaataataagttcattgagaagatccgtggtgcaggcttcgacatgcccaccgtggaatgggtagctcgcgagaagattcatggaacgaactttagcgttatcattactccgaccgaaatcgtcccagccaaacgcacagggccgatcttggaaggcgagtcgttctttggtcacgaaattatcatgaaaaaatataaagactccttcgtgaaggtgcagaacatgctgaatgccatggatcttgttagcgtgcaaatctttggcgaatttgcgggtggtggcattcagaaaggcgtcgattacggagacaaagatttctatgtgtttgacatcctgtctgatagcgggaacgagaaagtttactgggatgactatcgcgtcgaatcgttttgcacccaactcggtctgaaattagcgcctctgctgggacgtggtagtttcgctgaactgtcccagtacccaaacgatttcaaaagcattgtgaaccgttataatgaattggttgatacgacgggcctggaacatgccaataaacacgtctttggtccgcaagcgtcttctgaaactggcgtagcagaaggctacgttcttaaacccgtctatccgatcttctttaataatggtacacgcgtggcgattaaatgcaagaactccaaattttcggagaaagccacgagtgacaaaccaattaaagcgaaagtggaactgacggagaacgataaacgtgtgctcgaaatctttagcgagtatgttacctggaatcgcgtcagtaacgtactgtcacatattggctcagtgaccgcaaaagattttgggcgtgttatgggtctgacgatgaaagacatcattaatgaagcagcacgcgaaggccatgatctgttgttcgctgataacccgtcggcggtgaagaaagagctgaccattctcatccagaacacgattcgttccaaatggcacgaagttctggag

SEQ ID NO: 88 - protein, 346 aa, synthetic construct
  REGION 1..346: note = variant of RNA ligase 2 from Klebsiella phage KP179
MHHHHHHGGSNMFAYYSSLENHYNNKFIEKIRGAGFDMPTVEWVAREKIHGTNFSVIITPTEIVPAKRTGPILEGESFFGHEIIMKKYKDSFVKVQNMLNAMDLVSVQIFGEFAGGGIQKGVDYGDKDFYVFDILSDSGNEKVYWDDYRVESFCTQLGLKLAPLLGRGSFAELSQYPNDFKSIVNRYNELVDTTGLEHANKHVFGPQASSETGVAEGYVLKPVYPIFFNNGTRVAIKCKNSKFSEKATSDKPIKAKVELTENDKRVLEIFSEYVTWNRVSNVLSHIGSVTAKDFGRVMGLTMKDIINEAAREGHDLLFADNPSAVKKELTILIQNTIRSKWHEVLE

SEQ ID NO: 89 - DNA, 1038 bp, synthetic construct
  misc_feature 1..1038: note = variant of RNA ligase 2 from Klebsiella phage KP179
  source 1..1038: mol_type = other DNA
atgcatcaccatcaccatcacggtggcagcaacatgtttgcgtattattcaagtctggaaaaccattacaataataagttcattgagaagatccgtggtgcaggcttcgatatgcacaccgtggaatgggtagctcgcgagaagattcatggaacgaactttagcgttatcattactccgaccgaaatcgtcccagccaaacgcacagggccgatcttggaaggcgagtcgttctttggtcacgaaattatcatgaaaaaatataaagactccttcgtgaaggtgcagaacatgctgaatgccatggatcttgttagcgtgcaaatctttggcgaatttgcgggtggtggcattcagaaaggcgtcgattacggagacaaagatttctatgtgtttgacatcctgtctgatagcgggaacgagaaagtttactgggatgactatcgcgtcgaatcgttttgcaccacgctcggtctgaaattagcgcctctgctgggacgtggtagtttcgctgaactgtcccagtacccaaacgatttcaaaagcattgtgaaccgttataatgaattggttgatacgacgggcctggaacatgccaataaacacgtctttggtccgcaagcgtcttctgaaactggcgtagcagaaggctacgttcttaaacccgtctatccgatcttctttaataatggtacacgcgtggcgattaaatgcaagaactccaaattttcggagaaagccaagcgtgacaaaccaattaaagcgaaagtggaactgacggagaacgataaacgtgtgctcgaaatctttagcgagtatgttacctggaatcgcgtcagtaacgtactgtcacatattggctcagtgaccgcaaaagattttgggcgtgttatgggtctgacgatgaaagacatcattaatgaagcagcacgcgaaggccatgatatgttgttcgctgataacccgtcggcggtgaagaaagagctgaccattctcatccagaacacgattcgttccaaatggcacgaagttctggag

SEQ ID NO: 90 - protein, 346 aa, synthetic construct
  REGION 1..346: note = variant of RNA ligase 2 from Klebsiella phage KP179
MHHHHHHGGSNMFAYYSSLENHYNNKFIEKIRGAGFDMHTVEWVAREKIHGTNFSVIITPTEIVPAKRTGPILEGESFFGHEIIMKKYKDSFVKVQNMLNAMDLVSVQIFGEFAGGGIQKGVDYGDKDFYVFDILSDSGNEKVYWDDYRVESFCTTLGLKLAPLLGRGSFAELSQYPNDFKSIVNRYNELVDTTGLEHANKHVFGPQASSETGVAEGYVLKPVYPIFFNNGTRVAIKCKNSKFSEKAKRDKPIKAKVELTENDKRVLEIFSEYVTWNRVSNVLSHIGSVTAKDFGRVMGLTMKDIINEAAREGHDMLFADNPSAVKKELTILIQNTIRSKWHEVLE

SEQ ID NO: 91 - DNA, 1038 bp, synthetic construct
  misc_feature 1..1038: note = variant of RNA ligase 2 from Klebsiella phage KP179
  source 1..1038: mol_type = other DNA
atgcatcaccatcaccatcacggtggcagcggtatgtttgcgtattattcaagtctggaaaaccattacaataataagttcattgagaagatccgtggtgcaggcttcctgatgcacaccgtggaatgggtagctcgcgagaagattcatggaacgaactttagcgttatcattactccgaccgaaatcgtcccagccaaacgcacagggccgatcttggaaggcgagtcgttctttggtcacgaaattatcatgaaaaaatataaagactccttcgtgaaggtgcagaacatgctgaatgccatggatcttgttagcgtgcaaatctttggcgaatttgcgggtggtggcattcagaaaggcgtcgattacggagacaaagatttctatgtgtttgacatcctgtctgatagcgggaacgagaaagtttactgggatgactatcgcgtcgaatcgttttgcacccaactcggtctgaaattagcgcctctgctgggacgtggtagtttcgctgaactgtcccagtacccaaacgatttcaaaagcattgtgaaccgttataatgaattggttgatacgacgggcctggaacatgccaataaacacgtctttggtccgcaagcgtcttctgaaactggcgtagcagaaggctacgttcttaaacccgtctatccgatcttctttaataatggtacgcgcgtggcgattaaatgcaagaactccaaattttcggagaaagccaagagcgacaaaccaattaaagcgaaagtggaactgacggagaacgataaacgtgtgctcgaaatctttagcgagtatgttacctggaatcgcgtcagtaacgtactgtcacatattggctcagtgaccgcaaaagattttgggcgtgttatgggtctgacgatgaaagacatcattaatgaagcagcacgcgaaggccatgatatgttgttcgctgataacccgtcggcggtgaagaaagagctgaccattctcatccagaacacgattcgttccaaatggcacgaagttctggag

SEQ ID NO: 92 - protein, 346 aa, synthetic construct
  REGION 1..346: note = variant of RNA ligase 2 from Klebsiella phage KP179
MHHHHHHGGSGMFAYYSSLENHYNNKFIEKIRGAGFLMHTVEWVAREKIHGTNFSVIITPTEIVPAKRTGPILEGESFFGHEIIMKKYKDSFVKVQNMLNAMDLVSVQIFGEFAGGGIQKGVDYGDKDFYVFDILSDSGNEKVYWDDYRVESFCTQLGLKLAPLLGRGSFAELSQYPNDFKSIVNRYNELVDTTGLEHANKHVFGPQASSETGVAEGYVLKPVYPIFFNNGTRVAIKCKNSKFSEKAKSDKPIKAKVELTENDKRVLEIFSEYVTWNRVSNVLSHIGSVTAKDFGRVMGLTMKDIINEAAREGHDMLFADNPSAVKKELTILIQNTIRSKWHEVLE

SEQ ID NO: 93 - DNA, 1038 bp, synthetic construct
  misc_feature 1..1038: note = variant of RNA ligase 2 from Klebsiella phage KP179
  source 1..1038: mol_type = other DNA
atgcatcaccatcaccatcacggtggcagcggtatgtttgcgtattattcaagtctggaaaaccattacaataataagttcattgagaagatccgtggtgcaggcttcgatatgcacaccgtggaatgggtagctcgcgagaagattcatggaacgaactttagcgttatcattactccgaccgaaatcgtcccagccaaacgcacagggccgatcttggaaggcgagtcgttctttggtcacgaaattatcatgaaaaaatataaagactccttcgtgaaggtgcagaacatgctgaatgccatggatcttgttagcatgcaaatctttggcgaatttgcgggtggtggcattcagaaaggcgtcgattacggagacaaagatttctatgtgtttgacatcctgtctgatagcgggaacgagaaagtttactgggatgactatcgcgtcgaatcgttttgcaccacgctcggtctgaaattagcgcctctgctgggacgtggtagtttcgctgaactgtcccagtacccaaacgatttcaaaagcattgtgaaccgttataatgaattggttgatacgacgggcctggaacatgccaataaacacgtctttggtccgcaagcgtcttctgaaactggcgtagcagaaggctacgttcttaaacccgtctatccgatcttctttaataatggtacacgcgtggcgattaaatgcaagaactccaaattttcggagaaagccaagagcgaccggccaattaaagcgaaagtggaactgacggagaacgataaacgtgtgctcgaaatctttagcgagtatgttacctggaatcgcgtcagtaacgtactgtcacatattggctcagtgaccgcaaaagattttgggcgtgttatgggtctgacgatgaaagacatcattaatgaagcagcacgcgaaggccatgatatgttgttcgctgataacccgtcggcggtgaagaaagagctgaccattctcatccagaacacgattcgttccaaatggcacgaagttctggag

SEQ ID NO: 94 - protein, 346 aa, synthetic construct
  REGION 1..346: note = variant of RNA ligase 2 from Klebsiella phage KP179
MHHHHHHGGSGMFAYYSSLENHYNNKFIEKIRGAGFDMHTVEWVAREKIHGTNFSVIITPTEIVPAKRTGPILEGESFFGHEIIMKKYKDSFVKVQNMLNAMDLVSMQIFGEFAGGGIQKGVDYGDKDFYVFDILSDSGNEKVYWDDYRVESFCTTLGLKLAPLLGRGSFAELSQYPNDFKSIVNRYNELVDTTGLEHANKHVFGPQASSETGVAEGYVLKPVYPIFFNNGTRVAIKCKNSKFSEKAKSDRPIKAKVELTENDKRVLEIFSEYVTWNRVSNVLSHIGSVTAKDFGRVMGLTMKDIINEAAREGHDMLFADNPSAVKKELTILIQNTIRSKWHEVLE

SEQ ID NO: 95 - DNA, 1038 bp, synthetic construct
  misc_feature 1..1038: note = variant of RNA ligase 2 from Klebsiella phage KP179
  source 1..1038: mol_type = other DNA
atgcatcaccatcaccatcacggtggcagcggtatgtttgcgtattattcaagtctggaaaaccattacaataataagttcattgagaagatccgtggtgcaggcttcgatatgcacaccgtggaatgggtagctcgcgagaagattcatggaacgaactttagcgttatcattactccgaccgaaatcgtcccagccaaacgcacagggccgatcttggaaggcgagtcgttctttggtcacgaaattatcatgaaaaaatataaagactccttcgtgaaggtgcagaacatgctgaatgccatggatcttgttagcgtgcaaatctttggcgaatttgcgggtggtggcattcagaaaggcgtcgattacggagacaaagatttctatgtgtttgacatcctgtctgatagcgggaacgagaaagtttactgggatgactatcgcgtcgaatcgttttgcacccaactcggtctgaaattagcgcctctgctgggacgtggtagtttcgctgaactgtcccagtacccaaacgatttcaaaagcattgtgaaccgttataatgaattggttgatacgacgggcctggaacatgccaataaacacgtctttggtccgcaagcgtcttctgaaactggcgtagcagaaggctacgttcttaaacccgtctatccgatcttctttaataatggtacacgcgtggcgattaaatgcaagaactccaaattttcggagaaagccaagcgtgacaaaccaattaaagcgaaagtggaactgacggagaacgataaacgtgtgctcgaaatctttagcgagtatgttacctggaatcgcgtcagtaacgtactgtcacatattggctcagtgaccgcaaaagattttgggcgtgttatgggtctgacgatgaaagacatcattaatgaagcagcacgcgaaggccatgatctgttgttcgctgataacccgtcggcggtgaagaaagagctgaccattctcatccagaacacgattcgttccaaatggcacgaagttctggag

SEQ ID NO: 96 - protein, 346 aa, synthetic construct
  REGION 1..346: note = variant of RNA ligase 2 from Klebsiella phage KP179
MHHHHHHGGSGMFAYYSSLENHYNNKFIEKIRGAGFDMHTVEWVAREKIHGTNFSVIITPTEIVPAKRTGPILEGESFFGHEIIMKKYKDSFVKVQNMLNAMDLVSVQIFGEFAGGGIQKGVDYGDKDFYVFDILSDSGNEKVYWDDYRVESFCTQLGLKLAPLLGRGSFAELSQYPNDFKSIVNRYNELVDTTGLEHANKHVFGPQASSETGVAEGYVLKPVYPIFFNNGTRVAIKCKNSKFSEKAKRDKPIKAKVELTENDKRVLEIFSEYVTWNRVSNVLSHIGSVTAKDFGRVMGLTMKDIINEAAREGHDLLFADNPSAVKKELTILIQNTIRSKWHEVLE

SEQ ID NO: 97 - DNA, 1038 bp, synthetic construct
  misc_feature 1..1038: note = variant of RNA ligase 2 from Klebsiella phage KP179
  source 1..1038: mol_type = other DNA
atgcatcaccatcaccatcacggtggcagcggtatgtttgcgtattattcaagtctggaaaaccattacaataataagttcattgagaagatccgtggtgcaggcttcctgatgcacaccgtggaatgggtagctcgcgagaagattcatggaacgaactttagcgttatcattactccgaccgaaatcgtcccagccaaacgcacagggccgatcttggaaggcgagtcgttctttggtcacgaaattatcatgaaaaaatataaagactccttcgtgaaggtgcagaacatgctgaatgccatggatcttgttagcgtgcaaatctttggcgaatttgcgggtggtggcattcagaaaggcgtcgattacggagacaaagatttctatgtgtttgacatcctgtctgatagcgggaacgagaaagtttactgggatgactatcgcgtcgaatcgttttgcacccaactcggtctgaaattagcgcctctgctgggacgtggtagtttcgctgaactgtcccagtacccaaacgatttcaaaagcattgtgaaccgttataatgaattggttgatacgacgggcctggaacatgccaataaacacgtctttggtccgcaagcgtcttctgaaactggcgtagcagaaggctacgttcttaaacccgtctatccgatcttctttaataatggtacacgcgtggcgattaaatgcaagaactccaaattttcggagaaagccaagagcgacaaaccaattaaagcgaaagtggaactgacggagaacgataaacgtgtgctcgaaatctttagcgagtatgttacctggaatcgcgtcagtaacgtactgtcacatattggctcagtgaccgcaaaagattttgggcgtgttatgggtctgacgatgaaagacatcattaatgaagcagcacgcgaaggccatgatctgttgttcgctgataacccgtcggcggtgaagaaagagctgaccattctcatccagaacacgattcgttccaaatggcacgaagttctggag

SEQ ID NO: 98 - protein, 346 aa, synthetic construct
  REGION 1..346: note = variant of RNA ligase 2 from Klebsiella phage KP179
MHHHHHHGGSGMFAYYSSLENHYNNKFIEKIRGAGFLMHTVEWVAREKIHGTNFSVIITPTEIVPAKRTGPILEGESFFGHEIIMKKYKDSFVKVQNMLNAMDLVSVQIFGEFAGGGIQKGVDYGDKDFYVFDILSDSGNEKVYWDDYRVESFCTQLGLKLAPLLGRGSFAELSQYPNDFKSIVNRYNELVDTTGLEHANKHVFGPQASSETGVAEGYVLKPVYPIFFNNGTRVAIKCKNSKFSEKAKSDKPIKAKVELTENDKRVLEIFSEYVTWNRVSNVLSHIGSVTAKDFGRVMGLTMKDIINEAAREGHDLLFADNPSAVKKELTILIQNTIRSKWHEVLE

SEQ ID NO: 99 - DNA, 1038 bp, synthetic construct
  misc_feature 1..1038: note = variant of RNA ligase 2 from Klebsiella phage KP179
  source 1..1038: mol_type = other DNA
atgcatcaccatcaccatcacggtggcagcaacatgtttgcgtattattcaagtctggaaaaccattacaataataagttcattgagaagatccgtggtgcaggcttcctgatgcacaccgtggaatgggtagctcgcgagaagattcatggaacgaactttagcgttatcattactccgaccgaaatcgtcccagccaaacgcacagggccgatcttggaaggcgagtcgttctttggtcacgaaattatcatgaaaaaatataaagactccttcgtgaaggtgcagaacatgctgaatgccatggatcttgttagcgtgcaaatctttggcgaatttgcgggtggtggcattcagaaaggcgtcgattacggagacaaagatttctatgtgtttgacatcctgtctgatagcgggaacgagaaagtttactgggatgactatcgcgtcgaatcgttttgcacccaactcggtctgaaattagcgcctctgctgggacgtggtagtttcgctgaactgtcccagtacccaaacgatttcaaaagcattgtgaaccgttataatgaattggttgatacgacgggcctggaacatgccaataaacacgtctttggtccgcaagcgtcttctgaaactggcgtagcagaaggctacgttcttaaacccgtctatccgatcttctttaataatggtacgcgcgtggcgattaaatgcaagaactccaaattttcggagaaagccaagctggacaaaccaattaaagcgaaagtggaactgacggagaacgataaacgtgtgctcgaaatctttagcgagtatgttacctggaatcgcgtcagtaacgtactgtcacatattggctcagtgaccgcaaaagattttgggcgtgttatgggtctgacgatgaaagacatcattaatgaagcagcacgcgaaggccatgatatgttgttcgctgataacccgtcggcggtgaagaaagagctgaccattctcatccagaacacgattcgttccaaatggcacgaagttctggag

SEQ ID NO: 100 - protein, 346 aa, synthetic construct
  REGION 1..346: note = variant of RNA ligase 2 from Klebsiella phage KP179
MHHHHHHGGSNMFAYYSSLENHYNNKFIEKIRGAGFLMHTVEWVAREKIHGTNFSVIITPTEIVPAKRTGPILEGESFFGHEIIMKKYKDSFVKVQNMLNAMDLVSVQIFGEFAGGGIQKGVDYGDKDFYVFDILSDSGNEKVYWDDYRVESFCTQLGLKLAPLLGRGSFAELSQYPNDFKSIVNRYNELVDTTGLEHANKHVFGPQASSETGVAEGYVLKPVYPIFFNNGTRVAIKCKNSKFSEKAKLDKPIKAKVELTENDKRVLEIFSEYVTWNRVSNVLSHIGSVTAKDFGRVMGLTMKDIINEAAREGHDMLFADNPSAVKKELTILIQNTIRSKWHEVLE

SEQ ID NO: 101 - DNA, 1038 bp, synthetic construct
  misc_feature 1..1038: note = variant of RNA ligase 2 from Klebsiella phage KP179
  source 1..1038: mol_type = other DNA
atgcatcaccatcaccatcacggtggcagcaacatgtttgcgtattattcaagtctggaaaaccattacaataataagttcattgagaagatccgtggtgcaggcttcctgatgcacaccgtggaatgggtagctcgcgagaagattcatggaacgaactttagcgttatcattactccgaccgaaatcgtcccagccaaacgcacagggccgatcttggaaggcgagtcgttctttggtcacgaaattatcatgaaaaaatataaagactccttcgtgaaggtgcagaacatgctgaatgccatggatcttgttagcgtgcaaatctttggcgaatttgcgggtggtggcattcagaaaggcgtcgattacggagacaaagatttctatgtgtttgacatcctgtctgatagcgggaacgagaaagtttactgggatgactatcgcgtcgaatcgttttgcaccacgctcggtctgaaattagcgcctctgctgggacgtggtagtttcgctgaactgtcccagtacccaaacgatttcaaaagcattgtgaaccgttataatgaattggttgatacgacgggcctggaacatgccaataaacacgtctttggtccgcaagcgtcttctgaaactggcgtagcagaaggctacgttcttaaacccgtctatccgatcttctttaataatggtacgcgcgtggcgattaaatgcaagaactccaaattttcggagaaagccaagagcgacaaaccaattaaagcgaaagtggaactgacggagaacgataaacgtgtgctcgaaatctttagcgagtatgttacctggaatcgcgtcagtaacgtactgtcacatattggctcagtgaccgcaaaagattttgggcgtgttatgggtctgacgatgaaagacatcattaatgaagcagcacgcgaaggccatgatatgttgttcgctgataacccgtcggcggtgaagaaagagctgacgattctcatccgcaacacgattcgttccaaatggcacgaagttctggag

SEQ ID NO: 102 - protein, 346 aa, synthetic construct
  REGION 1..346: note = variant of RNA ligase 2 from Klebsiella phage KP179
MHHHHHHGGSNMFAYYSSLENHYNNKFIEKIRGAGFLMHTVEWVAREKIHGTNFSVIITPTEIVPAKRTGPILEGESFFGHEIIMKKYKDSFVKVQNMLNAMDLVSVQIFGEFAGGGIQKGVDYGDKDFYVFDILSDSGNEKVYWDDYRVESFCTTLGLKLAPLLGRGSFAELSQYPNDFKSIVNRYNELVDTTGLEHANKHVFGPQASSETGVAEGYVLKPVYPIFFNNGTRVAIKCKNSKFSEKAKSDKPIKAKVELTENDKRVLEIFSEYVTWNRVSNVLSHIGSVTAKDFGRVMGLTMKDIINEAAREGHDMLFADNPSAVKKELTILIRNTIRSKWHEVLE

SEQ ID NO: 103 - DNA, 1038 bp, synthetic construct
  misc_feature 1..1038: note = variant of RNA ligase 2 from Klebsiella phage KP179
  source 1..1038: mol_type = other DNA
atgcatcaccatcaccatcacggtggcagcggtatgtttgcgtattattcaagtctggaaaaccattacaataataagttcattgagaagatccgtggtgcaggcttcgatatgcacaccgtggaatgggtagctcgcgagaagattcatggaacgaactttagcgttatcattactccgaccgaaatcgtcccagccaaacgcacagggccgatcttggaaggcgagtcgttctttggtcacgaaattatcatgaaaaaatataaagactccttcgtgaaggtgcagaacatgctgaatgccatggatcttgttagcgtgcaaatctttggcgaatttgcgggtggtggcattcagaaaggcgtcgattacggagacaaagatttctatgtgtttgacatcctgtctgatagcgggaacgagaaagtttactgggatgactatcgcgtcgaatcgttttgcaccacgctcggtctgaaattagcgcctctgctgggacgtggtagtttcgctgaactgtcccagtacccaaacgatttcaaaagcattgtgaaccgttataatgaattggttgatacggcgggcctggaacatgccaataaacacgtctttggtccgcaagcgtcttctgaaactggcgtagcagaaggctacgttcttaaacccgtctatccgatcttctttaataatggtacacgcgtggcgattaaatgcaagaactccaaattttcggagaaagccaagagcgacaaaccaattaaagcgaaagtggaactgacggagaacgataaacgtgtgctcgaaatctttagcgagtatgttacctggaatcgcgtcagtaacgtactgtcacatattggctcagtgaccgcaaaagattttgggcgtgttatgggtctgacgatgaaagacatcattaatgaagcagcacgcgaaggccatgatatgttgttcgctgataacccgtcggcggtgaagaaagagctgaccattctcatccagaacacgattcgttccaaatggcacgaagttctggag

SEQ ID NO: 104 - protein, 346 aa, synthetic construct
  REGION 1..346: note = variant of RNA ligase 2 from Klebsiella phage KP179
MHHHHHHGGSGMFAYYSSLENHYNNKFIEKIRGAGFDMHTVEWVAREKIHGTNFSVIITPTEIVPAKRTGPILEGESFFGHEIIMKKYKDSFVKVQNMLNAMDLVSVQIFGEFAGGGIQKGVDYGDKDFYVFDILSDSGNEKVYWDDYRVESFCTTLGLKLAPLLGRGSFAELSQYPNDFKSIVNRYNELVDTAGLEHANKHVFGPQASSETGVAEGYVLKPVYPIFFNNGTRVAIKCKNSKFSEKAKSDKPIKAKVELTENDKRVLEIFSEYVTWNRVSNVLSHIGSVTAKDFGRVMGLTMKDIINEAAREGHDMLFADNPSAVKKELTILIQNTIRSKWHEVLE

SEQ ID NO: 105 - DNA, 1038 bp, synthetic construct
  misc_feature 1..1038: note = variant of RNA ligase 2 from Klebsiella phage KP179
  source 1..1038: mol_type = other DNA
atgcatcaccatcaccatcacggtggcagcggtatgtttgcgtattattcaagtctggaaaaccattacaataataagttcattgagaagatccgtggtgcaggcttcctgatgcacaccgtggaatgggtagctcgcgagaagattcatggaacgaactttagcgttatcattactccgaccgaaatcgtcccagccaaacgcacagggccgatcttggaaggcgagtcgttctttggtcacgaaattatcatgaaaaaatataaagactccttcgtgaaggtgcagaacatgctgaatgccatggatcttgttagcgtgcaaatctttggcgaatttgcgggtggtggcattcagaaaggcgtcgattacggagacaaagatttctatgtgtttgacatcctgtctgatagcgggaacgagaaagtttactgggatgactatcgcgtcgaatcgttttgcaccacgctcggtctgaaattagcgcctctgctgggacgtggtagtttcgctgaactgtcccagtacccaaacgatttcaaaagcattgtgaaccgttataatgaattggttgatacgacgggcctggaacatgccaataaacacgtctttggtccgcaagcgtcttctgaaactggcgtagcagaaggctacgttcttaaacccgtctatccgatcttctttaataatggtacacgcgtggcgattaaatgcaagaactccaaattttcggagaaagccaagagcgacaaaccaattaaagcgaaagtggaactgacggagaacgataaacgtgtgctcgaaatctttagcgagtatgttacctggaatcgcgtcagtaacgtactgtcacatattggctcagtgaccgcaaaagattttgggcgtgttatgggtctgacgatgaaagacatcattaatgaagcagcacgcgaaggccatgatctgttgttcgctgataacccgtcggcggtgaagaaagagctgaccattctcatccagaacacgattcgttccaaatggcacgaagttctggag

SEQ ID NO: 106 - protein, 346 aa, synthetic construct
  REGION 1..346: note = variant of RNA ligase 2 from Klebsiella phage KP179
MHHHHHHGGSGMFAYYSSLENHYNNKFIEKIRGAGFLMHTVEWVAREKIHGTNFSVIITPTEIVPAKRTGPILEGESFFGHEIIMKKYKDSFVKVQNMLNAMDLVSVQIFGEFAGGGIQKGVDYGDKDFYVFDILSDSGNEKVYWDDYRVESFCTTLGLKLAPLLGRGSFAELSQYPNDFKSIVNRYNELVDTTGLEHANKHVFGPQASSETGVAEGYVLKPVYPIFFNNGTRVAIKCKNSKFSEKAKSDKPIKAKVELTENDKRVLEIFSEYVTWNRVSNVLSHIGSVTAKDFGRVMGLTMKDIINEAAREGHDLLFADNPSAVKKELTILIQNTIRSKWHEVLE

SEQ ID NO: 107 - DNA, 1038 bp, synthetic construct
  misc_feature 1..1038: note = variant of RNA ligase 2 from Klebsiella phage KP179
  source 1..1038: mol_type = other DNA
atgcatcaccatcaccatcacggtggcagcggtatgtttgcgtattattcaagtctggaaaaccattacaataataagttcattgagaagatccgtggtgcaggcttcgatatgcacaccgtggaatgggtagctcgcgagaagattcatggaacgaactttagcgttatcattactccgaccgaaatcgtcccagccaaacgcacagggccgatcttggaaggcgagtcgttctttggtcacgaaattatcatgaaaaaatataaagactccttcgtgaaggtgcagaacatgctgaatgccatggatcttgttagcgtgcaaatctttggcgaatttgcgggtggtggcattcagaaaggcgtcgattacggagacaaagatttctatgtgtttgacatcctgtctgatagcgggaacgagaaagtttactgggatgactatcgcgtcgaatcgttttgcaccacgctcggtctgaaattagcgcctctgctgggacgtggtagtttcgctgaactgtccgcatacccaaacgatttcaaaagcattgtgaaccgttataatgaattggttgatacgacgggcctggaacatgccaataaacacgtctttggtccgcaagcgtcttctgaaactggcgtagcagaaggctacgttcttaaacccgtctatccgatcttctttaataatggtacacgcgtggcgattaaatgcaagaactccaaattttcggagaaagccaagagcgacaaaccaattaaagcgaaagtggaactgacggagaacgataaacgtgtgctcgaaatctttagcgagtatgttacctggaatcgcgtcagtaacgtactgtcacatattggctcagtgaccgcaaaagattttgggcgtgttatgggtctgacgatgaaagacatcattaatgaagcagcacgcgaaggccatgatatgttgttcgctgataacccgtcggcggtgaagaaagagctgaccattctcatccagaacacgattcgttccaaatggcacgaagttctggag

SEQ ID NO: 108 - protein, 346 aa, synthetic construct
  REGION 1..346: note = variant of RNA ligase 2 from Klebsiella phage KP179
MHHHHHHGGSGMFAYYSSLENHYNNKFIEKIRGAGFDMHTVEWVAREKIHGTNFSVIITPTEIVPAKRTGPILEGESFFGHEIIMKKYKDSFVKVQNMLNAMDLVSVQIFGEFAGGGIQKGVDYGDKDFYVFDILSDSGNEKVYWDDYRVESFCTTLGLKLAPLLGRGSFAELSAYPNDFKSIVNRYNELVDTTGLEHANKHVFGPQASSETGVAEGYVLKPVYPIFFNNGTRVAIKCKNSKFSEKAKSDKPIKAKVELTENDKRVLEIFSEYVTWNRVSNVLSHIGSVTAKDFGRVMGLTMKDIINEAAREGHDMLFADNPSAVKKELTILIQNTIRSKWHEVLE

SEQ ID NO: 109 - DNA, 1038 bp, synthetic construct
  misc_feature 1..1038: note = variant of RNA ligase 2 from Klebsiella phage KP179
  source 1..1038: mol_type = other DNA
atgcatcaccatcaccatcacggtggcagcaacatgtttgcgtattattcaagtctggaaaaccattacaataataagttcattgagaagatccgtggtgcaggcttcgacatgcacaccgtggaatgggtagctcgcgagaagattcatggaacgaactttagcgttatcattactccgaccgaaatcgtcccagccaaacgcacagggccgatcttggaaggcgagtcgttctttggtcacgaaattatcatgaaaaaatataaagactccttcgtgaaggtgcagaacatgctgaatgccatggatcttgttagcgtgcaaatctttggcgaatttgcgggtggtggcattcagaaaggcgtcgattacggagacaaagatttctatgtgtttgacatcctgtctgatagcgggaacgagaaagtttactgggatgactatcgcgtcgaatcgttttgcacccaactcggtctgaaattagcgcctctgctgggacgtggtagtttcgctgaactgtcccagtacccaaacgatttcaaaagcattgtgaaccgttataatgaattggttgatacgacgggcctggaacatgccaataaacacgtctttggtccgcaagcgtcttctgaaactggcgtagcagaaggctacgttcttaaacccgtctatccgatcttctttaataatggtacgcgcgtggcgattaaatgcaagaactccaaattttcggagaaagccaagctggacaaaccaattaaagcgaaagtggaactgacggagaacgataaacgtgtgctcgaaatctttagcgagtatgttacctggaatcgcgtcagtaacgtactgtcacatattggctcagtgaccgcaaaagattttgggcgtgttatgggtctgacgatgaaagacatcattaatgaagcagcacgcgaaggccatgatctgttgttcgctgataacccgtcggcggtgaagaaagagctgaccattctcatccagaacacgattcgttccaaatggcacgaagttctggag

SEQ ID NO: 110 - protein, 346 aa, synthetic construct
  REGION 1..346: note = variant of RNA ligase 2 from Klebsiella phage KP179
MHHHHHHGGSNMFAYYSSLENHYNNKFIEKIRGAGFDMHTVEWVAREKIHGTNFSVIITPTEIVPAKRTGPILEGESFFGHEIIMKKYKDSFVKVQNMLNAMDLVSVQIFGEFAGGGIQKGVDYGDKDFYVFDILSDSGNEKVYWDDYRVESFCTQLGLKLAPLLGRGSFAELSQYPNDFKSIVNRYNELVDTTGLEHANKHVFGPQASSETGVAEGYVLKPVYPIFFNNGTRVAIKCKNSKFSEKAKLDKPIKAKVELTENDKRVLEIFSEYVTWNRVSNVLSHIGSVTAKDFGRVMGLTMKDIINEAAREGHDLLFADNPSAVKKELTILIQNTIRSKWHEVLE

SEQ ID NO: 111 - DNA, 1038 bp, synthetic construct
  misc_feature 1..1038: note = variant of RNA ligase 2 from Klebsiella phage KP179
  source 1..1038: mol_type = other DNA
atgcatcaccatcaccatcacggtggcagcaacatgtttgcgtattattcaagtctggaaaaccattacaataataagttcattgagaagatccgtggtgcaggcttcctgatgcacaccgtggaatgggtagctcgcgagaagattcatggaacgaactttagcgttatcattactccgaccgaaatcgtcccagccaaacgcacagggccgatcttggaaggcgagtcgttctttggtcacgaaattatcatgaaaaaatataaagactccttcgtgaaggtgcagaacatgctgaatgccatggatcttgttagcgtgcaaatctttggcgaatttgcgggtggtggcattcagaaaggcgtcgattacggagacaaagatttctatgtgtttgacatcctgtctgatagcgggaacgagaaagtttactgggatgactatcgcgtcgaatcgttttgcaccacgctcggtctgaaattagcgcctctgctgggacgtggtagtttcgctgaactgtcccagtacccaaacgatttcaaaagcattgtgaaccgttataatgaattggttgatacgacgggcctggaacatgccaataaacacgtctttggtccgcaagcgtcttctgaaactggcgtagcagaaggctacgttcttaaacccgtctatccgatcttctttaataatggtacacgcgtggcgattaaatgcaagaactccaaattttcggagaaagccaagagcgacaaaccaattaaagcgaaagtggaactgacggagaacgataaacgtgtgctcgaaatctttagcgagtatgttacctggaatcgcgtcagtaacgtactgtcacatattggctcagtgaccgcaaaagattttgggcgtgttatgggtctgacgatgaaagacatcattaatgaagcagcacgcgaaggccatgatatgttgttcgctgataacccgtcggcggtgaagaaagagctgaccattctcatccagaacacgattcgttccaaatggcacgaagttctggag

SEQ ID NO: 112 - protein, 346 aa, synthetic construct
  REGION 1..346: note = variant of RNA ligase 2 from Klebsiella phage KP179
MHHHHHHGGSNMFAYYSSLENHYNNKFIEKIRGAGFLMHTVEWVAREKIHGTNFSVIITPTEIVPAKRTGPILEGESFFGHEIIMKKYKDSFVKVQNMLNAMDLVSVQIFGEFAGGGIQKGVDYGDKDFYVFDILSDSGNEKVYWDDYRVESFCTTLGLKLAPLLGRGSFAELSQYPNDFKSIVNRYNELVDTTGLEHANKHVFGPQASSETGVAEGYVLKPVYPIFFNNGTRVAIKCKNSKFSEKAKSDKPIKAKVELTENDKRVLEIFSEYVTWNRVSNVLSHIGSVTAKDFGRVMGLTMKDIINEAAREGHDMLFADNPSAVKKELTILIQNTIRSKWHEVLE

SEQ ID NO: 113 - DNA, 1038 bp, synthetic construct
  misc_feature 1..1038: note = variant of RNA ligase 2 from Klebsiella phage KP179
  source 1..1038: mol_type = other DNA
atgcatcaccatcaccatcacggtggcagcggtatgtttgcgtattattcaagtctggaaaaccattacaataataagttcattgagaagatccgtggtgcaggcttcgatatgcacaccgtggaatgggtagctcgcgagaagattcatggaacgaactttagcgttatcattactccgaccgaaatcgtcccagccaaacgcacagggccgatcttggaaggcgagtcgttctttggtcacgaaattatcatgaaaaaatataaagactccttcgtgaaggtgcagaacatgctgaatgccatggatcttgttagcgtgcaaatctttggcgaatttgcgggtggtggcattcagaaaggcgtcgattacggagacaaagatttctatgtgtttgacatcctgtctgatagcgggaacgagaaagtttactgggatgactatcgcgtcgaatcgttttgcaccacgctcggtctgaaattagcgcctctgctgggacgtggtagtttcgctgaactgtcccagtacccaaacgatttcaaaagcattgtgaaccgttataatgaattggttgatacgacgggcctggaacatgccaataaacacgtctttggtccgcaagcgtcttctgaaactggcgtagcagaaggctacgttcttaaacccgtctatccgatcttctttaataatggtacacgcgtggcgattaaatgcaagaactccaaattttcggagaaagccaagagcgacaaacagattaaagcgaaagtggaactgacggagaacgataaacgtgtgctcgaaatctttagcgagtatgttacctggaatcgcgtcagtaacgtactgtcacatattggctcagtgaccgcaaaagattttgggcgtgttatgggtctgacgatgaaagacatcattaatgaagcagcacgcgaaggccatgatatgttgttcgctgataacccgtcggcggtgaagaaagagctgaccattctcatccagaacacgattcgttccaaatggcacgaagttctggag

SEQ ID NO: 114 - protein, 346 aa, synthetic construct
  REGION 1..346: note = variant of RNA ligase 2 from Klebsiella phage KP179
MHHHHHHGGSGMFAYYSSLENHYNNKFIEKIRGAGFDMHTVEWVAREKIHGTNFSVIITPTEIVPAKRTGPILEGESFFGHEIIMKKYKDSFVKVQNMLNAMDLVSVQIFGEFAGGGIQKGVDYGDKDFYVFDILSDSGNEKVYWDDYRVESFCTTLGLKLAPLLGRGSFAELSQYPNDFKSIVNRYNELVDTTGLEHANKHVFGPQASSETGVAEGYVLKPVYPIFFNNGTRVAIKCKNSKFSEKAKSDKQIKAKVELTENDKRVLEIFSEYVTWNRVSNVLSHIGSVTAKDFGRVMGLTMKDIINEAAREGHDMLFADNPSAVKKELTILIQNTIRSKWHEVLE

SEQ ID NO: 115 - DNA, 1038 bp, synthetic construct
  misc_feature 1..1038: note = variant of RNA ligase 2 from Klebsiella phage KP179
  source 1..1038: mol_type = other DNA
atgcatcaccatcaccatcacggtggcagcggtatgtttgcgtattattcaagtctggaaaaccattacaataataagttcattgagaagatccgtggtgcaggcttcctgatgcacaccgtggaatgggtagctcgcgagaagattcatggaacgaactttagcgttatcattactccgaccgaaatcgtcccagccaaacgcacagggccgatcttggaaggcgagtcgttctttggtcacgaaattatcatgaaaaaatataaagactccttcgtgaaggtgcagaacatgctgaatgccatggatcttgttagcgtgcaaatctttggcgaatttgcgggtggtggcattcagaaaggcgtcgattacggagacaaagatttctatgtgtttgacatcctgtctgatagcgggaacgagaaagtttactgggatgactatcgcgtcgaatcgttttgcaccacgctcggtctgaaattagcgcctctgctgggacgtggtagtttcgctgaactgtcccagtacccaaacgatttcaaaagcattgtgaaccgttataatgaattggttgatacgacgggcctggaacatgccaataaacacgtctttggtccgcaagcgtcttctgaaactggcgtagcagaaggctacgttcttaaacccgtctatccgatcttctttaataatggtacgcgcgtggcgattaaatgcaagaactccaaattttcggagaaagccaagagtgacaaaccaattaaagcgaaagtggaactgacggagaacgataaacgtgtgctcgaaatctttagcgagtatgttacctggaatcgcgtcagtaacgtactgtcacatattggctcagtgaccgcaaaagattttgggcgtgttatgggtctgacgatgaaagacatcattaatgaagcagcacgcgaaggccatgatatgttgttcgctgataacccgtcggcggtgaagaaagagctgaccattctcatccagaacacgattcgttccaaatggcacgaagttctggag

SEQ ID NO: 116 - protein, 346 aa, synthetic construct
  REGION 1..346: note = variant of RNA ligase 2 from Klebsiella phage KP179
MHHHHHHGGSGMFAYYSSLENHYNNKFIEKIRGAGFLMHTVEWVAREKIHGTNFSVIITPTEIVPAKRTGPILEGESFFGHEIIMKKYKDSFVKVQNMLNAMDLVSVQIFGEFAGGGIQKGVDYGDKDFYVFDILSDSGNEKVYWDDYRVESFCTTLGLKLAPLLGRGSFAELSQYPNDFKSIVNRYNELVDTTGLEHANKHVFGPQASSETGVAEGYVLKPVYPIFFNNGTRVAIKCKNSKFSEKAKSDKPIKAKVELTENDKRVLEIFSEYVTWNRVSNVLSHIGSVTAKDFGRVMGLTMKDIINEAAREGHDMLFADNPSAVKKELTILIQNTIRSKWHEVLE

SEQ ID NO: 117 - DNA, 1038 bp, synthetic construct
  misc_feature 1..1038: note = variant of RNA ligase 2 from Klebsiella phage KP179
  source 1..1038: mol_type = other DNA
atgcatcaccatcaccatcacggtggcagcggtttttttgcgtattattcaagtctggaaaaccattacaataataagttcattgagaagatccgtggtgcaggcttcgatatgcacaccgtggaatgggtagctcgcgagaagattcatggaacgaactttagcgttatcattactccgaccgaaatcgtcccagccaaacgcacagggccgatcttggaaggcgagtcgttctttggtcacgaaattatcatgaaaaaatataaagactccttcgtgaaggtgcagaacatgctgaatgccatggatcttgttagcgtgcaaatctttggcgaatttgcgggtggtggcattcagaaaggcgtcgattacggagacaaagatttctatgtgtttgacatcctgtctgatagcgggaacgagaaagtttactgggatgactatcgcgtcgaatcgttttgcaccacgctcggtctgaaattagcgcctctgctgggacgtggtagtttcgctgaactgtcccagtacccaaacgatttcaaaagcattgtgaaccgttataatgaattggttgatacgacgggcctggaacatgccaataaacacgtctttggtccgcaagcgtcttctgaaactggcgtagcagaaggctacgttcttaaacccgtctatccgatcttctttaataatggtacacgcgtggcgattaaatgcaagaactccaaattttcggagaaagccaagagcgacaaaccaattaaagcgaaagtggaactgacggagaacgataaacgtgtgctcgaaatctttagcgagtatgttacctggaatcgcgtcagtaacgtactgtcacatattggctcagtgaccgcaaaagattttgggcgtgttatgggtctgacgatgaaagacatcattaatgaagcagcacgcgaaggccatgatatgttgttcgctgataacccgtcggcggtgaagaaagagctgaccattctcatccagaacacgattcgttccaaatggcacgaagttctggag

SEQ ID NO: 118 - protein, 346 aa, synthetic construct
  REGION 1..346: note = variant of RNA ligase 2 from Klebsiella phage KP179
MHHHHHHGGSGFFAYYSSLENHYNNKFIEKIRGAGFDMHTVEWVAREKIHGTNFSVIITPTEIVPAKRTGPILEGESFFGHEIIMKKYKDSFVKVQNMLNAMDLVSVQIFGEFAGGGIQKGVDYGDKDFYVFDILSDSGNEKVYWDDYRVESFCTTLGLKLAPLLGRGSFAELSQYPNDFKSIVNRYNELVDTTGLEHANKHVFGPQASSETGVAEGYVLKPVYPIFFNNGTRVAIKCKNSKFSEKAKSDKPIKAKVELTENDKRVLEIFSEYVTWNRVSNVLSHIGSVTAKDFGRVMGLTMKDIINEAAREGHDMLFADNPSAVKKELTILIQNTIRSKWHEVLE

SEQ ID NO: 119 - DNA, 1038 bp, synthetic construct
  misc_feature 1..1038: note = variant of RNA ligase 2 from Klebsiella phage KP179
  source 1..1038: mol_type = other DNA
atgcatcaccatcaccatcacggtggcagcaacatgtttgcgtattattcaagtctggaaaaccattacaataataagttcattgagaagatccgtggtgcaggcttcgacatgcacaccgtggaatgggtagctcgcgagaagattcatggaacgaactttagcgttatcattactccgaccgaaatcgtcccagccaaacgcacagggccgatcttggaaggcgagtcgttctttggtcacgaaattatcatgaaaaaatataaagactccttcgtgaaggtgcagaacatgctgaatgccatggatcttgttagcgtgcaaatctttggcgaatttgcgggtggtggcattcagaaaggcgtcgattacggagacaaagatttctatgtgtttgacatcctgtctgatagcgggaacgagaaagtttactgggatgactatcgcgtcgaatcgttttgcaccacgctcggtctgaaattagcgcctctgctgggacgtggtagtttcgctgaactgtcccagtacccaaacgatttcaaaagcattgtgaaccgttataatgaattggttgatacgacgggcctggaacatgccaataaacacgtctttggtccgcaagcgtcttctgaaactggcgtagcagaaggctacgttcttaaacccgtctatccgatcttctttaataatggtacacgcgtggcgattaaatgcaagaactccaaattttcggagaaagccaagctggacaaaccaattaaagcgaaagtggaactgacggagaacgataaacgtgtgctcgaaatctttagcgagtatgttacctggaatcgcgtcagtaacgtactgtcacatattggctcagtgaccgcaaaagattttgggcgtgttatgggtctgacgatgaaagacatcattaatgaagcagcacgcgaaggccatgatatgttgttcgctgataacccgtcggcggtgaagaaagagctgaccattctcatccagaacacgattcgttccaaatggcacgaagttctggag

SEQ ID NO: 120 - protein, 346 aa, synthetic construct
  REGION 1..346: note = variant of RNA ligase 2 from Klebsiella phage KP179
MHHHHHHGGSNMFAYYSSLENHYNNKFIEKIRGAGFDMHTVEWVAREKIHGTNFSVIITPTEIVPAKRTGPILEGESFFGHEIIMKKYKDSFVKVQNMLNAMDLVSVQIFGEFAGGGIQKGVDYGDKDFYVFDILSDSGNEKVYWDDYRVESFCTTLGLKLAPLLGRGSFAELSQYPNDFKSIVNRYNELVDTTGLEHANKHVFGPQASSETGVAEGYVLKPVYPIFFNNGTRVAIKCKNSKFSEKAKLDKPIKAKVELTENDKRVLEIFSEYVTWNRVSNVLSHIGSVTAKDFGRVMGLTMKDIINEAAREGHDMLFADNPSAVKKELTILIQNTIRSKWHEVLE

SEQ ID NO: 121 - DNA, 1038 bp, synthetic construct
  misc_feature 1..1038: note = variant of RNA ligase 2 from Klebsiella phage KP179
  source 1..1038: mol_type = other DNA
atgcatcaccatcaccatcacggtggcagcggtatgtttgcgtattattcaagtctggaaaaccattacaataataagttcattgagaagatccgtggtgcaggcttcctgatgcacaccgtggaatgggtagctcgcgagaagattcatggaacgaactttagcgttatcattactccgaccgaaatcgtcccagccaaacgcacagggccgatcttggaaggcgagtcgttctttggtcacgaaattatcatgaaaaaatataaagactccttcgtgaaggtgcagaacatgctgaatgccatggatcttgttagcgtgcaaatctttggcgaatttgcgggtggtggcattcagaaaggcgtcgattacggagacaaagatttctatgtgtttgacatcctgtctgatagcgggaacgagaaagtttactgggatgactatcgcgtcgaatcgttttgcaccacgctcggtctgaaattagcgcctctgctgggacgtggtagtttcgctgaactgtcccagtacccaaacgatttcaaaagcattgtgaaccgttataatgaattggttgatacgacgggcctggaacatgccaataaacacgtctttggtccgcaagcgtcttctgaaactggcgtagcagaaggctacgttcttaaacccgtctatccgatcttctttaataatggtacacgcgtggcgattaaatgcaagaactccaaattttcggagaaagccaagagtgacaaaccaattaaagcgaaagtggaactgacggagaacgataaacgtctgctcgaaatctttagcgagtatgttacctggaatcgcgtcagtaacgtactgtcacatattggctcagtgaccgcaaaagattttgggcgtgttatgggtctgacgatgaaagacatcattaatgaagcagcacgcgaaggccatgatatgttgttcgctgataacccgtcggcggtgaagaaagagctgaccattctcatccagaacacgattcgttccaaatggcacgaagttctggag

SEQ ID NO: 122 - protein, 346 aa, synthetic construct
  REGION 1..346: note = variant of RNA ligase 2 from Klebsiella phage KP179
MHHHHHHGGSGMFAYYSSLENHYNNKFIEKIRGAGFLMHTVEWVAREKIHGTNFSVIITPTEIVPAKRTGPILEGESFFGHEIIMKKYKDSFVKVQNMLNAMDLVSVQIFGEFAGGGIQKGVDYGDKDFYVFDILSDSGNEKVYWDDYRVESFCTTLGLKLAPLLGRGSFAELSQYPNDFKSIVNRYNELVDTTGLEHANKHVFGPQASSETGVAEGYVLKPVYPIFFNNGTRVAIKCKNSKFSEKAKSDKPIKAKVELTENDKRLLEIFSEYVTWNRVSNVLSHIGSVTAKDFGRVMGLTMKDIINEAAREGHDMLFADNPSAVKKELTILIQNTIRSKWHEVLE

SEQ ID NO: 123 - DNA, 1038 bp, synthetic construct
  misc_feature 1..1038: note = variant of RNA ligase 2 from Klebsiella phage KP179
  source 1..1038: mol_type = other DNA
atgcatcaccatcaccatcacggtggcagcaacatgtttgcgtattattcaagtctggaaaaccattacaataataagttcattgagaagatccgtggtgcaggcttcctgatgcacaccgtggaatgggtagctcgcgagaagattcatggaacgaactttagcgttatcattactccgaccgaaatcgtcccagccaaacgcacagggccgatcttggaaggcgagtcgttctttggtcacgaaattatcatgaaaaaatataaagactccttcgtgaaggtgcagaacatgctgaatgccatggatcttgttagcgtgcaaatctttggcgaatttgcgggtggtggcattcagaaaggcgtcgattacggagacaaagatttctatgtgtttgacatcctgtctgatagcgggaacgagaaagtttactgggatgactatcgcgtcgaatcgttttgcacccaactcggtctgaaattagcgcctctgctgggacgtggtagtttcgctgaactgtcccagtacccaaacgatttcaaaagcattgtgaaccgttataatgaattggttgatacgacgggcctggaacatgccaataaacacgtctttggtccgcaagcgtcttctgaaactggcgtagcagaaggctacgttcttaaacccgtctatccgatcttctttaataatggtacgcgcgtggcgattaaatgcaagaactccaaattttcggagaaagccaagagcgacaaaccaattaaagcgaaagtggaactgacggagaacgataaacgtctgctcgaaatctttagcgagtatgttacctggaatcgcgtcagtaacgtactgtcacatattggctcagtgaccgcaaaagattttgggcgtgttatgggtctgacgatgaaagacatcattaatgaagcagcacgcgaaggccatgatatgttgttcgctgataacccgtcggcggtgaagaaagagctgaccattctcatccagaacacgattcgttccaaatggcacgaagttctggag

SEQ ID NO: 124 - protein, 346 aa, synthetic construct
  REGION 1..346: note = variant of RNA ligase 2 from Klebsiella phage KP179
MHHHHHHGGSNMFAYYSSLENHYNNKFIEKIRGAGFLMHTVEWVAREKIHGTNFSVIITPTEIVPAKRTGPILEGESFFGHEIIMKKYKDSFVKVQNMLNAMDLVSVQIFGEFAGGGIQKGVDYGDKDFYVFDILSDSGNEKVYWDDYRVESFCTQLGLKLAPLLGRGSFAELSQYPNDFKSIVNRYNELVDTTGLEHANKHVFGPQASSETGVAEGYVLKPVYPIFFNNGTRVAIKCKNSKFSEKAKSDKPIKAKVELTENDKRLLEIFSEYVTWNRVSNVLSHIGSVTAKDFGRVMGLTMKDIINEAAREGHDMLFADNPSAVKKELTILIQNTIRSKWHEVLE

SEQ ID NO: 125 - DNA, 1038 bp, synthetic construct
  misc_feature 1..1038: note = variant of RNA ligase 2 from Klebsiella phage KP179
  source 1..1038: mol_type = other DNA
atgcatcaccatcaccatcacggtggcagcaacatgtttgcgtattattcaagtctggaaaaccattacaataataagttcattgagaagatccgtggtgcaggcttcctgatgcacaccgtggaatgggtagctcgcgagaagattcatggaacgaactttagcgttatcattactccgaccgaaatcgtcccagccaaacgcacagggccgatcttggaaggcgagtcgttctttggtcacgaaattatcatgaaaaaatataaagactccttcgtgaaggtgcagaacatgctgaatgccatggatcttgttagcgtgcaaatctttggcgaatttgcgggtggtggcattcagaaaggcgtcgattacggagacaaagatttctatgtgtttgacatcctgtctgatagcgggaacgagaaagtttactgggatgactatcgcgtcgaatcgttttgcacccaactcggtctgaaattagcgcctctgctgggacgtggtagtttcgctgaactgtcccagtacccaaacgatttcaaaagcattgtgaaccgttataatgaattggttgatacgacgggcctggaacatgccaataaacacgtctttggtccgcaagcgtcttctgaaactggcgtagcagaaggctacgttcttaaacccgtctatccgatcttctttaataatggtacgcgcgtggcgattaaatgcaagaactccaaattttcggagaaagccacgagtgacaaaccaattaaagcgaaagtggaactgacggagaacgataaacgtctgctcgaaatctttagcgagtatgttacctggaatcgcgtcagtaacgtactgtcacatattggctcagtgaccgcaaaagattttgggcgtgttatgggtctgacgatgaaagacatcattaatgaagcagcacgcgaaggccatgatatgttgttcgctgataacccgtcggcggtgaagaaagagctgaccattctcatccagaacacgattcgttccaaatggcacgaagttctggag

SEQ ID NO: 126 - protein, 346 aa, synthetic construct
  REGION 1..346: note = variant of RNA ligase 2 from Klebsiella phage KP179
MHHHHHHGGSNMFAYYSSLENHYNNKFIEKIRGAGFLMHTVEWVAREKIHGTNFSVIITPTEIVPAKRTGPILEGESFFGHEIIMKKYKDSFVKVQNMLNAMDLVSVQIFGEFAGGGIQKGVDYGDKDFYVFDILSDSGNEKVYWDDYRVESFCTQLGLKLAPLLGRGSFAELSQYPNDFKSIVNRYNELVDTTGLEHANKHVFGPQASSETGVAEGYVLKPVYPIFFNNGTRVAIKCKNSKFSEKATSDKPIKAKVELTENDKRLLEIFSEYVTWNRVSNVLSHIGSVTAKDFGRVMGLTMKDIINEAAREGHDMLFADNPSAVKKELTILIQNTIRSKWHEVLE

SEQ ID NO: 127 - DNA, 1038 bp, synthetic construct
  misc_feature 1..1038: note = variant of RNA ligase 2 from Klebsiella phage KP179
  source 1..1038: mol_type = other DNA
atgcatcaccatcaccatcacggtggcagcggtatgtttgcgtattattcaagtctggaaaaccattacaataataagttcattgagaagatccgtggtgcaggcttcctgatgcacaccgtggaatgggtagctcgcgagaagattcatggaacgaactttagcgttatcattactccgaccgaaatcgtcccagccaaacgcacagggccgatcttggaaggcgagtcgttctttggtcacgaaattatcatgaaaaaatataaagactccttcgtgaaggtgcagaacatgctgaatgccatggatcttgttagcgtgcaaatctttggcgaatttgcgggtggtggcattcagaaaggcgtcgattacggagacaaagatttctatgtgtttgacatcctgtctgatagcgggaacgagaaagtttactgggatgactatcgcgtcgaatcgttttgcaccacgctcggtctgaaattagcgcctctgctgggacgtggtagtttcgctgaactgtcccagtacccaaacgatttcaaaagcattgtgaaccgttataatgaattggttgatacgacgggcctggaacatgccaataaacacgtctttggtccgcaagcgtcttctgaaactggcgtagcagaaggctacgttcttaaacccgtctatccgatcttctttaataatggtacgcgcgtggcgcttaaatgcaagaactccaaattttcggagaaagccacgcgtgacaaaccaattaaagcgaaagtggaactgacggagaacgataaacgtgtgctcgaaatctttagcgagtatgttacctggaatcgcgtcagtaacgtactgtcacatattggctcagtgaccgcaaaagattttgggcgtgttatgggtctgacgatgaaagacatcattaatgaagcagcacgcgaaggccatgatatgttgttcgctgataacccgtcggcggtgaagaaagagctgaccattctcatccagaacacgattcgttccaaatggcacgaagttctggag

SEQ ID NO: 128 - protein, 346 aa, synthetic construct
  REGION 1..346: note = variant of RNA ligase 2 from Klebsiella phage KP179
MHHHHHHGGSGMFAYYSSLENHYNNKFIEKIRGAGFLMHTVEWVAREKIHGTNFSVIITPTEIVPAKRTGPILEGESFFGHEIIMKKYKDSFVKVQNMLNAMDLVSVQIFGEFAGGGIQKGVDYGDKDFYVFDILSDSGNEKVYWDDYRVESFCTTLGLKLAPLLGRGSFAELSQYPNDFKSIVNRYNELVDTTGLEHANKHVFGPQASSETGVAEGYVLKPVYPIFFNNGTRVALKCKNSKFSEKATRDKPIKAKVELTENDKRVLEIFSEYVTWNRVSNVLSHIGSVTAKDFGRVMGLTMKDIINEAAREGHDMLFADNPSAVKKELTILIQNTIRSKWHEVLE

SEQ ID NO: 129 - DNA, 1038 bp, synthetic construct
  misc_feature 1..1038: note = variant of RNA ligase 2 from Klebsiella phage KP179
  source 1..1038: mol_type = other DNA
atgcatcaccatcaccatcacggtggcagcggtatgtttgcgtattattcaagtctggaaaaccattacaataataagttcattgagaagatccgtggtgcaggcttcctgatgcacaccgtggaatgggtagctcgcgagaagattcatggaacgaactttagcgttatcattactccgaccgaaatcgtcccagccaaacgcacagggccgatcttggaaggcgagtcgttctttggtcacgaaattatcatgaaaaaatataaagactccttcgtgaaggtgcagaacatgctgaatgccatggatcttgttagcgtgcaaatctttggcgaatttgcgggtggtggcattcagaaaggcgtcgattacggagacaaagatttctatgtgtttgacatcctgtctgatagcgggaacgagaaagtttactgggatgactatcgcgtcgaatcgttttgcacccaactcggtctgaaattagcgcctctgctgggacgtggtagtttcgctgaactgtcccagtacccaaacgatttcaaaagcattgtgaaccgttataatgaattggttgatacgacgggcctggaacatgccaataaacacgtctttggtccgcaagcgtcttctgaaactggcgtagcagaaggctacgttcttaaacccgtctatccgatcttctttaataatggtacacgcgtggcgattaaatgcaagaactccaaattttcggagaaagccacgctggacaaaccaattaaagcgaaagtggaactgacggagaacgataaacgtgtgctcgaaatctttagcgagtatgttacctggaatcgcgtcagtaacgtactgtcacatattggctcagtgaccgcaaaagattttgggcgtgttatgggtctgacgatgaaagacatcattaatgaagcagcacgcgaaggccatgatatgttgttcgctgataacccgtcggcggtgaagaaagagctgacgattctcatccagaacacgattcgttccaaatggcacgaagttctggag

SEQ ID NO: 130 - protein, 346 aa, synthetic construct
  REGION 1..346: note = variant of RNA ligase 2 from Klebsiella phage KP179
MHHHHHHGGSGMFAYYSSLENHYNNKFIEKIRGAGFLMHTVEWVAREKIHGTNFSVIITPTEIVPAKRTGPILEGESFFGHEIIMKKYKDSFVKVQNMLNAMDLVSVQIFGEFAGGGIQKGVDYGDKDFYVFDILSDSGNEKVYWDDYRVESFCTQLGLKLAPLLGRGSFAELSQYPNDFKSIVNRYNELVDTTGLEHANKHVFGPQASSETGVAEGYVLKPVYPIFFNNGTRVAIKCKNSKFSEKATLDKPIKAKVELTENDKRVLEIFSEYVTWNRVSNVLSHIGSVTAKDFGRVMGLTMKDIINEAAREGHDMLFADNPSAVKKELTILIQNTIRSKWHEVLE

SEQ ID NO: 131 - DNA, 1038 bp, synthetic construct
  misc_feature 1..1038: note = variant of RNA ligase 2 from Klebsiella phage KP179
  source 1..1038: mol_type = other DNA
atgcatcaccatcaccatcacggtggcagcaacatgtttgcgtattattcaagtctggaaaaccattacaataataagttcattgagaagatccgtggtgcaggcttcgacatgcacaccgtggaatgggtagctcgcgagaagattcatggaacgaactttagcgttatcattactccgaccgaaatcgtcccagccaaacgcacagggccgatcttggaaggcgagtcgttctttggtcacgaaattatcatgaaaaaatataaagactccttcgtgaaggtgcagaacatgctgaatgccatggatcttgttagcgtgcaaatctttggcgaatttgcgggtggtggcattcagaaaggcgtcgattacggagacaaagatttctatgtgtttgacatcctgtctgatagcgggaacgagaaagtttactgggatgactatcgcgtcgaatcgttttgcaccacgctcggtctgaaattagcgcctctgctgggacgtggtagtttcgctgaactgtcccagtacccaaacgatttcaaaagcattgtgaaccgttataatgaattggttgatacgacgggcctggaacatgccaataaacacgtctttggtccgcaagcgtcttctgaaactggcgtagcagaaggctacgttcttaaacccgtctatccgatcttctttaataatggtacacgcgtggcgattaaatgcaagaactccaaattttcggagaaagccaagagcgacaaaccaattaaagcgaaagtggaactgacggagaacgataaacgtctgctcgaaatctttagcgagtatgttacctggaatcgcgtcagtaacgtactgtcacatattggctcagtgaccgcaaaagattttgggcgtgttatgggtctgacgatgaaagacatcattaatgaagcagcacgcgaaggccatgatatgttgttcgctgataacccgtcggcggtgaagaaagagctgcgcattctcatccagcacacgattcgttccaaatggcacgaagttctggag

SEQ ID NO: 132 - protein, 346 aa, synthetic construct
  REGION 1..346: note = variant of RNA ligase 2 from Klebsiella phage KP179
MHHHHHHGGSNMFAYYSSLENHYNNKFIEKIRGAGFDMHTVEWVAREKIHGTNFSVIITPTEIVPAKRTGPILEGESFFGHEIIMKKYKDSFVKVQNMLNAMDLVSVQIFGEFAGGGIQKGVDYGDKDFYVFDILSDSGNEKVYWDDYRVESFCTTLGLKLAPLLGRGSFAELSQYPNDFKSIVNRYNELVDTTGLEHANKHVFGPQASSETGVAEGYVLKPVYPIFFNNGTRVAIKCKNSKFSEKAKSDKPIKAKVELTENDKRLLEIFSEYVTWNRVSNVLSHIGSVTAKDFGRVMGLTMKDIINEAAREGHDMLFADNPSAVKKELRILIQHTIRSKWHEVLE

SEQ ID NO: 133 - DNA, 1038 bp, synthetic construct
  misc_feature 1..1038: note = variant of RNA ligase 2 from Klebsiella phage KP179
  source 1..1038: mol_type = other DNA
atgcatcaccatcaccatcacggtggcagcggtatgtttgcgtattattcaagtctggaaaaccattacaataataagttcattgagaagatccgtggtgcaggcttcgatatgcacaccgtggaatgggtagctcgcgagaagattcatggaacgaactttagcgttatcattactccgaccgaaatcgtcccagccaaacgcacagggccgatcttggaaggcgagtcgttctttggtcacgaaattatcatgaaaaaatataaagactccttcgtgaaggtgcagaacatgctgaatgccatggatcttgttagcgtgcaaatctttggcgaatttgcgggtggtggcattcagaaaggcgtcgattacggagacaaagatttctatgtgtttgacatcctgtctgatagcgggaacgagaaagtttactgggatgactatcgcgtcgaatcgttttgcaccacgctcggtctgaaattagcgcctctgctgggacgtggtagtttcgctgaactgtcccagtacccaaacgatttcaaaagcattgtgaaccgttataatgaattggttgatacgacgggcctggaacatgccaataaacacgtctttggtccgcaagcgtcttctgaaactggcgtagcagaaggctacgttcttaaacccgtctatccgatcttctttaataatggtacacgcgtggcgattaaatgcaagaactccaaattttcggagaaagccaagctggacaaaccaattaaagcgaaagtggaactgacggagaacgataaacgtgtgctcgaaatctttagcgagtatgttacctggaatcgcgtcagtaacgtactgtcacatattggctcagtgaccgcaaaagattttgggcgtgttatgggtctgacgatgaaagacatcattaatgaagcagcacgcgaaggccatgatatgttgttcgctgataacccgtcggcggtgaagaaagagctgaccattctcatccagaacacgattcgttccaaatggcacgaagttctggag

SEQ ID NO: 134 - protein, 346 aa, synthetic construct
  REGION 1..346: note = variant of RNA ligase 2 from Klebsiella phage KP179
MHHHHHHGGSGMFAYYSSLENHYNNKFIEKIRGAGFDMHTVEWVAREKIHGTNFSVIITPTEIVPAKRTGPILEGESFFGHEIIMKKYKDSFVKVQNMLNAMDLVSVQIFGEFAGGGIQKGVDYGDKDFYVFDILSDSGNEKVYWDDYRVESFCTTLGLKLAPLLGRGSFAELSQYPNDFKSIVNRYNELVDTTGLEHANKHVFGPQASSETGVAEGYVLKPVYPIFFNNGTRVAIKCKNSKFSEKAKLDKPIKAKVELTENDKRVLEIFSEYVTWNRVSNVLSHIGSVTAKDFGRVMGLTMKDIINEAAREGHDMLFADNPSAVKKELTILIQNTIRSKWHEVLE

SEQ ID NO: 135 - DNA, 1038 bp, synthetic construct
  misc_feature 1..1038: note = variant of RNA ligase 2 from Klebsiella phage KP179
  source 1..1038: mol_type = other DNA
atgcatcaccatcaccatcacggtggtagcaacatgtttgcgtattattcaagtctggaaaaccattacaataataagttcattgagaagatccgtggtgcaggcttcgacatgcacaccgtggaatgggtagctcgcgagaagattcatggaacgaactttagcgttatcattactccgaccgaaatcgtcccagccaaacgcacagggccgatcttggaaggcgagtcgttctttggtcacgaaattatcatgaaaaaatataaagactccttcgtgaaggtgcagaacatgctgaatgccatggatcttgttagcgtgcaaatctttggcgaatttgcgggtggtggcattcagaaaggcgtcgattacggagacaaagatttctatgtgtttgacatcctgtctgatagcgggaacgagaaagtttactgggatgactatcgcgtcgaatcgttttgcacccaactcggtctgaaattagcgcctctgctgggacgtggtagtttcgctgaactgtcccagtacccaaacgatttcaaaagcattgtgaaccgttataatgaattggttgatacgacgggcctggaacatgccaataaacacgtctttggtccgcaagcgtcttctgaaactggcgtagcagaaggctacgttcttaaacccgtctatccgatcttctttaataatggtacacgcgtggcgattaaatgcaagaactccaaattttcggagaaagccacgcgtgacaaaccaattaaagcgaaagtggaactgacggagaacgataaacgtgtgctcgaaatctttagcgagtatgttacctggaatcgcgtcagtaacgtactgtcacatattggctcagtgaccgcaaaagattttgggcgtgttatgggtctgacgatgaaagacatcattaatgaagcagcacgcgaaggccatgatctgttgttcgctgataacccgtcggcggtgaagaaagagctgaccattctcatccagaacacgattcgttccaaatggcacgaagttctggag

SEQ ID NO: 136 - protein, 346 aa, synthetic construct
  REGION 1..346: note = variant of RNA ligase 2 from Klebsiella phage KP179
MHHHHHHGGSNMFAYYSSLENHYNNKFIEKIRGAGFDMHTVEWVAREKIHGTNFSVIITPTEIVPAKRTGPILEGESFFGHEIIMKKYKDSFVKVQNMLNAMDLVSVQIFGEFAGGGIQKGVDYGDKDFYVFDILSDSGNEKVYWDDYRVESFCTQLGLKLAPLLGRGSFAELSQYPNDFKSIVNRYNELVDTTGLEHANKHVFGPQASSETGVAEGYVLKPVYPIFFNNGTRVAIKCKNSKFSEKATRDKPIKAKVELTENDKRVLEIFSEYVTWNRVSNVLSHIGSVTAKDFGRVMGLTMKDIINEAAREGHDLLFADNPSAVKKELTILIQNTIRSKWHEVLE

SEQ ID NO: 137 - DNA, 1038 bp, synthetic construct
  misc_feature 1..1038: note = variant of RNA ligase 2 from Klebsiella phage KP179
  source 1..1038: mol_type = other DNA
atgcatcaccatcaccatcacggtggcagcggtatgtttgcgtattattcaagtctggaaaaccattacaataataagttcattgagaagatccgtggtgcaggcttcctgatgcacaccgtggaatgggtagctcgcgagaagattcatggaacgaactttagcgttatcattactccgaccgaaatcgtcccagccaaacgcacagggccgatcttggaaggcgagtcgttctttggtcacgaaattatcatgaaaaaatataaagactccttcgtgaaggtgcagaacatgctgaatgccatggatcttgttagcgtgcaaatctttggcgaatttgcgggtggtggcattcagaaaggcgtcgattacggagacaaagatttctatgtgtttgacatcctgtctgatagcgggaacgagaaagtttactgggatgactatcgcgtcgaatcgttttgcaccacgctcggtctgaaattagcgcctctgctgggacgtggtagtttcgctgaactgtcccagtacccaaacgatttcaaaagcattgtgaaccgttataatgaattggttgatacgacgggcctggaacatgccaataaacacgtctttggtccgcaagcgtcttctgaaactggcgtagcagaaggctacgttcttaaacccgtctatccgatcttctttaataatggtacacgcgtggcgattaaatgcaagaactccaaattttcggagaaagccaagctggacaaaccaattaaagcgaaagtggaactgacggagaacgataaacgtgtgctcgaaatctttagcgagtatgttacctggaatcgcgtcagtaacgtactgtcacatattggctcagtgaccgcaaaagattttgggcgtgttatgggtctgacgatgaaagacatcattaatgaagcagcacgcgaaggccatgatctgttgttcgctgataacccgtcggcggtgaagaaagagctgaccattctcatccagaacacgattcgttccaaatggcacgaagttctggag

SEQ ID NO: 138 - protein, 346 aa, synthetic construct
  REGION 1..346: note = variant of RNA ligase 2 from Klebsiella phage KP179
MHHHHHHGGSGMFAYYSSLENHYNNKFIEKIRGAGFLMHTVEWVAREKIHGTNFSVIITPTEIVPAKRTGPILEGESFFGHEIIMKKYKDSFVKVQNMLNAMDLVSVQIFGEFAGGGIQKGVDYGDKDFYVFDILSDSGNEKVYWDDYRVESFCTTLGLKLAPLLGRGSFAELSQYPNDFKSIVNRYNELVDTTGLEHANKHVFGPQASSETGVAEGYVLKPVYPIFFNNGTRVAIKCKNSKFSEKAKLDKPIKAKVELTENDKRVLEIFSEYVTWNRVSNVLSHIGSVTAKDFGRVMGLTMKDIINEAAREGHDLLFADNPSAVKKELTILIQNTIRSKWHEVLE

SEQ ID NO: 139 - DNA, 1038 bp, synthetic construct
  misc_feature 1..1038: note = variant of RNA ligase 2 from Klebsiella phage KP179
  source 1..1038: mol_type = other DNA
atgcatcaccatcaccatcacggtggcagcaatatgtttgcgtattattcaagtctggaaaaccattacaataataagttcattgagaagatccgtggtgcaggcttcgatatgcacaccgtggaatgggtagctcgcgagaagattcatggaacgaactttagcgttatcattactccgaccgaaatcgtcccagccaaacgcacagggccgatcttggaaggcgagtcgttctttggtcacgaaattatcatgaaaaaatataaagactccttcgtgaaggtgcagaacatgctgaatgccatggatcttgttagcgtgcaaatctttggcgaatttgcgggtggtggcattcagaaaggcgtcgattacggagacaaagatttctatgtgtttgacatcctgtctgatagcgggaacgagaaagtttactgggatgactatcgcgtcgaatcgttttgcaccacgctcggtctgaaattagcgcctctgctgggacgtggtagtttcgctgaactgtcccagtacccaaacgatttcaaaagcattgtgaaccgttataatgaattggttgatacgacgggcctggaacatgccaataaacacgtctttggtccgcaagcgtcttctgaaactggcgtagcagaaggctacgttcttaaacccgtctatccgatcttctttaataatggtacacgcgtggcgattaaatgcaagaactccaaattttcggagaaagccaagagcgacaaaccaattaaagcgaaagtggaactgacggagaacgataaacgtgtgctcgaaatctttagcgagtatgttacctggaatcgcgtcagtaacgtactgtcacatattggctcagtgaccgcaaaagattttgggcgtgttatgggtctgacgatgaaagacatcattaatgaagcagcacgcgaaggccatgatatgttgttcgctgataacccgtcggcggtgaagaaagagctgaccattctcatccagaacacgattcgttccaaatggcacgaagttctggag

SEQ ID NO: 140 - protein, 346 aa, synthetic construct
  REGION 1..346: note = variant of RNA ligase 2 from Klebsiella phage KP179
MHHHHHHGGSNMFAYYSSLENHYNNKFIEKIRGAGFDMHTVEWVAREKIHGTNFSVIITPTEIVPAKRTGPILEGESFFGHEIIMKKYKDSFVKVQNMLNAMDLVSVQIFGEFAGGGIQKGVDYGDKDFYVFDILSDSGNEKVYWDDYRVESFCTTLGLKLAPLLGRGSFAELSQYPNDFKSIVNRYNELVDTTGLEHANKHVFGPQASSETGVAEGYVLKPVYPIFFNNGTRVAIKCKNSKFSEKAKSDKPIKAKVELTENDKRVLEIFSEYVTWNRVSNVLSHIGSVTAKDFGRVMGLTMKDIINEAAREGHDMLFADNPSAVKKELTILIQNTIRSKWHEVLE

SEQ ID NO: 141 - DNA, 1038 bp, synthetic construct
  misc_feature 1..1038: note = variant of RNA ligase 2 from Klebsiella phage KP179
  source 1..1038: mol_type = other DNA
atgcatcaccatcaccatcacggtggcagcaacatgtttgcgtattattcaagtctggaaaaccattacaataataagttcattgagaagatccgtggtgcaggcttcgacatgcacaccgtggaatgggtagctcgcgagaagattcatggaacgaactttagcgttatcattactccgaccgaaatcgtcccagccaaacgcacagggccgatcttggaaggcgagtcgttctttggtcacgaaattatcatgaaaaaatataaagactccttcgtgaaggtgcagaacatgctgaatgccatggatcttgttagcgtgcaaatctttggcgaatttgcgggtggtggcattcagaaaggcgtcgattacggagacaaagatttctatgtgtttgacatcctgtctgatagcgggaacgagaaagtttactgggatgactatcgcgtcgaatcgttttgcacccaactcggtctgaaattagcgcctctgctgggacgtggtagtttcgctgaactgtcccagtacccaaacgatttcaaaagcattgtgaaccgttataatgaattggttgatacgacgggcctggaacatgccaataaacacgtctttggtccgcaagcgtcttctgaaactggcgtagcagaaggctacgttcttaaacccgtctatccgatcttctttaataatggtacacgcgtggcgattaaatgcaagaactccaaattttcggagaaagccaagagcgacaaaccaattaaagcgaaagtggaactgacggagaacgataaacgtgtgctcgaaatctttagcgagtatgttacctggaatcgcgtcagtaacgtactgtcacatattggctcagtgaccgcaaaagattttgggcgtgttatgggtctgacgatgaaagacatcattaatgaagcagcacgcgaaggccatgatatgttgttcgctgataacccgtcggcggtgaagaaagagctgaccattctcatccagaacacgattcgttccaaatggcacgaagttctggag

SEQ ID NO: 142 - protein, 346 aa, synthetic construct
  REGION 1..346: note = variant of RNA ligase 2 from Klebsiella phage KP179
MHHHHHHGGSNMFAYYSSLENHYNNKFIEKIRGAGFDMHTVEWVAREKIHGTNFSVIITPTEIVPAKRTGPILEGESFFGHEIIMKKYKDSFVKVQNMLNAMDLVSVQIFGEFAGGGIQKGVDYGDKDFYVFDILSDSGNEKVYWDDYRVESFCTQLGLKLAPLLGRGSFAELSQYPNDFKSIVNRYNELVDTTGLEHANKHVFGPQASSETGVAEGYVLKPVYPIFFNNGTRVAIKCKNSKFSEKAKSDKPIKAKVELTENDKRVLEIFSEYVTWNRVSNVLSHIGSVTAKDFGRVMGLTMKDIINEAAREGHDMLFADNPSAVKKELTILIQNTIRSKWHEVLE

SEQ ID NO: 143 - DNA, 1038 bp, synthetic construct
  misc_feature 1..1038: note = variant of RNA ligase 2 from Klebsiella phage KP179
  source 1..1038: mol_type = other DNA
atgcatcaccatcaccatcacggtggcagcaacatgtttgcgtattattcaagtctggaaaaccattacaataataagttcattgagaagatccgtggtgcaggcttcctgatgcacaccgtggaatgggtagctcgcgagaagattcatggaacgaactttagcgttatcattactccgaccgaaatcgtcccagccaaacgcacagggccgatcttggaaggcgagtcgttctttggtcacgaaattatcatgaaaaaatataaagactccttcgtgaaggtgcagaacatgctgaatgccatggatcttgttagcgtgcaaatctttggcgaatttgcgggtggtggcattcagaaaggcgtcgattacggagacaaagatttctatgtgtttgacatcctgtctgatagcgggaacgagaaagtttactgggatgactatcgcgtcgaatcgttttgcaccacgctcggtctgaaattagcgcctctgctgggacgtggtagtttcgctgaactgtcccagtacccaaacgatttcaaaagcattgtgaaccgttataatgaattggttgatacgacgggcctggaacatgccaataaacacgtctttggtccgcaagcgtcttctgaaactggcgtagcagaaggctacgttcttaaacccgtctatccgatcttctttaataatggtacgcgcgtggcgattaaatgcaagaactccaaattttcggagaaagccaagctggacaaaccaattaaagcgaaagtggaactgacggagaacgataaacgtgtgctcgaaatctttagcgagtatgttacctggaatcgcgtcagtaacgtactgtcacatattggctcagtgaccgcaaaagattttgggcgtgttatgggtctgacgatgaaagacatcattaatgaagcagcacgcgaaggccatgatatgttgttcgctgataacccgtcggcggtgaagaaagagctgaccattctcatccagaacacgattcgttccaaatggcacgaagttctggag

SEQ ID NO: 144 - protein, 346 aa, synthetic construct
  REGION 1..346: note = variant of RNA ligase 2 from Klebsiella phage KP179
MHHHHHHGGSNMFAYYSSLENHYNNKFIEKIRGAGFLMHTVEWVAREKIHGTNFSVIITPTEIVPAKRTGPILEGESFFGHEIIMKKYKDSFVKVQNMLNAMDLVSVQIFGEFAGGGIQKGVDYGDKDFYVFDILSDSGNEKVYWDDYRVESFCTTLGLKLAPLLGRGSFAELSQYPNDFKSIVNRYNELVDTTGLEHANKHVFGPQASSETGVAEGYVLKPVYPIFFNNGTRVAIKCKNSKFSEKAKLDKPIKAKVELTENDKRVLEIFSEYVTWNRVSNVLSHIGSVTAKDFGRVMGLTMKDIINEAAREGHDMLFADNPSAVKKELTILIQNTIRSKWHEVLE

SEQ ID NO: 145 - DNA, 1038 bp, synthetic construct
  misc_feature 1..1038: note = variant of RNA ligase 2 from Klebsiella phage KP179
  source 1..1038: mol_type = other DNA
atgcatcaccatcaccatcacggtggcagcggtatgtttgcgtattattcaagtctggaaaaccattacaataataagttcattgagaagatccgtggtgcaggcttcgatatgcacaccgtggaatgggtagctcgcgagaagattcatggaacgaactttagcgttatcattactccgaccgaaatcgtcccagccaaacgcacagggccgatcttggaaggcgagtcgttctttggtcacgaaattatcatgaaaaaatataaagactccttcgtgaaggtgcagaacatgctgaatgccatggatcttgttagcgtgcaaatctttggcgaatttgcgggtggtggcattcagaaaggcgtcgattacggagacaaagatttctatgtgtttgacatcctgtctgatagcgggaacgagaaagtttactgggatgactatcgcgtcgaatcgttttgcaccacgctcggtctgaaattagcgcctctgctgggacgtggtagtttcgctgaactgtcccagtacccaaacgatttcaaaagcattgtgaaccgttataatgaattggttgatacgacgggcctggaacatgccaataaacacgtctttggtccgcaagcgtcttctgaaactggcgtagcagaaggctacgttcttaaacccgtctatccgatcttctttaataatggtacgcgcgtggcgattaaatgcaagaactccaaattttcggagaaagccaagagcgacaaaccaattaaagcgaaagtggaactgacggagaacgataaacgtgtgctcgaaatctttagcgagtatgttacctggaatcgcgtcagtaacgtactgtcacatattggctcagtgaccgcaaaagattttgggcgtgttatgggtctgacgatgaaagacatcattaatgaagcagcacgcgaaggccatgatatgttgttcgctgataacccgtcggcggtgaagaaagagctgcgcattctcatccagaacacgattcgttccaaatggcacgaagttctggag

SEQ ID NO: 146 - protein, 346 aa, synthetic construct
  REGION 1..346: note = variant of RNA ligase 2 from Klebsiella phage KP179
MHHHHHHGGSGMFAYYSSLENHYNNKFIEKIRGAGFDMHTVEWVAREKIHGTNFSVIITPTEIVPAKRTGPILEGESFFGHEIIMKKYKDSFVKVQNMLNAMDLVSVQIFGEFAGGGIQKGVDYGDKDFYVFDILSDSGNEKVYWDDYRVESFCTTLGLKLAPLLGRGSFAELSQYPNDFKSIVNRYNELVDTTGLEHANKHVFGPQASSETGVAEGYVLKPVYPIFFNNGTRVAIKCKNSKFSEKAKSDKPIKAKVELTENDKRVLEIFSEYVTWNRVSNVLSHIGSVTAKDFGRVMGLTMKDIINEAAREGHDMLFADNPSAVKKELRILIQNTIRSKWHEVLE

SEQ ID NO: 147 - DNA, 1038 bp, synthetic construct
  misc_feature 1..1038: note = variant of RNA ligase 2 from Klebsiella phage KP179
  source 1..1038: mol_type = other DNA
atgcatcaccatcaccatcacggtggcagcggtatgtttgcgtattattcaagtctggaaaaccattacaataataagttcattgagaagatccgtggtgcaggcttcgacatgcacaccgtggaatgggtagctcgcgagaagattcatggaacgaactttagcgttatcattactccgaccgaaatcgtcccagccaaacgcacagggccgatcttggaaggcgagtcgttctttggtcacgaaattatcatgaaaaaatataaagactccttcgtgaaggtgcagaacatgctgaatgccatggatcttgttagcgtgcaaatctttggcgaatttgcgggtggtggcattcagaaaggcgtcgattacggagacaaagatttctatgtgtttgacatcctgtctgatagcgggaacgagaaagtttactgggatgactatcgcgtcgaatcgttttgcaccacgctcggtctgaaattagcgcctctgctgggacgtggtagtttcgctgaactgtcccagtacccaaacgatttcaaaagcattgtgaaccgttataatgaattggttgatacgacgggcctggaacatgccaataaacacgtctttggtccgcaagcgtcttctgaaactggcgtagcagaaggctacgttcttaaacccgtctatccgatcttctttaataatggtacacgcgtggcgattaaatgcaagaactccaaattttcggagaaagccaagagcgacaaaccaattaaagcgaaagtggaactgacggagaacgataaacgtgtgctcgaaatctttagcgagtatgttacctggaatcgcgtcagtaacgtactgtcacatattggctcagtgaccgcaaaagattttgggcgtgttatgggtctgacgatgaaagacatcattaatgaagcagcacgcgaaggccatgatctgttgttcgctgataacccgtcggcggtgaagaaagagctgaccattctcatccagaacacgattcgttccaaatggcacgaagttctggag

SEQ ID NO: 148 - protein, 346 aa, synthetic construct
  REGION 1..346: note = variant of RNA ligase 2 from Klebsiella phage KP179
MHHHHHHGGSGMFAYYSSLENHYNNKFIEKIRGAGFDMHTVEWVAREKIHGTNFSVIITPTEIVPAKRTGPILEGESFFGHEIIMKKYKDSFVKVQNMLNAMDLVSVQIFGEFAGGGIQKGVDYGDKDFYVFDILSDSGNEKVYWDDYRVESFCTTLGLKLAPLLGRGSFAELSQYPNDFKSIVNRYNELVDTTGLEHANKHVFGPQASSETGVAEGYVLKPVYPIFFNNGTRVAIKCKNSKFSEKAKSDKPIKAKVELTENDKRVLEIFSEYVTWNRVSNVLSHIGSVTAKDFGRVMGLTMKDIINEAAREGHDLLFADNPSAVKKELTILIQNTIRSKWHEVLE

SEQ ID NO: 149 - DNA, 1038 bp, synthetic construct
  misc_feature 1..1038: note = variant of RNA ligase 2 from Klebsiella phage KP179
  source 1..1038: mol_type = other DNA
atgcatcaccatcaccatcacggtggcagcggtatgtttgcgtattattcaagtctggaaaaccattacaataataagttcattgagaagatccgtggtgcaggcttcgacatgcacaccgtggaatgggtagctcgcgagaagattcatggaacgaactttagcgttatcattactccgaccgaaatcgtcccagccaaacgcacagggccgatcttggaaggcgagtcgttctttggtcacgaaattatcatgaaaaaatataaagactccttcgtgaaggtgcagaacatgctgaatgccatggatcttgttagcgtgcaaatctttggcgaatttgcgggtggtggcattcagaaaggcgtcgattacggagacaaagatttctatgtgtttgacatcctgtctgatagcgggaacgagaaagtttactgggatgactatcgcgtcgaatcgttttgcacccaactcggtctgaaattagcgcctctgctgggacgtggtagtttcgctgaactgtcccagtacccaaacgatttcaaaagcattgtgaaccgttataatgaattggttgatacgacgggcctggaacatgccaataaacacgtctttggtccgcaagcgtcttctgaaactggcgtagcagaaggctacgttcttaaacccgtctatccgatcttctttaataatggtacgcgcgtggcgattaaatgcaagaactccaaattttcggagaaagccaagctggacaaaccaattaaagcgaaagtggaactgacggagaacgataaacgtctgctcgaaatctttagcgagtatgttacctggaatcgcgtcagtaacgtactgtcacatattggctcagtgaccgcaaaagattttgggcgtgttatgggtctgacgatgaaagacatcattaatgaagcagcacgcgaaggccatgatatgttgttcgctgataacccgtcggcggtgaagaaagagctgacgattctcatccagcacacgattcgttccaaatggcacgaagttctggag

SEQ ID NO: 150 - protein, 346 aa, synthetic construct
  REGION 1..346: note = variant of RNA ligase 2 from Klebsiella phage KP179
MHHHHHHGGSGMFAYYSSLENHYNNKFIEKIRGAGFDMHTVEWVAREKIHGTNFSVIITPTEIVPAKRTGPILEGESFFGHEIIMKKYKDSFVKVQNMLNAMDLVSVQIFGEFAGGGIQKGVDYGDKDFYVFDILSDSGNEKVYWDDYRVESFCTQLGLKLAPLLGRGSFAELSQYPNDFKSIVNRYNELVDTTGLEHANKHVFGPQASSETGVAEGYVLKPVYPIFFNNGTRVAIKCKNSKFSEKAKLDKPIKAKVELTENDKRLLEIFSEYVTWNRVSNVLSHIGSVTAKDFGRVMGLTMKDIINEAAREGHDMLFADNPSAVKKELTILIQHTIRSKWHEVLE

SEQ ID NO: 151 - DNA, 1038 bp, synthetic construct
  misc_feature 1..1038: note = variant of RNA ligase 2 from Klebsiella phage KP179
  source 1..1038: mol_type = other DNA
atgcatcaccatcaccatcacggtggcagcggtatgtttgcgtattattcaagtctggaaaaccattacaataataagttcattgagaagatccgtggtgcaggcttcgatatgcacaccgtggaatgggtagctcgcgagaagattcatggaacgaactttagcgttatcattactccgaccgaaatcgtcccagccaaacgcacagggccgatcttggaaggcgagtcgttctttggtcacgaaattatcatgaaaaaatataaagactccttcgtgaaggtgcagaacatgctgaatgccatggatcttgttagcgtgcaaatctttggcgaatttgcgggtggtggcattcagaaaggcgtcgattacggagacaaagatttctatgtgtttgacatcctgtctgatagcgggaacgagaaagtttactgggatgactatcgcgtcgaatcgttttgcaccacgctcggtctgaaattagcgcctctgctgggacgtggtagtttcgctgaactgtcccagtacccaaacgatttcaaaagcattgtgaaccgttataatgaattggttgatacgacgggcctggaacatgccaataaacacgtctttggtccgcaagcgtcttctgaaactggcgtagcagaaggctacgttcttaaacccgtctatccgatcttctttaataatggtacacgcgtggcgattaaatgcaagaactccaaattttcggagaaagccaagctggacaaaccaattaaagcgaaagtggaactgacggagaacgataaacgtctgctcgaaatctttagcgagtatgttacctggaatcgcgtcagtaacgtactgtcacatattggctcagtgaccgcaaaagattttgggcgtgttatgggtctgacgatgaaagacatcattaatgaagcagcacgcgaaggccatgatctgttgttcgctgataacccgtcggcggtgaagaaagagctgcgcattctcatccagcacacgattcgttccaaatggcacgaagttctggag

SEQ ID NO: 152 - protein, 346 aa, synthetic construct
  REGION 1..346: note = variant of RNA ligase 2 from Klebsiella phage KP179
MHHHHHHGGSGMFAYYSSLENHYNNKFIEKIRGAGFDMHTVEWVAREKIHGTNFSVIITPTEIVPAKRTGPILEGESFFGHEIIMKKYKDSFVKVQNMLNAMDLVSVQIFGEFAGGGIQKGVDYGDKDFYVFDILSDSGNEKVYWDDYRVESFCTTLGLKLAPLLGRGSFAELSQYPNDFKSIVNRYNELVDTTGLEHANKHVFGPQASSETGVAEGYVLKPVYPIFFNNGTRVAIKCKNSKFSEKAKLDKPIKAKVELTENDKRLLEIFSEYVTWNRVSNVLSHIGSVTAKDFGRVMGLTMKDIINEAAREGHDLLFADNPSAVKKELRILIQHTIRSKWHEVLE

SEQ ID NO: 153 - DNA, 1038 bp, synthetic construct
  misc_feature 1..1038: note = variant of RNA ligase 2 from Klebsiella phage KP179
  source 1..1038: mol_type = other DNA
atgcatcaccatcaccatcacggtggcagcaacatgtttgcgtattattcaagtctggaaaaccattacaataataagttcattgagaagatccgtggtgcaggcttcgatatgcacaccgtggaatgggtagctcgcgagaagattcatggaacgaactttagcgttatcattactccgaccgaaatcgtcccagccaaacgcacagggccgatcttggaaggcgagtcgttctttggtcacgaaattatcatgaaaaaatataaagactccttcgtgaaggtgcagaacatgctgaatgccatggatcttgttagcgtgcaaatctttggcgaatttgcgggtggtggcattcagaaaggcgtcgattacggagacaaagatttctatgtgtttgacatcctgtctgatagcgggaacgagaaagtttactgggatgactatcgcgtcgaatcgttttgcacccaactcggtctgaaattagcgcctctgctgggacgtggtagtttcgctgaactgtcccagtacccaaacgatttcaaaagcattgtgaaccgttataatgaattggttgatacgacgggcctggaacatgccaataaacacgtctttggtccgcaagcgtcttctgaaactggcgtagcagaaggctacgttcttaaacccgtctatccgatcttctttaataatggtacacgcgtggcgattaaatgcaagaactccaaattttcggagaaagccaagctggacaaaccaattaaagcgaaagtggaactgacggagaacgataaacgtgtgctcgaaatctttagcgagtatgttacctggaatcgcgtcagtaacgtactgtcacatattggctcagtgaccgcaaaagattttgggcgtgttatgggtctgacgatgaaagacatcattaatgaagcagcacgcgaaggccatgatatgttgttcgctgataacccgtcggcggtgaagaaagagctgaccattctcatccagaacacgattcgttccaaatggcacgaagttctggag

SEQ ID NO: 154 - protein, 346 aa, synthetic construct
  REGION 1..346: note = variant of RNA ligase 2 from Klebsiella phage KP179
MHHHHHHGGSNMFAYYSSLENHYNNKFIEKIRGAGFDMHTVEWVAREKIHGTNFSVIITPTEIVPAKRTGPILEGESFFGHEIIMKKYKDSFVKVQNMLNAMDLVSVQIFGEFAGGGIQKGVDYGDKDFYVFDILSDSGNEKVYWDDYRVESFCTQLGLKLAPLLGRGSFAELSQYPNDFKSIVNRYNELVDTTGLEHANKHVFGPQASSETGVAEGYVLKPVYPIFFNNGTRVAIKCKNSKFSEKAKLDKPIKAKVELTENDKRVLEIFSEYVTWNRVSNVLSHIGSVTAKDFGRVMGLTMKDIINEAAREGHDMLFADNPSAVKKELTILIQNTIRSKWHEVLE

SEQ ID NO: 155 - DNA, 1038 bp, synthetic construct
  misc_feature 1..1038: note = variant of RNA ligase 2 from Klebsiella phage KP179
  source 1..1038: mol_type = other DNA
atgcatcaccatcaccatcacggtggcagcggtatgtttgcgtattattcaagtctggaaaaccattacaataataagttcattgagaagatccgtggtgcaggcttcgatatgcacaccgtggaatgggtagctcgcgagaagattcatggaacgaactttagcgttatcattactccgaccgaaatcgtcccagccaaacgcacagggccgatcttggaaggcgagtcgttctttggtcacgaaattatcatgaaaaaatataaagactccttcgtgaaggtgcagaacatgctgaatgccatggatcttgttagcgtgcaaatctttggcgaatttgcgggtggtggcattcagaaaggcgtcgattacggagacaaagatttctatgtgtttgacatcctgtctgatagcgggaacgagaaagtttactgggatgactatcgcgtcgaatcgttttgcaccacgctcggtctgaaattagcgcctctgctgggacgtggtagtttcgctgaactgtcccagtacccaaacgatttcaaaagcattgtgaaccgttataatgaattggttgatacgacgggcctggaacatgccaataaacacgtctttggtccgcaagcgtcttctgaaactggcgtagcagaaggctacgttcttaaacccgtctatccgatcttctttaataatggtacacgcgtggcgattaaatgcaagaactccaaattttcggagaaagccaagcgggacaaaccaattaaagcgaaagtggaactgacggagaacgataaacgtgtgctcgaaatctttagcgagtatgttacctggaatcgcgtcagtaacgtactgtcacatattggctcagtgaccgcaaaagattttgggcgtgttatgggtctgacgatgaaagacatcattaatgaagcagcacgcgaaggccatgatatgttgttcgctgataacccgtcggcggtgaagaaagagctgaccattctcatccagaacacgattcgttccaaatggcacgaagttctggag

SEQ ID NO: 156 - protein, 346 aa, synthetic construct
  REGION 1..346: note = variant of RNA ligase 2 from Klebsiella phage KP179
MHHHHHHGGSGMFAYYSSLENHYNNKFIEKIRGAGFDMHTVEWVAREKIHGTNFSVIITPTEIVPAKRTGPILEGESFFGHEIIMKKYKDSFVKVQNMLNAMDLVSVQIFGEFAGGGIQKGVDYGDKDFYVFDILSDSGNEKVYWDDYRVESFCTTLGLKLAPLLGRGSFAELSQYPNDFKSIVNRYNELVDTTGLEHANKHVFGPQASSETGVAEGYVLKPVYPIFFNNGTRVAIKCKNSKFSEKAKRDKPIKAKVELTENDKRVLEIFSEYVTWNRVSNVLSHIGSVTAKDFGRVMGLTMKDIINEAAREGHDMLFADNPSAVKKELTILIQNTIRSKWHEVLE

SEQ ID NO: 157 - DNA, 1038 bp, synthetic construct
  misc_feature 1..1038: note = variant of RNA ligase 2 from Klebsiella phage KP179
  source 1..1038: mol_type = other DNA
atgcatcaccatcaccatcacggtggcagcggtatgtttgcgtattattcaagtctggaaaaccattacaataataagttcattgagaagatccgtggtgcaggcttcgacatgcacaccgtggaatgggtagctcgcgagaagattcatggaacgaactttagcgttatcattactccgaccgaaatcgtcccagccaaacgcacagggccgatcttggaaggcgagtcgttctttggtcacgaaattatcatgaaaaaatataaagactccttcgtgaaggtgcagaacatgctgaatgccatggatcttgttagcgtgcaaatctttggcgaatttgcgggtggtggcattcagaaaggcgtcgattacggagacaaagatttctatgtgtttgacatcctgtctgatagcgggaacgagaaagtttactgggatgactatcgcgtcgaatcgttttgcaccacgctcggtctgaaattagcgcctctgctgggacgtggtagtttcgctgaactgtcccagtacccaaacgatttcaaaagcattgtgaaccgttataatgaattggttgatacgacgggcctggaacatgccaataaacacgtctttggtccgcaagcgtcttctgaaactggcgtagcagaaggctacgttcttaaacccgtctatccgatcttctttaataatggtacacgcgtggcgattaaatgcaagaactccaaattttcggagaaagccaagagcgacaaaccaattaaagcgaaagtggaactgacggagaacgataaacgtctgctcgaaatctttagcgagtatgttacctggaatcgcgtcagtaacgtactgtcacatattggctcagtgaccgcaaaagattttgggcgtgttatgggtctgacgatgaaagacatcattaatgaagcagcacgcgaaggccatgatctgttgttcgctgataacccgtcggcggtgaagaaagagctgcgcattctcatccgccacacgattcgttccaaatggcacgaagttctggag

SEQ ID NO: 158 - protein, 346 aa, synthetic construct
  REGION 1..346: note = variant of RNA ligase 2 from Klebsiella phage KP179
MHHHHHHGGSGMFAYYSSLENHYNNKFIEKIRGAGFDMHTVEWVAREKIHGTNFSVIITPTEIVPAKRTGPILEGESFFGHEIIMKKYKDSFVKVQNMLNAMDLVSVQIFGEFAGGGIQKGVDYGDKDFYVFDILSDSGNEKVYWDDYRVESFCTTLGLKLAPLLGRGSFAELSQYPNDFKSIVNRYNELVDTTGLEHANKHVFGPQASSETGVAEGYVLKPVYPIFFNNGTRVAIKCKNSKFSEKAKSDKPIKAKVELTENDKRLLEIFSEYVTWNRVSNVLSHIGSVTAKDFGRVMGLTMKDIINEAAREGHDLLFADNPSAVKKELRILIRHTIRSKWHEVLE

SEQ ID NO: 159 - DNA, 1038 bp, synthetic construct
  misc_feature 1..1038: note = variant of RNA ligase 2 from Klebsiella phage KP179
  source 1..1038: mol_type = other DNA
atgcatcaccatcaccatcacggtggcagcggtatgtttgcgtattattcaagtctggaaaaccattacaataataagttcattgagaagatccgtggtgcaggcttcgatatgcacaccgtggaatgggtagctcgcgagaagattcatggaacgaactttagcgttatcattactccgaccgaaatcgtcccagccaaacgcacagggccgatcttggaaggcgagtcgttctttggtcacgaaattatcatgaaaaaatataaagactccttcgtgaaggtgcagaacatgctgaatgccatggatcttgttagcgtgcaaatctttggcgaatttgcgggtggtggcattcagaaaggcgtcgattacggagacaaagatttctatgtgtttgacatcctgtctgatagcgggaacgagaaagtttactgggatgactatcgcgtcgaatcgttttgcaccacgctcggtctgaaattagcgcctctgctgggacgtggtagtttcgctgaactgtcccagtacccaaacgatttcaaaagcattgtgaaccgttataatgaattggttgatacgacgggcctggaacatgccaataaacacgtctttggtccgcaagcgtcttctgaaactggcgtagcagaaggctacgttcttaaacccgtctatccgatcttctttaataatggtacacgcgtggcgattaaatgcaagaactccaaattttcggagaaagccaagagcgacaaaccaattgttgcgaaagtggaactgacggagaacgataaacgtgtgctcgaaatctttagcgagtatgttacctggaatcgcgtcagtaacgtactgtcacatattggctcagtgaccgcaaaagattttgggcgtgttatgggtctgacgatgaaagacatcattaatgaagcagcacgcgaaggccatgatatgttgttcgctgataacccgtcggcggtgaagaaagagctgaccattctcatccagaacacgattcgttccaaatggcacgaagttctggag

SEQ ID NO: 160 - protein, 346 aa, synthetic construct
  REGION 1..346: note = variant of RNA ligase 2 from Klebsiella phage KP179
MHHHHHHGGSGMFAYYSSLENHYNNKFIEKIRGAGFDMHTVEWVAREKIHGTNFSVIITPTEIVPAKRTGPILEGESFFGHEIIMKKYKDSFVKVQNMLNAMDLVSVQIFGEFAGGGIQKGVDYGDKDFYVFDILSDSGNEKVYWDDYRVESFCTTLGLKLAPLLGRGSFAELSQYPNDFKSIVNRYNELVDTTGLEHANKHVFGPQASSETGVAEGYVLKPVYPIFFNNGTRVAIKCKNSKFSEKAKSDKPIVAKVELTENDKRVLEIFSEYVTWNRVSNVLSHIGSVTAKDFGRVMGLTMKDIINEAAREGHDMLFADNPSAVKKELTILIQNTIRSKWHEVLE

SEQ ID NO: 161 - DNA, 1038 bp, synthetic construct
  misc_feature 1..1038: note = variant of RNA ligase 2 from Klebsiella phage KP179
  source 1..1038: mol_type = other DNA
atgcatcaccatcaccatcacggtggcagcggtatgtttgcgtattattcaagtctggaaaaccattacaataataagttcattgagaagatccgtggtgcaggcttcgacatgcacaccgtggaatgggtagctcgcgagaagattcatggaacgaactttagcgttatcattactccgaccgaaatcgtcccagccaaacgcacagggccgatcttggaaggcgagtcgttctttggtcacgaaattatcatgaaaaaatataaagactccttcgtgaaggtgcagaacatgctgaatgccatggatcttgttagcgtgcaaatctttggcgaatttgcgggtggtggcattcagaaaggcgtcgattacggagacaaagatttctatgtgtttgacatcctgtctgatagcgggaacgagaaagtttactgggatgactatcgcgtcgaatcgttttgcacccaactcggtctgaaattagcgcctctgctgggacgtggtagtttcgctgaactgtcccagtacccaaacgatttcaaaagcattgtgaaccgttataatgaattggttgatacgacgggcctggaacatgccaataaacacgtctttggtccgcaagcgtcttctgaaactggcgtagcagaaggctacgttcttaaacccgtctatccgatcttctttaataatggtacgcgcgtggcgattaaatgcaagaactccaaattttcggagaaagccacgctggacaaaccaattaaagcgaaagtggaactgacggagaacgataaacgtgtgctcgaaatctttagcgagtatgttacctggaatcgcgtcagtaacgtactgtcacatattggctcagtgaccgcaaaagattttgggcgtgttatgggtctgacgatgaaagacatcattaatgaagcagcacgcgaaggccatgatctgttgttcgctgataacccgtcggcggtgaagaaagagctgacgattctcatccgcaacacgattcgttccaaatggcacgaagttctggag

SEQ ID NO: 162 - protein, 346 aa, synthetic construct
  REGION 1..346: note = variant of RNA ligase 2 from Klebsiella phage KP179
MHHHHHHGGSGMFAYYSSLENHYNNKFIEKIRGAGFDMHTVEWVAREKIHGTNFSVIITPTEIVPAKRTGPILEGESFFGHEIIMKKYKDSFVKVQNMLNAMDLVSVQIFGEFAGGGIQKGVDYGDKDFYVFDILSDSGNEKVYWDDYRVESFCTQLGLKLAPLLGRGSFAELSQYPNDFKSIVNRYNELVDTTGLEHANKHVFGPQASSETGVAEGYVLKPVYPIFFNNGTRVAIKCKNSKFSEKATLDKPIKAKVELTENDKRVLEIFSEYVTWNRVSNVLSHIGSVTAKDFGRVMGLTMKDIINEAAREGHDLLFADNPSAVKKELTILIRNTIRSKWHEVLE

SEQ ID NO: 163 - DNA, 1038 bp, synthetic construct
  misc_feature 1..1038: note = variant of RNA ligase 2 from Klebsiella phage KP179
  source 1..1038: mol_type = other DNA
atgcatcaccatcaccatcacggtggcagcggtatgtttgcgtattattcaagtctggaaaaccattacaataataagttcattgagaagatccgtgctgcaggcttcgatatgcacaccgtggaatgggtagctcgcgagaagattcatggaacgaactttagcgttatcattactccgaccgaaatcgtcccagccaaacgcacagggccgatcttggaaggcgagtcgttctttggtcacgaaattatcatgaaaaaatataaagactccttcgtgaaggtgcagaacatgctgaatgccatggatcttgttagcgtgcaaatctttggcgaatttgcgggtggtggcattcagaaaggcgtcgattacggagacaaagatttctatgtgtttgacatcctgtctgatagcgggaacgagaaagtttactgggatgactatcgcgtcgaatcgttttgcaccacgctcggtctgaaattagcgcctctgctgggacgtggtagtttcgctgaactgtcccagtacccaaacgatttcaaaagcattgtgaaccgttataatgaattggttgatacgacgggcctggaacatgccaataaacacgtctttggtccgcaagcgtcttctgaaactggcgtagcagaaggctacgttcttaaacccgtctatccgatcttctttaataatggtacacgcgtggcgattaaatgcaagaactccaaattttcggagaaagccaagagcgacaaaccaattaaagcgaaagtggaactgacggagaacgataaacgtgtgctcgaaatctttagcgagtatgttacctggaatcgcgtcagtaacgtactgtcacatattggctcagtgaccgcaaaagattttgggcgtgttatgggtctgacgatgaaagacatcattaatgaagcagcacgcgaaggccatgatatgttgttcgctgataacccgtcggcggtgaagaaagagctgaccattctcatccagaacacgattcgttccaaatggcacgaagttctggag

SEQ ID NO: 164 - protein, 346 aa, synthetic construct
  REGION 1..346: note = variant of RNA ligase 2 from Klebsiella phage KP179
MHHHHHHGGSGMFAYYSSLENHYNNKFIEKIRAAGFDMHTVEWVAREKIHGTNFSVIITPTEIVPAKRTGPILEGESFFGHEIIMKKYKDSFVKVQNMLNAMDLVSVQIFGEFAGGGIQKGVDYGDKDFYVFDILSDSGNEKVYWDDYRVESFCTTLGLKLAPLLGRGSFAELSQYPNDFKSIVNRYNELVDTTGLEHANKHVFGPQASSETGVAEGYVLKPVYPIFFNNGTRVAIKCKNSKFSEKAKSDKPIKAKVELTENDKRVLEIFSEYVTWNRVSNVLSHIGSVTAKDFGRVMGLTMKDIINEAAREGHDMLFADNPSAVKKELTILIQNTIRSKWHEVLE

SEQ ID NO: 165 - DNA, 1038 bp, synthetic construct
  misc_feature 1..1038: note = variant of RNA ligase 2 from Klebsiella phage KP179
  source 1..1038: mol_type = other DNA
atgcatcaccatcaccatcacggtggcagcggtatgtttgcgtattattcaagtctggaaaaccattacaataataagttcattgagaagatccgtggtgcaggcttcctgatgcacaccgtggaatgggtagctcgcgagaagattcatggaacgaactttagcgttatcattactccgaccgaaatcgtcccagccaaacgcacagggccgatcttggaaggcgagtcgttctttggtcacgaaattatcatgaaaaaatataaagactccttcgtgaaggtgcagaacatgctgaatgccatggatcttgttagcgtgcaaatctttggcgaatttgcgggtggtggcattcagaaaggcgtcgattacggagacaaagatttctatgtgtttgacatcctgtctgatagcgggaacgagaaagtttactgggatgactatcgcgtcgaatcgttttgcacccaactcggtctgaaattagcgcctctgctgggacgtggtagtttcgctgaactgtcccagtacccaaacgatttcaaaagcattgtgaaccgttataatgaattggttgatacgacgggcctggaacatgccaataaacacgtctttggtccgcaagcgtcttctgaaactggcgtagcagaaggctacgttcttaaacccgtctatccgatcttctttaataatggtacgcgcgtggcgattaaatgcaagaactccaaattttcggagaaagccacgcgtgacaaaccaattaaagcgaaagtggaactgacggagaacgataaacgtgtgctcgaaatctttagcgagtatgttacctggaatcgcgtcagtaacgtactgtcacatattggctcagtgaccgcaaaagattttgggcgtgttatgggtctgacgatgaaagacatcattaatgaagcagcacgcgaaggccatgatctgttgttcgctgataacccgtcggcggtgaagaaagagctgacgattctcatccagaacacgattcgttccaaatggcacgaagttctggag

SEQ ID NO: 166 - protein, 346 aa, synthetic construct
  REGION 1..346: note = variant of RNA ligase 2 from Klebsiella phage KP179
MHHHHHHGGSGMFAYYSSLENHYNNKFIEKIRGAGFLMHTVEWVAREKIHGTNFSVIITPTEIVPAKRTGPILEGESFFGHEIIMKKYKDSFVKVQNMLNAMDLVSVQIFGEFAGGGIQKGVDYGDKDFYVFDILSDSGNEKVYWDDYRVESFCTQLGLKLAPLLGRGSFAELSQYPNDFKSIVNRYNELVDTTGLEHANKHVFGPQASSETGVAEGYVLKPVYPIFFNNGTRVAIKCKNSKFSEKATRDKPIKAKVELTENDKRVLEIFSEYVTWNRVSNVLSHIGSVTAKDFGRVMGLTMKDIINEAAREGHDLLFADNPSAVKKELTILIQNTIRSKWHEVLE

SEQ ID NO: 167 - DNA, 1038 bp, synthetic construct
  misc_feature 1..1038: note = variant of RNA ligase 2 from Klebsiella phage KP179
  source 1..1038: mol_type = other DNA
atgcatcaccatcaccatcacggtggcagcggtatgtttgcgtattattcaagtctggaaaaccattacaataataagttcattgagaagatccgtggtgcaggcttcgacatgcacaccgtggaatgggtagctcgcgagaagattcatggaacgaactttagcgttatcattactccgaccgaaatcgtcccagccaaacgcacagggccgatcttggaaggcgagtcgttctttggtcacgaaattatcatgaaaaaatataaagactccttcgtgaaggtgcagaacatgctgaatgccatggatcttgttagcgtgcaaatctttggcgaatttgcgggtggtggcattcagaaaggcgtcgattacggagacaaagatttctatgtgtttgacatcctgtctgatagcgggaacgagaaagtttactgggatgactatcgcgtcgaatcgttttgcacccaactcggtctgaaattagcgccactgctgggacgtggtagtttcgctgaactgtcccagtacccaaacgatttcaaaagcattgtgaaccgttataatgaattggttgatacgacgggcctggaacatgccaataaacacgtctttggtccgcaagcgtcttctgaaactggcgtagcagaaggctacgttcttaaacccgtctatccgatcttctttaataatggtacacgcgtggcgattaaatgcaagaactccaaattttcggagaaagccaagagcgacaaaccaattaaagcgaaagtggaactgacggagaacgataaacgtctgctcgaaatctttagcgagtatgttacctggaatcgcgtcagtaacgtactgtcacatattggctcagtgaccgcaaaagattttgggcgtgttatgggtctgacgatgaaagacatcattaatgaagcagcacgcgaaggccatgatatgttgttcgctgataacccgtcggcggtgaagaaagagctgaccattctcatccagaacacgattcgttccaaatggcacgaagttctggag

SEQ ID NO: 168 - protein, 346 aa, synthetic construct
  REGION 1..346: note = variant of RNA ligase 2 from Klebsiella phage KP179
MHHHHHHGGSGMFAYYSSLENHYNNKFIEKIRGAGFDMHTVEWVAREKIHGTNFSVIITPTEIVPAKRTGPILEGESFFGHEIIMKKYKDSFVKVQNMLNAMDLVSVQIFGEFAGGGIQKGVDYGDKDFYVFDILSDSGNEKVYWDDYRVESFCTQLGLKLAPLLGRGSFAELSQYPNDFKSIVNRYNELVDTTGLEHANKHVFGPQASSETGVAEGYVLKPVYPIFFNNGTRVAIKCKNSKFSEKAKSDKPIKAKVELTENDKRLLEIFSEYVTWNRVSNVLSHIGSVTAKDFGRVMGLTMKDIINEAAREGHDMLFADNPSAVKKELTILIQNTIRSKWHEVLE

SEQ ID NO: 169 - DNA, 1038 bp, synthetic construct
  misc_feature 1..1038: note = variant of RNA ligase 2 from Klebsiella phage KP179
  source 1..1038: mol_type = other DNA
atgcatcaccatcaccatcacggtggcagcggtatgtttgcgtattattcaagtctggaaaaccattacaataataagttcattgagaagatccgtggtgcaggcttcgacatgcacaccgtggaatgggtagctcgcgagaagattcatggaacgaactttagcgttatcattactccgaccgaaatcgtcccagccaaacgcacagggccgatcttggaaggcgagtcgttctttggtcacgaaattatcatgaaaaaatataaagactccttcgtgaaggtgcagaacatgctgaatgccatggatcttgttagcgtgcaaatctttggcgaatttgcgggtggtggcattcagaaaggcgtcgattacggagacaaagatttctatgtgtttgacatcctgtctgatagcgggaacgagaaagtttactgggatgactatcgcgtcgaatcgttttgcaccacgctcggtctgaaattagcgcctctgctgggacgtggtagtttcgctgaactgtcccagtacccaaacgatttcaaaagcattgtgaaccgttataatgaattggttgatacgacgggcctggaacatgccaataaacacgtctttggtccgcaagcgtcttctgaaactggcgtagcagaaggctacgttcttaaacccgtctatccgatcttctttaataatggtacacgcgtggcgattaaatgcaagaactccaaattttcggagaaagccacgctggacaaaccaattaaagcgaaagtggaactgacggagaacgataaacgtgtgctcgaaatctttagcgagtatgttacctggaatcgcgtcagtaacgtactgtcacatattggctcagtgaccgcaaaagattttgggcgtgttatgggtctgacgatgaaagacatcattaatgaagcagcacgcgaaggccatgatatgttgttcgctgataacccgtcggcggtgaagaaagagctgaccattctcatccagaacacgattcgttccaaatggcacgaagttctggag

SEQ ID NO: 170 - protein, 346 aa, synthetic construct
  REGION 1..346: note = variant of RNA ligase 2 from Klebsiella phage KP179
MHHHHHHGGSGMFAYYSSLENHYNNKFIEKIRGAGFDMHTVEWVAREKIHGTNFSVIITPTEIVPAKRTGPILEGESFFGHEIIMKKYKDSFVKVQNMLNAMDLVSVQIFGEFAGGGIQKGVDYGDKDFYVFDILSDSGNEKVYWDDYRVESFCTTLGLKLAPLLGRGSFAELSQYPNDFKSIVNRYNELVDTTGLEHANKHVFGPQASSETGVAEGYVLKPVYPIFFNNGTRVAIKCKNSKFSEKATLDKPIKAKVELTENDKRVLEIFSEYVTWNRVSNVLSHIGSVTAKDFGRVMGLTMKDIINEAAREGHDMLFADNPSAVKKELTILIQNTIRSKWHEVLE

SEQ ID NO: 171 - DNA, 1038 bp, synthetic construct
  misc_feature 1..1038: note = variant of RNA ligase 2 from Klebsiella phage KP179
  source 1..1038: mol_type = other DNA
atgcatcaccatcaccatcacggtggcagcggtatgtttgcgtattattcaagtctggaaaaccattacaatatgaagttcattgagaagatccgtggtgcaggcttcgatatgcacaccgtggaatgggtagctcgcgagaagattcatggaacgaactttagcgttatcattactccgaccgaaatcgtcccagccaaacgcacagggccgatcttggaaggcgagtcgttctttggtcacgaaattatcatgaaaaaatataaagactccttcgtgaaggtgcagaacatgctgaatgccatggatcttgttagcgtgcaaatctttggcgaatttgcgggtggtggcattcagaaaggcgtcgattacggagacaaagatttctatgtgtttgacatcctgtctgatagcgggaacgagaaagtttactgggatgactatcgcgtcgaatcgttttgcaccacgctcggtctgaaattagcgcctctgctgggacgtggtagtttcgctgaactgtcccagtacccaaacgatttcaaaagcattgtgaaccgttataatgaattggttgatacgacgggcctggaacatgccaataaacacgtctttggtccgcaagcgtcttctgaaactggcgtagcagaaggctacgttcttaaacccgtctatccgatcttctttaataatggtacacgcgtggcgattaaatgcaagaactccaaattttcggagaaagccaagagcgacaaaccaattaaagcgaaagtggaactgacggagaacgataaacgtgtgctcgaaatctttagcgagtatgttacctggaatcgcgtcagtaacgtactgtcacatattggctcagtgaccgcaaaagattttgggcgtgttatgggtctgacgatgaaagacatcattaatgaagcagcacgcgaaggccatgatatgttgttcgctgataacccgtcggcggtgaagaaagagctgaccattctcatccagaacacgattcgttccaaatggcacgaagttctggag

SEQ ID NO: 172 - protein, 346 aa, synthetic construct
  REGION 1..346: note = variant of RNA ligase 2 from Klebsiella phage KP179
MHHHHHHGGSGMFAYYSSLENHYNMKFIEKIRGAGFDMHTVEWVAREKIHGTNFSVIITPTEIVPAKRTGPILEGESFFGHEIIMKKYKDSFVKVQNMLNAMDLVSVQIFGEFAGGGIQKGVDYGDKDFYVFDILSDSGNEKVYWDDYRVESFCTTLGLKLAPLLGRGSFAELSQYPNDFKSIVNRYNELVDTTGLEHANKHVFGPQASSETGVAEGYVLKPVYPIFFNNGTRVAIKCKNSKFSEKAKSDKPIKAKVELTENDKRVLEIFSEYVTWNRVSNVLSHIGSVTAKDFGRVMGLTMKDIINEAAREGHDMLFADNPSAVKKELTILIQNTIRSKWHEVLE

SEQ ID NO: 173 - DNA, 1038 bp, synthetic construct
  misc_feature 1..1038: note = variant of RNA ligase 2 from Klebsiella phage KP179
  source 1..1038: mol_type = other DNA
atgcatcaccatcaccatcacggtggcagcggtatgtttgcgtattattcaagtctggaaaaccattacaataataagttcattgagaagatccgtggtgcaggcttcgacatgcacaccgtggaatgggtagctcgcgagaagattcatggaacgaactttagcgttatcattactccgaccgaaatcgtcccagccaaacgcacagggccgatcttggaaggcgagtcgttctttggtcacgaaattatcatgaaaaaatataaagactccttcgtgaaggtgcagaacatgctgaatgccatggatcttgttagcgtgcaaatctttggcgaatttgcgggtggtggcattcagaaaggcgtcgattacggagacaaagatttctatgtgtttgacatcctgtctgatagcgggaacgagaaagtttactgggatgactatcgcgtcgaatcgttttgcacccaactcggtctgaaattagcgcctctgctgggacgtggtagtttcgctgaactgtcccagtacccaaacgatttcaaaagcattgtgaaccgttataatgaattggttgatacgacgggcctggaacatgccaataaacacgtctttggtccgcaagcgtcttctgaaactggcgtagcagaaggctacgttcttaaacccgtctatccgatcttctttaataatggtacacgcgtggcgattaaatgcaagaactccaaattttcggagaaagccaagcgtgacaaaccaattaaagcgaaagtggaactgacggagaacgataaacgtgtgctcgaaatctttagcgagtatgttacctggaatcgcgtcagtaacgtactgtcacatattggctcagtgaccgcaaaagattttgggcgtgttatgggtctgacgatgaaagacatcattaatgaagcagcacgcgaaggccatgatctgttgttcgctgataacccgtcggcggtgaagaaagagctgcgcattctcatccagcacacgattcgttccaaatggcacgaagttctggag

SEQ ID NO: 174 - protein, 346 aa, synthetic construct
  REGION 1..346: note = variant of RNA ligase 2 from Klebsiella phage KP179
MHHHHHHGGSGMFAYYSSLENHYNNKFIEKIRGAGFDMHTVEWVAREKIHGTNFSVIITPTEIVPAKRTGPILEGESFFGHEIIMKKYKDSFVKVQNMLNAMDLVSVQIFGEFAGGGIQKGVDYGDKDFYVFDILSDSGNEKVYWDDYRVESFCTQLGLKLAPLLGRGSFAELSQYPNDFKSIVNRYNELVDTTGLEHANKHVFGPQASSETGVAEGYVLKPVYPIFFNNGTRVAIKCKNSKFSEKAKRDKPIKAKVELTENDKRVLEIFSEYVTWNRVSNVLSHIGSVTAKDFGRVMGLTMKDIINEAAREGHDLLFADNPSAVKKELRILIQHTIRSKWHEVLE

SEQ ID NO: 175 - DNA, 1038 bp, synthetic construct
  misc_feature 1..1038: note = variant of RNA ligase 2 from Klebsiella phage KP179
  source 1..1038: mol_type = other DNA
atgcatcaccatcaccatcacggtggcagcggtatgtttgcgtattattcaagtctggaaaaccattacaataataagttcattgagaagatccgtggtgcaggcttcgatatgcacaccgtggaatgggtagctcgcgagaagattcatggaacgaactttagcgttatcattactccgaccgaaatcgtcccagccaaacgcacagggccgatcttggaaggcgagtcgttctttggtcacgaaattatcatgaaaaaatataaagactccttcgtgaaggtgcagaacatgctgaatgccatggatcttgttagcgtgcaaatctttggcgaatttgcgggtggtggcattcagaaaggcgtcgattacggagacaaagatttctatgtgtttgacatcctgtctgatagcgggaacgagaaagtttactgggatgactatcgcgtcgaatcgttttgcaccacgctcggtctgaaattagcgcctctgctgggacgtggtagtttcgctgaactgtcccagtacccaaacgatttcaaaagcattgtgaaccgttataatgaattggttgatacgacgggcctggaacatgccaataaacacgtctttggtccgcaagcgtcttctgaaactggcgtagcagaaggctttgttcttaaacccgtctatccgatcttctttaataatggtacacgcgtggcgattaaatgcaagaactccaaattttcggagaaagccaagagcgacaaaccaattaaagcgaaagtggaactgacggagaacgataaacgtgtgctcgaaatctttagcgagtatgttacctggaatcgcgtcagtaacgtactgtcacatattggctcagtgaccgcaaaagattttgggcgtgttatgggtctgacgatgaaagacatcattaatgaagcagcacgcgaaggccatgatatgttgttcgctgataacccgtcggcggtgaagaaagagctgaccattctcatccagaacacgattcgttccaaatggcacgaagttctggag

SEQ ID NO: 176 - protein, 346 aa, synthetic construct
  REGION 1..346: note = variant of RNA ligase 2 from Klebsiella phage KP179
MHHHHHHGGSGMFAYYSSLENHYNNKFIEKIRGAGFDMHTVEWVAREKIHGTNFSVIITPTEIVPAKRTGPILEGESFFGHEIIMKKYKDSFVKVQNMLNAMDLVSVQIFGEFAGGGIQKGVDYGDKDFYVFDILSDSGNEKVYWDDYRVESFCTTLGLKLAPLLGRGSFAELSQYPNDFKSIVNRYNELVDTTGLEHANKHVFGPQASSETGVAEGFVLKPVYPIFFNNGTRVAIKCKNSKFSEKAKSDKPIKAKVELTENDKRVLEIFSEYVTWNRVSNVLSHIGSVTAKDFGRVMGLTMKDIINEAAREGHDMLFADNPSAVKKELTILIQNTIRSKWHEVLE

SEQ ID NO: 177 - DNA, 1038 bp, synthetic construct
  misc_feature 1..1038: note = variant of RNA ligase 2 from Klebsiella phage KP179
  source 1..1038: mol_type = other DNA
atgcatcaccatcaccatcacggtggcagcggtgtttttgcgtattattcaagtctggaaaaccattacaataataagttcattgagaagatccgtggtgcaggcttcgatatgcacaccgtggaatgggtagctcgcgagaagattcatggaacgaactttagcgttatcattactccgaccgaaatcgtcccagccaaacgcacagggccgatcttggaaggcgagtcgttctttggtcacgaaattatcatgaaaaaatataaagactccttcgtgaaggtgcagaacatgctgaatgccatggatcttgttagcgtgcaaatctttggcgaatttgcgggtggtggcattcagaaaggcgtcgattacggagacaaagatttctatgtgtttgacatcctgtctgatagcgggaacgagaaagtttactgggatgactatcgcgtcgaatcgttttgcaccacgctcggtctgaaattagcgcctctgctgggacgtggtagtttcgctgaactgtcccagtacccaaacgatttcaaaagcattgtgaaccgttataatgaattggttgatacgacgggcctggaacatgccaataaacacgtctttggtccgcaagcgtcttctgaaactggcgtagcagaaggctacgttcttaaacccgtctatccgatcttctttaataatggtacacgcgtggcgattaaatgcaagaactccaaattttcggagaaagccaagagcgacaaaccaattaaagcgaaagtggaactgacggagaacgataaacgtgtgctcgaaatctttagcgagtatgttacctggaatcgcgtcagtaacgtactgtcacatattggctcagtgaccgcaaaagattttgggcgtgttatgggtctgacgatgaaagacatcattaatgaagcagcacgcgaaggccatgatatgttgttcgctgataacccgtcggcggtgaagaaagagctgaccattctcatccagaacacgattcgttccaaatggcacgaagttctggag

SEQ ID NO: 178 - protein, 346 aa, synthetic construct
  REGION 1..346: note = variant of RNA ligase 2 from Klebsiella phage KP179
MHHHHHHGGSGVFAYYSSLENHYNNKFIEKIRGAGFDMHTVEWVAREKIHGTNFSVIITPTEIVPAKRTGPILEGESFFGHEIIMKKYKDSFVKVQNMLNAMDLVSVQIFGEFAGGGIQKGVDYGDKDFYVFDILSDSGNEKVYWDDYRVESFCTTLGLKLAPLLGRGSFAELSQYPNDFKSIVNRYNELVDTTGLEHANKHVFGPQASSETGVAEGYVLKPVYPIFFNNGTRVAIKCKNSKFSEKAKSDKPIKAKVELTENDKRVLEIFSEYVTWNRVSNVLSHIGSVTAKDFGRVMGLTMKDIINEAAREGHDMLFADNPSAVKKELTILIQNTIRSKWHEVLE

SEQ ID NO: 179 - DNA, 1038 bp, synthetic construct
  misc_feature 1..1038: note = variant of RNA ligase 2 from Klebsiella phage KP179
  source 1..1038: mol_type = other DNA
atgcatcaccatcaccatcacggtggcagcggtacgtttgcgtattattcaagtctggaaaaccattacaataataagttcattgagaagatccgtggtgcaggcttcgatatgcacaccgtggaatgggtagctcgcgagaagattcatggaacgaactttagcgttatcattactccgaccgaaatcgtcccagccaaacgcacagggccgatcttggaaggcgagtcgttctttggtcacgaaattatcatgaaaaaatataaagactccttcgtgaaggtgcagaacatgctgaatgccatggatcttgttagcgtgcaaatctttggcgaatttgcgggtggtggcattcagaaaggcgtcgattacggagacaaagatttctatgtgtttgacatcctgtctgatagcgggaacgagaaagtttactgggatgactatcgcgtcgaatcgttttgcaccacgctcggtctgaaattagcgcctctgctgggacgtggtagtttcgctgaactgtcccagtacccaaacgatttcaaaagcattgtgaaccgttataatgaattggttgatacgacgggcctggaacatgccaataaacacgtctttggtccgcaagcgtcttctgaaactggcgtagcagaaggctacgttcttaaacccgtctatccgatcttctttaataatggtacacgcgtggcgattaaatgcaagaactccaaattttcggagaaagccaagagcgacaaaccaattaaagcgaaagtggaactgacggagaacgataaacgtgtgctcgaaatctttagcgagtatgttacctggaatcgcgtcagtaacgtactgtcacatattggctcagtgaccgcaaaagattttgggcgtgttatgggtctgacgatgaaagacatcattaatgaagcagcacgcgaaggccatgatatgttgttcgctgataacccgtcggcggtgaagaaagagctgaccattctcatccagaacacgattcgttccaaatggcacgaagttctggag

SEQ ID NO: 180 - protein, 346 aa, synthetic construct
  REGION 1..346: note = variant of RNA ligase 2 from Klebsiella phage KP179
MHHHHHHGGSGTFAYYSSLENHYNNKFIEKIRGAGFDMHTVEWVAREKIHGTNFSVIITPTEIVPAKRTGPILEGESFFGHEIIMKKYKDSFVKVQNMLNAMDLVSVQIFGEFAGGGIQKGVDYGDKDFYVFDILSDSGNEKVYWDDYRVESFCTTLGLKLAPLLGRGSFAELSQYPNDFKSIVNRYNELVDTTGLEHANKHVFGPQASSETGVAEGYVLKPVYPIFFNNGTRVAIKCKNSKFSEKAKSDKPIKAKVELTENDKRVLEIFSEYVTWNRVSNVLSHIGSVTAKDFGRVMGLTMKDIINEAAREGHDMLFADNPSAVKKELTILIQNTIRSKWHEVLE

SEQ ID NO: 181 - DNA, 1038 bp, synthetic construct
  misc_feature 1..1038: note = variant of RNA ligase 2 from Klebsiella phage KP179
  source 1..1038: mol_type = other DNA
atgcatcaccatcaccatcacggtggcagcggtatgtttgcgtattattcaagtctggaaaaccattacaataataagttcattgagaagatccgtggtgcaggcttcctgatgcacaccgtggaatgggtagctcgcgagaagattcatggaacgaactttagcgttatcattactccgaccgaaatcgtcccagccaaacgcacagggccgatcttggaaggcgagtcgttctttggtcacgaaattatcatgaaaaaatataaagactccttcgtgaaggtgcagaacatgctgaatgccatggatcttgttagcgtgcaaatctttggcgaatttgcgggtggtggcattcagaaaggcgtcgattacggagacaaagatttctatgtgtttgacatcctgtctgatagcgggaacgagaaagtttactgggatgactatcgcgtcgaatcgttttgcacccaactcggtctgaaattagcgcctctgctgggacgtggtagtttcgctgaactgtcccagtacccaaacgatttcaaaagcattgtgaaccgttataatgaattggttgatacgacgggcctggaacatgccaataaacacgtctttggtccgcaagcgtcttctgaaactggcgtagcagaaggctacgttcttaaacccgtctatccgatcttctttaataatggtacacgcgtggcgattaaatgcaagaactccaaattttcggagaaagccacgctggacaaaccaattaaagcgaaagtggaactgacggagaacgataaacgtctgctcgaaatctttagcgagtatgttacctggaatcgcgtcagtaacgtactgtcacatattggctcagtgaccgcaaaagattttgggcgtgttatgggtctgacgatgaaagacatcattaatgaagcagcacgcgaaggccatgatatgttgttcgctgataacccgtcggcggtgaagaaagagctgaccattctcatccagaacacgattcgttccaaatggcacgaagttctggag

SEQ ID NO: 182 - protein, 346 aa, synthetic construct
  REGION 1..346: note = variant of RNA ligase 2 from Klebsiella phage KP179
MHHHHHHGGSGMFAYYSSLENHYNNKFIEKIRGAGFLMHTVEWVAREKIHGTNFSVIITPTEIVPAKRTGPILEGESFFGHEIIMKKYKDSFVKVQNMLNAMDLVSVQIFGEFAGGGIQKGVDYGDKDFYVFDILSDSGNEKVYWDDYRVESFCTQLGLKLAPLLGRGSFAELSQYPNDFKSIVNRYNELVDTTGLEHANKHVFGPQASSETGVAEGYVLKPVYPIFFNNGTRVAIKCKNSKFSEKATLDKPIKAKVELTENDKRLLEIFSEYVTWNRVSNVLSHIGSVTAKDFGRVMGLTMKDIINEAAREGHDMLFADNPSAVKKELTILIQNTIRSKWHEVLE

SEQ ID NO: 183 - DNA, 1038 bp, synthetic construct
  misc_feature 1..1038: note = variant of RNA ligase 2 from Klebsiella phage KP179
  source 1..1038: mol_type = other DNA
atgcatcaccatcaccatcacggtggcagcggtctgtttgcgtattattcaagtctggaaaaccattacaataataagttcattgagaagatccgtggtgcaggcttcgatatgcacaccgtggaatgggtagctcgcgagaagattcatggaacgaactttagcgttatcattactccgaccgaaatcgtcccagccaaacgcacagggccgatcttggaaggcgagtcgttctttggtcacgaaattatcatgaaaaaatataaagactccttcgtgaaggtgcagaacatgctgaatgccatggatcttgttagcgtgcaaatctttggcgaatttgcgggtggtggcattcagaaaggcgtcgattacggagacaaagatttctatgtgtttgacatcctgtctgatagcgggaacgagaaagtttactgggatgactatcgcgtcgaatcgttttgcaccacgctcggtctgaaattagcgcctctgctgggacgtggtagtttcgctgaactgtcccagtacccaaacgatttcaaaagcattgtgaaccgttataatgaattggttgatacgacgggcctggaacatgccaataaacacgtctttggtccgcaagcgtcttctgaaactggcgtagcagaaggctacgttcttaaacccgtctatccgatcttctttaataatggtacacgcgtggcgattaaatgcaagaactccaaattttcggagaaagccaagagcgacaaaccaattaaagcgaaagtggaactgacggagaacgataaacgtgtgctcgaaatctttagcgagtatgttacctggaatcgcgtcagtaacgtactgtcacatattggctcagtgaccgcaaaagattttgggcgtgttatgggtctgacgatgaaagacatcattaatgaagcagcacgcgaaggccatgatatgttgttcgctgataacccgtcggcggtgaagaaagagctgaccattctcatccagaacacgattcgttccaaatggcacgaagttctggag

SEQ ID NO: 184 - protein, 346 aa, synthetic construct
  REGION 1..346: note = variant of RNA ligase 2 from Klebsiella phage KP179
MHHHHHHGGSGLFAYYSSLENHYNNKFIEKIRGAGFDMHTVEWVAREKIHGTNFSVIITPTEIVPAKRTGPILEGESFFGHEIIMKKYKDSFVKVQNMLNAMDLVSVQIFGEFAGGGIQKGVDYGDKDFYVFDILSDSGNEKVYWDDYRVESFCTTLGLKLAPLLGRGSFAELSQYPNDFKSIVNRYNELVDTTGLEHANKHVFGPQASSETGVAEGYVLKPVYPIFFNNGTRVAIKCKNSKFSEKAKSDKPIKAKVELTENDKRVLEIFSEYVTWNRVSNVLSHIGSVTAKDFGRVMGLTMKDIINEAAREGHDMLFADNPSAVKKELTILIQNTIRSKWHEVLE

SEQ ID NO: 185 - DNA, 1038 bp, synthetic construct
  misc_feature 1..1038: note = variant of RNA ligase 2 from Klebsiella phage KP179
  source 1..1038: mol_type = other DNA
atgcatcaccatcaccatcacggtggcagcaacatgtttgcgtattattcaagtctggaaaaccattacaataataagttcattgagaagatccgtggtgcaggcttcctgatgcacaccgtggaatgggtagctcgcgagaagattcatggaacgaactttagcgttatcattactccgaccgaaatcgtcccagccaaacgcacagggccgatcttggaaggcgagtcgttctttggtcacgaaattatcatgaaaaaatataaagactccttcgtgaaggtgcagaacatgctgaatgccatggatcttgttagcgtgcaaatctttggcgaatttgcgggtggtggcattcagaaaggcgtcgattacggagacaaagatttctatgtgtttgacatcctgtctgatagcgggaacgagaaagtttactgggatgactatcgcgtcgaatcgttttgcacccaactcggtctgaaattagcgcctctgctgggacgtggtagtttcgctgaactgtcccagtacccaaacgatttcaaaagcattgtgaaccgttataatgaattggttgatacgacgggcctggaacatgccaataaacacgtctttggtccgcaagcgtcttctgaaactggcgtagcagaaggctacgttcttaaacccgtctatccgatcttctttaataatggtacacgcgtggcgattaaatgcaagaactccaaattttcggagaaagccacgctggacaaaccaattaaagcgaaagtggaactgacggagaacgataaacgtgtgctcgaaatctttagcgagtatgttacctggaatcgcgtcagtaacgtactgtcacatattggctcagtgaccgcaaaagattttgggcgtgttatgggtctgacgatgaaagacatcattaatgaagcagcacgcgaaggccatgatctgttgttcgctgataacccgtcggcggtgaagaaagagctgaccattctcatccagaacacgattcgttccaaatggcacgaagttctggag

SEQ ID NO: 186 - protein, 346 aa, synthetic construct
  REGION 1..346: note = variant of RNA ligase 2 from Klebsiella phage KP179
MHHHHHHGGSNMFAYYSSLENHYNNKFIEKIRGAGFLMHTVEWVAREKIHGTNFSVIITPTEIVPAKRTGPILEGESFFGHEIIMKKYKDSFVKVQNMLNAMDLVSVQIFGEFAGGGIQKGVDYGDKDFYVFDILSDSGNEKVYWDDYRVESFCTQLGLKLAPLLGRGSFAELSQYPNDFKSIVNRYNELVDTTGLEHANKHVFGPQASSETGVAEGYVLKPVYPIFFNNGTRVAIKCKNSKFSEKATLDKPIKAKVELTENDKRVLEIFSEYVTWNRVSNVLSHIGSVTAKDFGRVMGLTMKDIINEAAREGHDLLFADNPSAVKKELTILIQNTIRSKWHEVLE

SEQ ID NO: 187 - DNA, 1038 bp, synthetic construct
  misc_feature 1..1038: note = variant of RNA ligase 2 from Klebsiella phage KP179
  source 1..1038: mol_type = other DNA
atgcatcaccatcaccatcacggtggcagcggtatgtttgcgtattattcaagtctggaaaaccattacaataataagttcattgagaagatccgtggtgcaggcttcctgatgcacaccgtggaatgggtagctcgcgagaagattcatggaacgaactttagcgttatcattactccgaccgaaatcgtcccagccaaacgcacagggccgatcttggaaggcgagtcgttctttggtcacgaaattatcatgaaaaaatataaagactccttcgtgaaggtgcagaacatgctgaatgccatggatcttgttagcgtgcaaatctttggcgaatttgcgggtggtggcattcagaaaggcgtcgattacggagacaaagatttctatgtgtttgacatcctgtctgatagcgggaacgagaaagtttactgggatgactatcgcgtcgaatcgttttgcacccaactcggtctgaaattagcgcctctgctgggacgtggtagtttcgctgaactgtcccagtacccaaacgatttcaaaagcattgtgaaccgttataatgaattggttgatacgacgggcctggaacatgccaataaacacgtctttggtccgcaagcgtcttctgaaactggcgtagcagaaggctacgttcttaaacccgtctatccgatcttctttaataatggtacacgcgtggcgattaaatgcaagaactccaaattttcggagaaagccaagagtgacaaaccaattaaagcgaaagtggaactgacggagaacgataaacgtgtgctcgaaatctttagcgagtatgttacctggaatcgcgtcagtaacgtactgtcacatattggctcagtgaccgcaaaagattttgggcgtgttatgggtctgacgatgaaagacatcattaatgaagcagcacgcgaaggccatgatctgttgttcgctgataacccgtcggcggtgaagaaagagctgcgcattctcatccagaacacgattcgttccaaatggcacgaagttctggag

SEQ ID NO: 188 - protein, 346 aa, synthetic construct
  REGION 1..346: note = variant of RNA ligase 2 from Klebsiella phage KP179
MHHHHHHGGSGMFAYYSSLENHYNNKFIEKIRGAGFLMHTVEWVAREKIHGTNFSVIITPTEIVPAKRTGPILEGESFFGHEIIMKKYKDSFVKVQNMLNAMDLVSVQIFGEFAGGGIQKGVDYGDKDFYVFDILSDSGNEKVYWDDYRVESFCTQLGLKLAPLLGRGSFAELSQYPNDFKSIVNRYNELVDTTGLEHANKHVFGPQASSETGVAEGYVLKPVYPIFFNNGTRVAIKCKNSKFSEKAKSDKPIKAKVELTENDKRVLEIFSEYVTWNRVSNVLSHIGSVTAKDFGRVMGLTMKDIINEAAREGHDLLFADNPSAVKKELRILIQNTIRSKWHEVLE

SEQ ID NO: 189 - DNA, 1038 bp, synthetic construct
  misc_feature 1..1038: note = variant of RNA ligase 2 from Klebsiella phage KP179
  source 1..1038: mol_type = other DNA
atgcatcaccatcaccatcacggtggcagcaacatgtttgcgtattattcaagtctggaaaaccattacaataataagttcattgagaagatccgtggtgcaggcttcctgatgcacaccgtggaatgggtagctcgcgagaagattcatggaacgaactttagcgttatcattactccgaccgaaatcgtcccagccaaacgcacagggccgatcttggaaggcgagtcgttctttggtcacgaaattatcatgaaaaaatataaagactccttcgtgaaggtgcagaacatgctgaatgccatggatcttgttagcgtgcaaatctttggcgaatttgcgggtggtggcattcagaaaggcgtcgattacggagacaaagatttctatgtgtttgacatcctgtctgatagcgggaacgagaaagtttactgggatgactatcgcgtcgaatcgttttgcaccacgctcggtctgaaattagcgcctctgctgggacgtggtagtttcgctgaactgtcccagtacccaaacgatttcaaaagcattgtgaaccgttataatgaattggttgatacgacgggcctggaacatgccaataaacacgtctttggtccgcaagcgtcttctgaaactggcgtagcagaaggctacgttcttaaacccgtctatccgatcttctttaataatggtacacgcgtggcgattaaatgcaagaactccaaattttcggagaaagccacgcgtgacaaaccaattaaagcgaaagtggaactgacggagaacgataaacgtgtgctcgaaatctttagcgagtatgttacctggaatcgcgtcagtaacgtactgtcacatattggctcagtgaccgcaaaagattttgggcgtgttatgggtctgacgatgaaagacatcattaatgaagcagcacgcgaaggccatgatctgttgttcgctgataacccgtcggcggtgaagaaagagctgcgcattctcatccagaacacgattcgttccaaatggcacgaagttctggag

SEQ ID NO: 190 - protein, 346 aa, synthetic construct
  REGION 1..346: note = variant of RNA ligase 2 from Klebsiella phage KP179
MHHHHHHGGSNMFAYYSSLENHYNNKFIEKIRGAGFLMHTVEWVAREKIHGTNFSVIITPTEIVPAKRTGPILEGESFFGHEIIMKKYKDSFVKVQNMLNAMDLVSVQIFGEFAGGGIQKGVDYGDKDFYVFDILSDSGNEKVYWDDYRVESFCTTLGLKLAPLLGRGSFAELSQYPNDFKSIVNRYNELVDTTGLEHANKHVFGPQASSETGVAEGYVLKPVYPIFFNNGTRVAIKCKNSKFSEKATRDKPIKAKVELTENDKRVLEIFSEYVTWNRVSNVLSHIGSVTAKDFGRVMGLTMKDIINEAAREGHDLLFADNPSAVKKELRILIQNTIRSKWHEVLE

SEQ ID NO: 191 - DNA, 1038 bp, synthetic construct
  misc_feature 1..1038: note = variant of RNA ligase 2 from Klebsiella phage KP179
  source 1..1038: mol_type = other DNA
atgcatcaccatcaccatcacggtggcagcaacatgtttgcgtattattcaagtctggaaaaccattacaataataagttcattgagaagatccgtggtgcaggcttcctgatgcacaccgtggaatgggtagctcgcgagaagattcatggaacgaactttagcgttatcattactccgaccgaaatcgtcccagccaaacgcacagggccgatcttggaaggcgagtcgttctttggtcacgaaattatcatgaaaaaatataaagactccttcgtgaaggtgcagaacatgctgaatgccatggatcttgttagcgtgcaaatctttggcgaatttgcgggtggtggcattcagaaaggcgtcgattacggagacaaagatttctatgtgtttgacatcctgtctgatagcgggaacgagaaagtttactgggatgactatcgcgtcgaatcgttttgcaccacgctcggtctgaaattagcgcctctgctgggacgtggtagtttcgctgaactgtcccagtacccaaacgatttcaaaagcattgtgaaccgttataatgaattggttgatacgacgggcctggaacatgccaataaacacgtctttggtccgcaagcgtcttctgaaactggcgtagcagaaggctacgttcttaaacccgtctatccgatcttctttaataatggtacgcgcgtggcgattaaatgcaagaactccaaattttcggagaaagccacgctggacaaaccaattaaagcgaaagtggaactgacggagaacgataaacgtgtgctcgaaatctttagcgagtatgttacctggaatcgcgtcagtaacgtactgtcacatattggctcagtgaccgcaaaagattttgggcgtgttatgggtctgacgatgaaagacatcattaatgaagcagcacgcgaaggccatgatatgttgttcgctgataacccgtcggcggtgaagaaagagctgaccattctcatccagaacacgattcgttccaaatggcacgaagttctggag

SEQ ID NO: 192 - protein, 346 aa, synthetic construct
  REGION 1..346: note = variant of RNA ligase 2 from Klebsiella phage KP179
MHHHHHHGGSNMFAYYSSLENHYNNKFIEKIRGAGFLMHTVEWVAREKIHGTNFSVIITPTEIVPAKRTGPILEGESFFGHEIIMKKYKDSFVKVQNMLNAMDLVSVQIFGEFAGGGIQKGVDYGDKDFYVFDILSDSGNEKVYWDDYRVESFCTTLGLKLAPLLGRGSFAELSQYPNDFKSIVNRYNELVDTTGLEHANKHVFGPQASSETGVAEGYVLKPVYPIFFNNGTRVAIKCKNSKFSEKATLDKPIKAKVELTENDKRVLEIFSEYVTWNRVSNVLSHIGSVTAKDFGRVMGLTMKDIINEAAREGHDMLFADNPSAVKKELTILIQNTIRSKWHEVLE

SEQ ID NO: 193 - DNA, 1038 bp, synthetic construct
  misc_feature 1..1038: note = variant of RNA ligase 2 from Klebsiella phage KP179
  source 1..1038: mol_type = other DNA
atgcatcaccatcaccatcacggtggcagcggtatgtttgcgtattattcaagtctggaaaaccattacaataataagttcattgagaagatccgtggtgcaggcttcgacatgcacaccgtggaatgggtagctcgcgagaagattcatggaacgaactttagcgttatcattactccgaccgaaatcgtcccagccaaacgcacagggccgatcttggaaggcgagtcgttctttggtcacgaaattatcatgaaaaaatataaagactccttcgtgaaggtgcagaacatgctgaatgccatggatcttgttagcgtgcaaatctttggcgaatttgcgggtggtggcattcagaaaggcgtcgattacggagacaaagatttctatgtgtttgacatcctgtctgatagcgggaacgagaaagtttactgggatgactatcgcgtcgaatcgttttgcaccacgctcggtctgaaattagcgcctctgctgggacgtggtagtttcgctgaactgtcccagtacccaaacgatttcaaaagcattgtgaaccgttataatgaattggttgatacgacgggcctggaacatgccaataaacacgtctttggtccgcaagcgtcttctgaaactggcgtagcagaaggctacgttcttaaacccgtctatccgatcttctttaataatggtacgcgcgtggcgattaaatgcaagaactccaaattttcggagaaagccaagcgtgacaaaccaattaaagcgaaagtggaactgacggagaacgataaacgtgtgctcgaaatctttagcgagtatgttacctggaatcgcgtcagtaacgtactgtcacatattggctcagtgaccgcaaaagattttgggcgtgttatgggtctgacgatgaaagacatcattaatgaagcagcacgcgaaggccatgatatgttgttcgctgataacccgtcggcggtgaagaaagagctgcgcattctcatccagcacacgattcgttccaaatggcacgaagttctggag

SEQ ID NO: 194 - protein, 346 aa, synthetic construct
  REGION 1..346: note = variant of RNA ligase 2 from Klebsiella phage KP179
MHHHHHHGGSGMFAYYSSLENHYNNKFIEKIRGAGFDMHTVEWVAREKIHGTNFSVIITPTEIVPAKRTGPILEGESFFGHEIIMKKYKDSFVKVQNMLNAMDLVSVQIFGEFAGGGIQKGVDYGDKDFYVFDILSDSGNEKVYWDDYRVESFCTTLGLKLAPLLGRGSFAELSQYPNDFKSIVNRYNELVDTTGLEHANKHVFGPQASSETGVAEGYVLKPVYPIFFNNGTRVAIKCKNSKFSEKAKRDKPIKAKVELTENDKRVLEIFSEYVTWNRVSNVLSHIGSVTAKDFGRVMGLTMKDIINEAAREGHDMLFADNPSAVKKELRILIQHTIRSKWHEVLE

SEQ ID NO: 195 - DNA, 1038 bp, synthetic construct
  misc_feature 1..1038: note = variant of RNA ligase 2 from Klebsiella phage KP179
  source 1..1038: mol_type = other DNA
atgcatcaccatcaccatcacggtggcagcaacatgtttgcgtattattcaagtctggaaaaccattacaataataagttcattgagaagatccgtggtgcaggcttcctgatgcacaccgtggaatgggtagctcgcgagaagattcatggaacgaactttagcgttatcattactccgaccgaaatcgtcccagccaaacgcacagggccgatcttggaaggcgagtcgttctttggtcacgaaattatcatgaaaaaatataaagactccttcgtgaaggtgcagaacatgctgaatgccatggatcttgttagcgtgcaaatctttggcgaatttgcgggtggtggcattcagaaaggcgtcgattacggagacaaagatttctatgtgtttgacatcctgtctgatagcgggaacgagaaagtttactgggatgactatcgcgtcgaatcgttttgcacccaactcggtctgaaattagcgcctctgctgggacgtggtagtttcgctgaactgtcccagtacccaaacgatttcaaaagcattgtgaaccgttataatgaattggttgatacgacgggcctggaacatgccaataaacacgtctttggtccgcaagcgtcttctgaaactggcgtagcagaaggctacgttcttaaacccgtctatccgatcttctttaataatggtacgcgcgtggcgattaaatgcaagaactccaaattttcggagaaagccaagagtgacaaaccaattaaagcgaaagtggaactgacggagaacgataaacgtgtgctcgaaatctttagcgagtatgttacctggaatcgcgtcagtaacgtactgtcacatattggctcagtgaccgcaaaagattttgggcgtgttatgggtctgacgatgaaagacatcattaatgaagcagcacgcgaaggccatgatatgttgttcgctgataacccgtcggcggtgaagaaagagctgcgcattctcatccgcaacacgattcgttccaaatggcacgaagttctggag

SEQ ID NO: 196 - protein, 346 aa, synthetic construct
  REGION 1..346: note = variant of RNA ligase 2 from Klebsiella phage KP179
MHHHHHHGGSNMFAYYSSLENHYNNKFIEKIRGAGFLMHTVEWVAREKIHGTNFSVIITPTEIVPAKRTGPILEGESFFGHEIIMKKYKDSFVKVQNMLNAMDLVSVQIFGEFAGGGIQKGVDYGDKDFYVFDILSDSGNEKVYWDDYRVESFCTQLGLKLAPLLGRGSFAELSQYPNDFKSIVNRYNELVDTTGLEHANKHVFGPQASSETGVAEGYVLKPVYPIFFNNGTRVAIKCKNSKFSEKAKSDKPIKAKVELTENDKRVLEIFSEYVTWNRVSNVLSHIGSVTAKDFGRVMGLTMKDIINEAAREGHDMLFADNPSAVKKELRILIRNTIRSKWHEVLE

SEQ ID NO: 197 - DNA, 1038 bp, synthetic construct
  misc_feature 1..1038: note = variant of RNA ligase 2 from Klebsiella phage KP179
  source 1..1038: mol_type = other DNA
atgcatcaccatcaccatcacggtggcagcggtatgtttgcgtattattcaagtctggaaaaccattacaatctgaagttcattgagaagatccgtggtgcaggcttcgatatgcacaccgtggaatgggtagctcgcgagaagattcatggaacgaactttagcgttatcattactccgaccgaaatcgtcccagccaaacgcacagggccgatcttggaaggcgagtcgttctttggtcacgaaattatcatgaaaaaatataaagactccttcgtgaaggtgcagaacatgctgaatgccatggatcttgttagcgtgcaaatctttggcgaatttgcgggtggtggcattcagaaaggcgtcgattacggagacaaagatttctatgtgtttgacatcctgtctgatagcgggaacgagaaagtttactgggatgactatcgcgtcgaatcgttttgcaccacgctcggtctgaaattagcgcctctgctgggacgtggtagtttcgctgaactgtcccagtacccaaacgatttcaaaagcattgtgaaccgttataatgaattggttgatacgacgggcctggaacatgccaataaacacgtctttggtccgcaagcgtcttctgaaactggcgtagcagaaggctacgttcttaaacccgtctatccgatcttctttaataatggtacacgcgtggcgattaaatgcaagaactccaaattttcggagaaagccaagagcgacaaaccaattaaagcgaaagtggaactgacggagaacgataaacgtgtgctcgaaatctttagcgagtatgttacctggaatcgcgtcagtaacgtactgtcacatattggctcagtgaccgcaaaagattttgggcgtgttatgggtctgacgatgaaagacatcattaatgaagcagcacgcgaaggccatgatatgttgttcgctgataacccgtcggcggtgaagaaagagctgaccattctcatccagaacacgattcgttccaaatggcacgaagttctggag

SEQ ID NO: 198 - protein, 346 aa, synthetic construct
  REGION 1..346: note = variant of RNA ligase 2 from Klebsiella phage KP179
MHHHHHHGGSGMFAYYSSLENHYNLKFIEKIRGAGFDMHTVEWVAREKIHGTNFSVIITPTEIVPAKRTGPILEGESFFGHEIIMKKYKDSFVKVQNMLNAMDLVSVQIFGEFAGGGIQKGVDYGDKDFYVFDILSDSGNEKVYWDDYRVESFCTTLGLKLAPLLGRGSFAELSQYPNDFKSIVNRYNELVDTTGLEHANKHVFGPQASSETGVAEGYVLKPVYPIFFNNGTRVAIKCKNSKFSEKAKSDKPIKAKVELTENDKRVLEIFSEYVTWNRVSNVLSHIGSVTAKDFGRVMGLTMKDIINEAAREGHDMLFADNPSAVKKELTILIQNTIRSKWHEVLE

SEQ ID NO: 199 - DNA, 1038 bp, synthetic construct
  misc_feature 1..1038: note = variant of RNA ligase 2 from Klebsiella phage KP179
  source 1..1038: mol_type = other DNA
atgcatcaccatcaccatcacggtggcagcggtatgtttgcgtattattcaagtctggaaaaccattacaataataagttcattgagaagatccgtggtgcaggcttcgatcggcacaccgtggaatgggtagctcgcgagaagattcatggaacgaactttagcgttatcattactccgaccgaaatcgtcccagccaaacgcacagggccgatcttggaaggcgagtcgttctttggtcacgaaattatcatgaaaaaatataaagactccttcgtgaaggtgcagaacatgctgaatgccatggatcttgttagcgtgcaaatctttggcgaatttgcgggtggtggcattcagaaaggcgtcgattacggagacaaagatttctatgtgtttgacatcctgtctgatagcgggaacgagaaagtttactgggatgactatcgcgtcgaatcgttttgcaccacgctcggtctgaaattagcgcctctgctgggacgtggtagtttcgctgaactgtcccagtacccaaacgatttcaaaagcatcgtgaaccgttataatgaattggttgatacgacgggcctggaacatgccaataaacacgtctttggtccgcaagcgtcttctgaaactggcgtagcagaaggctacgttcttaaacccgtctatccgatcttctttaataatggtacacgcgtggcgattaaatgcaagaactccaaattttcggagaaagccaagagcgacaaaccaattaaagcgaaagtggaactgacggagaacgataaacgtgtgctcgaaatctttagcgagtatgttacctggaatcgcgtcagtaacgtactgtcacatattggctcagtgaccgcaaaagattttgggcgtgttatgggtctgacgatgaaagacatcattaatgaagcagcacgcgaaggccatgatatgttgttcgctgataacccgtcggcggtgaagaaagagctgaccattctcatccagaacacgattcgttccaaatggcacgaagttctggag

SEQ ID NO: 200 - protein, 346 aa, synthetic construct
  REGION 1..346: note = variant of RNA ligase 2 from Klebsiella phage KP179
MHHHHHHGGSGMFAYYSSLENHYNNKFIEKIRGAGFDRHTVEWVAREKIHGTNFSVIITPTEIVPAKRTGPILEGESFFGHEIIMKKYKDSFVKVQNMLNAMDLVSVQIFGEFAGGGIQKGVDYGDKDFYVFDILSDSGNEKVYWDDYRVESFCTTLGLKLAPLLGRGSFAELSQYPNDFKSIVNRYNELVDTTGLEHANKHVFGPQASSETGVAEGYVLKPVYPIFFNNGTRVAIKCKNSKFSEKAKSDKPIKAKVELTENDKRVLEIFSEYVTWNRVSNVLSHIGSVTAKDFGRVMGLTMKDIINEAAREGHDMLFADNPSAVKKELTILIQNTIRSKWHEVLE

SEQ ID NO: 201 - DNA, 1038 bp, synthetic construct
  misc_feature 1..1038: note = variant of RNA ligase 2 from Klebsiella phage KP179
  source 1..1038: mol_type = other DNA
atgcatcaccatcaccatcacggtggcagcggtatgtttgcgtattattcaagtctggaaaaccattacaataataagttcattgagaagatccgtggtgcaggcttcgatatgcacgatgtggaatgggtagctcgcgagaagattcatggaacgaactttagcgttatcattactccgaccgaaatcgtcccagccaaacgcacagggccgatcttggaaggcgagtcgttctttggtcacgaaattatcatgaaaaaatataaagactccttcgtgaaggtgcagaacatgctgaatgccatggatcttgttagcgtgcaaatctttggcgaatttgcgggtggtggcattcagaaaggcgtcgattacggagacaaagatttctatgtgtttgacatcctgtctgatagcgggaacgagaaagtttactgggatgactatcgcgtcgaatcgttttgcaccacgctcggtctgaaattagcgcctctgctgggacgtggtagtttcgctgaactgtcccagtacccaaacgatttcaaaagcattgtgaaccgttataatgaattggttgatacgacgggcctggaacatgccaataaacacgtctttggtccgcaagcgtcttctgaaactggcgtagcagaaggctacgttcttaaacccgtctatccgatcttctttaataatggtacacgcgtggcgattaaatgcaagaactccaaattttcggagaaagccaagagcgacaaaccaattaaagcgaaagtggaactgacggagaacgataaacgtgtgctcgaaatctttagcgagtatgttacctggaatcgcgtcagtaacgtactgtcacatattggctcagtgaccgcaaaagattttgggcgtgttatgggtctgacgatgaaagacatcattaatgaagcagcacgcgaaggccatgatatgttgttcgctgataacccgtcggcggtgaagaaagagctgaccattctcatccagaacacgattcgttccaaatggcacgaagttctggag

SEQ ID NO: 202 - protein, 346 aa, synthetic construct
  REGION 1..346: note = variant of RNA ligase 2 from Klebsiella phage KP179
MHHHHHHGGSGMFAYYSSLENHYNNKFIEKIRGAGFDMHDVEWVAREKIHGTNFSVIITPTEIVPAKRTGPILEGESFFGHEIIMKKYKDSFVKVQNMLNAMDLVSVQIFGEFAGGGIQKGVDYGDKDFYVFDILSDSGNEKVYWDDYRVESFCTTLGLKLAPLLGRGSFAELSQYPNDFKSIVNRYNELVDTTGLEHANKHVFGPQASSETGVAEGYVLKPVYPIFFNNGTRVAIKCKNSKFSEKAKSDKPIKAKVELTENDKRVLEIFSEYVTWNRVSNVLSHIGSVTAKDFGRVMGLTMKDIINEAAREGHDMLFADNPSAVKKELTILIQNTIRSKWHEVLE

SEQ ID NO: 203 - DNA, 1038 bp, synthetic construct
  misc_feature 1..1038: note = variant of RNA ligase 2 from Klebsiella phage KP179
  source 1..1038: mol_type = other DNA
atgcatcaccatcaccatcacggtggcagcggtatgtttgcgtattattcaagtctggaaaaccattacaataataagttcattgagaagatccgtggtgcaggcttcgacatgcacaccgtggaatgggtagctcgcgagaagattcatggaacgaactttagcgttatcattactccgaccgaaatcgtcccagccaaacgcacagggccgatcttggaaggcgagtcgttctttggtcacgaaattatcatgaaaaaatataaagactccttcgtgaaggtgcagaacatgctgaatgccatggatcttgttagcgtgcaaatctttggcgaatttgcgggtggtggcattcagaaaggcgtcgattacggagacaaagatttctatgtgtttgacatcctgtctgatagcgggaacgagaaagtttactgggatgactatcgcgtcgaatcgttttgcaccacgctcggtctgaaattagcgcctctgctgggacgtggtagtttcgctgaactgtcccagtacccaaacgatttcaaaagcattgtgaaccgttataatgaattggttgatacgacgggcctggaacatgccaataaacacgtctttggtccgcaagcgtcttctgaaactggcgtagcagaaggctacgttcttaaacccgtctatccgatcttctttaataatggtacacgcgtggcgattaaatgcaagaactccaaattttcggagaaagccacgcgtgacaaaccaattaaagcgaaagtggaactgacggagaacgataaacgtgtgctcgaaatctttagcgagtatgttacctggaatcgcgtcagtaacgtactgtcacatattggctcagtgaccgcaaaagattttgggcgtgttatgggtctgacgatgaaagacatcattaatgaagcagcacgcgaaggccatgatatgttgttcgctgataacccgtcggcggtgaagaaagagctgaccattctcatccagaacacgattcgttccaaatggcacgaagttctggag

SEQ ID NO: 204 - protein, 346 aa, synthetic construct
  REGION 1..346: note = variant of RNA ligase 2 from Klebsiella phage KP179
MHHHHHHGGSGMFAYYSSLENHYNNKFIEKIRGAGFDMHTVEWVAREKIHGTNFSVIITPTEIVPAKRTGPILEGESFFGHEIIMKKYKDSFVKVQNMLNAMDLVSVQIFGEFAGGGIQKGVDYGDKDFYVFDILSDSGNEKVYWDDYRVESFCTTLGLKLAPLLGRGSFAELSQYPNDFKSIVNRYNELVDTTGLEHANKHVFGPQASSETGVAEGYVLKPVYPIFFNNGTRVAIKCKNSKFSEKATRDKPIKAKVELTENDKRVLEIFSEYVTWNRVSNVLSHIGSVTAKDFGRVMGLTMKDIINEAAREGHDMLFADNPSAVKKELTILIQNTIRSKWHEVLE

SEQ ID NO: 205 - DNA, 1038 bp, synthetic construct
  misc_feature 1..1038: note = variant of RNA ligase 2 from Klebsiella phage KP179
  source 1..1038: mol_type = other DNA
atgcatcaccatcaccatcacggtggcagcaacatgtttgcgtattattcaagtctggaaaaccattacaataataagttcattgagaagatccgtggtgcaggcttcctgatgcacaccgtggaatgggtagctcgcgagaagattcatggaacgaactttagcgttatcattactccgaccgaaatcgtcccagccaaacgcacagggccgatcttggaaggcgagtcgttctttggtcacgaaattatcatgaaaaaatataaagactccttcgtgaaggtgcagaacatgctgaatgccatggatcttgttagcgtgcaaatctttggcgaatttgcgggtggtggcattcagaaaggcgtcgattacggagacaaagatttctatgtgtttgacatcctgtctgatagcgggaacgagaaagtttactgggatgactttcgcgtcgaatcgttttgcaccacgctcggtctgaaattagcgcctctgctgggacgtggtagtttcgctgaactgtcccagtacccaaacgatttcaaaagcattgtgaaccgttataatgaattggttgatacgacgggcctggaacatgccaataaacacgtctttggtccgcaagcgtcttctgaaactggcgtagcagaaggctacgttcttaaacccgtctatccgatcttctttaataatggtacgcgcgtggcgattaaatgcaagaactccaaattttcggagaaagccaagctggacaaaccaattaaagcgaaagtggaactgacggagaacgataaacgtgtgctcgaaatctttagcgagtatgttacctggaatcgcgtcagtaacgtactgtcacatattggctcagtgaccgcaaaagattttgggcgtgttatgggtctgacgatgaaagacatcattaatgaagcagcacgcgaaggccatgatctgttgttcgctgataacccgtcggcggtgaagaaagagctgaccattctcatccagaacacgattcgttccaaatggcacgaagttctggag

SEQ ID NO: 206 - protein, 346 aa, synthetic construct
  REGION 1..346: note = variant of RNA ligase 2 from Klebsiella phage KP179
MHHHHHHGGSNMFAYYSSLENHYNNKFIEKIRGAGFLMHTVEWVAREKIHGTNFSVIITPTEIVPAKRTGPILEGESFFGHEIIMKKYKDSFVKVQNMLNAMDLVSVQIFGEFAGGGIQKGVDYGDKDFYVFDILSDSGNEKVYWDDFRVESFCTTLGLKLAPLLGRGSFAELSQYPNDFKSIVNRYNELVDTTGLEHANKHVFGPQASSETGVAEGYVLKPVYPIFFNNGTRVAIKCKNSKFSEKAKLDKPIKAKVELTENDKRVLEIFSEYVTWNRVSNVLSHIGSVTAKDFGRVMGLTMKDIINEAAREGHDLLFADNPSAVKKELTILIQNTIRSKWHEVLE

SEQ ID NO: 207 - DNA, 1038 bp, synthetic construct
  misc_feature 1..1038: note = variant of RNA ligase 2 from Klebsiella phage KP179
  source 1..1038: mol_type = other DNA
atgcatcaccatcaccatcacggtggcagcggtatgtttgcgtattattcaagtctggaaaaccattacaataataagttcattgagaagatccgtggtgcaggcttcgatatgcacaccgtggaatgggtagctcgcgagaagattcatggaacgaactttagcgttatcattactccgaccgaaatcgtcccagccaaacgcacagggccgatcttggaaggcgagtcgttctttggtcacgaagttatcatgaaaaaatataaagactccttcgtgaaggtgcagaacatgctgaatgccatggatcttgttagcgtgcaaatctttggcgaatttgcgggtggtggcattcagaaaggcgtcgattacggagacaaagatttctatgtgtttgacatcctgtctgatagcgggaacgagaaagtttactgggatgactatcgcgtcgaatcgttttgcaccacgctcggtctgaaattagcgcctctgctgggacgtggtagtttcgctgaactgtcccagtacccaaacgatttcaaaagcattgtgaaccgttataatgaattggttgatacgacgggcctggaacatgccaataaacacgtctttggtccgcaagcgtcttctgaaactggcgtagcagaaggctacgttcttaaacccgtctatccgatcttctttaataatggtacacgcgtggcgattaaatgcaagaactccaaattttcggagaaagccaagagcgacaaaccaattaaagcgaaagtggaactgacggagaacgataaacgtgtgctcgaaatctttagcgagtatgttacctggaatcgcgtcagtaacgtactgtcacatattggctcagtgaccgcaaaagattttgggcgtgttatgggtctgacgatgaaagacatcattaatgaagcagcacgcgaaggccatgatatgttgttcgctgataacccgtcggcggtgaagaaagagctgaccattctcatccagaacacgattcgttccaaatggcacgaagttctggag

SEQ ID NO: 208 - protein, 346 aa, synthetic construct
  REGION 1..346: note = variant of RNA ligase 2 from Klebsiella phage KP179
MHHHHHHGGSGMFAYYSSLENHYNNKFIEKIRGAGFDMHTVEWVAREKIHGTNFSVIITPTEIVPAKRTGPILEGESFFGHEVIMKKYKDSFVKVQNMLNAMDLVSVQIFGEFAGGGIQKGVDYGDKDFYVFDILSDSGNEKVYWDDYRVESFCTTLGLKLAPLLGRGSFAELSQYPNDFKSIVNRYNELVDTTGLEHANKHVFGPQASSETGVAEGYVLKPVYPIFFNNGTRVAIKCKNSKFSEKAKSDKPIKAKVELTENDKRVLEIFSEYVTWNRVSNVLSHIGSVTAKDFGRVMGLTMKDIINEAAREGHDMLFADNPSAVKKELTILIQNTIRSKWHEVLE

SEQ ID NO: 209 - DNA, 1038 bp, synthetic construct
  misc_feature 1..1038: note = variant of RNA ligase 2 from Klebsiella phage KP179
  source 1..1038: mol_type = other DNA
atgcatcaccatcaccatcacggtggcagcggtatgtttgcgtattattcaagtctggaaaaccattacaataataagttcattgagaagatccgtggtgcaggcttcgatatgcacaccgtggaatgggtagctcgcgagaagattcatggaacgaactttagcgttatcattactccgaccgaaatcgtcccagccaaacgcacagggccgatcttggaaggcgagtcgttctttggtcacgaaattatcatgaaaaaatataaagactccttcgtgaaggtgcagaacatgctgaatgccatggatcttgttagcgtgcaaatctttggcgaatttgcgggtggtggcattcagaaaggcgtcgattacggagacaaagatttctatgtgtttgacatcctgtctgatagcgggaacgagaaagtttactgggatgactatcgcgtcgaatcgttttgcaccacgctcggtctgaaattagcgcctctgctgggacgtggtagtttcgctgaactgtcccagtacccaaacgatttcaaaagcattgtgaaccgttataatgaattggttgatacgacgggcctggaacatgccaataaacacgtctttggtccgcaagcgtcttctgaaactggcgtagcagaaggctacgttcttaaacccgtctatccgatcttctttaataatggtacacgcgtggcgattaaatgcaagaactccaaattttcggagaaagccaagagcgacaaaccaattaaagcgaaagtggaactgacggagaacgataaacgtgtgctcgaaatctttagcgagtatgttacctggaatcgcgtcagtaacgtactgtcacatattggctcagtgaccgcaaaagattttgggcgtgttatgggtctgacgatgaaagacatcattaatgaagcagcacgcgaaggccatgatatgttgttcgctgataacccggaagcggtgaagaaagagctgaccattctcatccagaacacgattcgttccaaatggcacgaagttctggag

SEQ ID NO: 210 - protein, 346 aa, synthetic construct
  REGION 1..346: note = variant of RNA ligase 2 from Klebsiella phage KP179
MHHHHHHGGSGMFAYYSSLENHYNNKFIEKIRGAGFDMHTVEWVAREKIHGTNFSVIITPTEIVPAKRTGPILEGESFFGHEIIMKKYKDSFVKVQNMLNAMDLVSVQIFGEFAGGGIQKGVDYGDKDFYVFDILSDSGNEKVYWDDYRVESFCTTLGLKLAPLLGRGSFAELSQYPNDFKSIVNRYNELVDTTGLEHANKHVFGPQASSETGVAEGYVLKPVYPIFFNNGTRVAIKCKNSKFSEKAKSDKPIKAKVELTENDKRVLEIFSEYVTWNRVSNVLSHIGSVTAKDFGRVMGLTMKDIINEAAREGHDMLFADNPEAVKKELTILIQNTIRSKWHEVLE

SEQ ID NO: 211 - DNA, 1038 bp, synthetic construct
  misc_feature 1..1038: note = variant of RNA ligase 2 from Klebsiella phage KP179
  source 1..1038: mol_type = other DNA
atgcatcaccatcaccatcacggtggcagcggtatgtttgcgtattattcaagtctggaaaaccattacaataataagttcattgagaagatccgtggtgcaggcttcgatatgcacaccgtggaatgggtagctcgcgagaagattcatggaacgaactttagcgttatcattactccgaccgaaatcgtcccagccaaacgcacagggccgatcttggaaggcgagtcgttctttggtcacgaaattatcatgaaaaaatataaagactccttcgtgaaggtgcagaacatgctgaatgccatggatcttgttagcgtgcaaatctttggcgaatttgcgggtggtggcattcagaaaggcgtcgattacggagacaaagatttctatgtgtttgacatcctgtctgatagcgggaacgagaaagtttactgggatgactatcgcgtcgaatcgttttgcaccacgctcggtctgaaattagcgcctctgctgggacgtggtagtttcgctgaactgtcccagtacccaaacgatttcaaaagcattgtgaaccgttataatgaattggttgatcagacgggcctggaacatgccaataaacacgtctttggtccgcaagcgtcttctgaaactggcgtagcagaaggctacgttcttaaacccgtctatccgatcttctttaataatggtacacgcgtggcgattaaatgcaagaactccaaattttcggagaaagccaagagcgacaaaccaattaaagcgaaagtggaactgacggagaacgataaacgtgtgctcgaaatctttagcgagtatgttacctggaatcgcgtcagtaacgtactgtcacatattggctcagtgaccgcaaaagattttgggcgtgttatgggtctgacgatgaaagacatcattaatgaagcagcacgcgaaggccatgatatgttgttcgctgataacccgtcggcggtgaagaaagagctgaccattctcatccagaacacgattcgttccaaatggcacgaagttctggag

SEQ ID NO: 212 - protein, 346 aa, synthetic construct
  REGION 1..346: note = variant of RNA ligase 2 from Klebsiella phage KP179
MHHHHHHGGSGMFAYYSSLENHYNNKFIEKIRGAGFDMHTVEWVAREKIHGTNFSVIITPTEIVPAKRTGPILEGESFFGHEIIMKKYKDSFVKVQNMLNAMDLVSVQIFGEFAGGGIQKGVDYGDKDFYVFDILSDSGNEKVYWDDYRVESFCTTLGLKLAPLLGRGSFAELSQYPNDFKSIVNRYNELVDQTGLEHANKHVFGPQASSETGVAEGYVLKPVYPIFFNNGTRVAIKCKNSKFSEKAKSDKPIKAKVELTENDKRVLEIFSEYVTWNRVSNVLSHIGSVTAKDFGRVMGLTMKDIINEAAREGHDMLFADNPSAVKKELTILIQNTIRSKWHEVLE

SEQ ID NO: 213 - DNA, 1038 bp, synthetic construct
  misc_feature 1..1038: note = variant of RNA ligase 2 from Klebsiella phage KP179
  source 1..1038: mol_type = other DNA
atgcatcaccatcaccatcacggtggcagcggtatgtttgcgtattattcaagtctggaaaaccattacaataataagttcattgagaagatccgtggtgcaggcttcgatatgcacaccgtggaatgggtagctcgcgagaagattcatggaacgaactttagcgttatcattactccgaccgaaatcgtcccagccaaacgcacagggccgatcttggaaggcgagtcgttctttggtcacgaaattatcatgaaaaaatataaagactccttcgtgaaggtgcagaacatgctgaatgccatggatcttgttagcgtgcaaatctttggcgaatttgcgggtggtggcattcagaaaggcgtcgattacggagacaaagatttctatgtgtttgacatcctgtctgatagcgggaacgagaaagtttactgggatgactatcgcgtcgaatcgttttgcaccacgctcggtctgaaattagcgcctctgctgggacgtggtagtttcgctgaactgtcccagtacccaaacgatttcaaaagcattgtgaaccgttataatgaattggttgatacgacgggcctggaacatgccaataaacacgtctttggtccgcaagcgtcttctgaaactggcgtagcagaaggctacgttcttaaacccgtctatccgatcttctttaataatggtacgcgcgtggcgattaaatgcaagaactccaaattttcggagaaagccaagagcgacaaaccaattaaagcgaaagtggaactgacggagaacgataaacgtgtgctcgaaatctttagcgagtatgttacctggaatcgcgtcagtaacgtactgtcacatattggctcagtgaccgcaaaagattttgggcgtgttatgggtctgacgatgaaagacatcattaatgaagcagcacgcgaaggccatgatatgttgttcgctgataacccgtcggcggtgaagaaagagctgacgattctcatccagcacacgattcgttccaaatggcacgaagttctggag

SEQ ID NO: 214 - protein, 346 aa, synthetic construct
  REGION 1..346: note = variant of RNA ligase 2 from Klebsiella phage KP179
MHHHHHHGGSGMFAYYSSLENHYNNKFIEKIRGAGFDMHTVEWVAREKIHGTNFSVIITPTEIVPAKRTGPILEGESFFGHEIIMKKYKDSFVKVQNMLNAMDLVSVQIFGEFAGGGIQKGVDYGDKDFYVFDILSDSGNEKVYWDDYRVESFCTTLGLKLAPLLGRGSFAELSQYPNDFKSIVNRYNELVDTTGLEHANKHVFGPQASSETGVAEGYVLKPVYPIFFNNGTRVAIKCKNSKFSEKAKSDKPIKAKVELTENDKRVLEIFSEYVTWNRVSNVLSHIGSVTAKDFGRVMGLTMKDIINEAAREGHDMLFADNPSAVKKELTILIQHTIRSKWHEVLE

SEQ ID NO: 215 - DNA, 1038 bp, synthetic construct
  misc_feature 1..1038: note = variant of RNA ligase 2 from Klebsiella phage KP179
  source 1..1038: mol_type = other DNA
atgcatcaccatcaccatcacggtggcagcggtatgtttgcgtattattcaagtctggaaaaccattacaataataagttcattgagaagatccgtggtgcaggcttcgatatgcacaccgtggaatgggtagctcgcgagaagattcatggaacgaactttagcgttatcattactccgaccgaaatcgtcccagccaaacgcacagggccgatcttggaaggcgagtcgttctttggtcacgaaattatcatgaaaaaatataaagactccttcgtgaaggtgcagaacatgctgaatgccatggatcttgttagcgtgcaaatctttggcgaatttgcgggtggtggcattcagaaaggcgtcgattacggagacaaagatttctatgtgtttgacatcctgtctgatagcgggaacgagaaagtttactgggatgactatcgcgtcgaatcgttttgcaccacgctcggtctgaaattagcgcctctgctgggacgtggtagtttcgctgaactgtcccagtacccaaacgatttcaaaagcattgtgaaccgttataatgaattggttgatacgacgggcctggaacatgccaataaacacgtctttggtccgcaagcgtcttctgaaactggcgtagcagaaggctacgttcttaaacccgtctatccgatcttctttaataatggtacacgcgtggcgattaaatgcaagaactccaaattttcggagaaagccaagagcgacaaaccaattaaagcgaaaggggaactgacggagaacgataaacgtgtgctcgaaatctttagcgagtatgttacctggaatcgcgtcagtaacgtactgtcacatattggctcagtgaccgcaaaagattttgggcgtgttatgggtctgacgatgaaagacatcattaatgaagcagcacgcgaaggccatgatatgttgttcgctgataacccgtcggcggtgaagaaagagctgaccattctcatccagaacacgattcgttccaaatggcacgaagttctggag

SEQ ID NO: 216 - protein, 346 aa, synthetic construct
  REGION 1..346: note = variant of RNA ligase 2 from Klebsiella phage KP179
MHHHHHHGGSGMFAYYSSLENHYNNKFIEKIRGAGFDMHTVEWVAREKIHGTNFSVIITPTEIVPAKRTGPILEGESFFGHEIIMKKYKDSFVKVQNMLNAMDLVSVQIFGEFAGGGIQKGVDYGDKDFYVFDILSDSGNEKVYWDDYRVESFCTTLGLKLAPLLGRGSFAELSQYPNDFKSIVNRYNELVDTTGLEHANKHVFGPQASSETGVAEGYVLKPVYPIFFNNGTRVAIKCKNSKFSEKAKSDKPIKAKGELTENDKRVLEIFSEYVTWNRVSNVLSHIGSVTAKDFGRVMGLTMKDIINEAAREGHDMLFADNPSAVKKELTILIQNTIRSKWHEVLE

SEQ ID NO: 217 - DNA, 1038 bp, synthetic construct
  misc_feature 1..1038: note = variant of RNA ligase 2 from Klebsiella phage KP179
  source 1..1038: mol_type = other DNA
atgcatcaccatcaccatcacggtggcagcggtatgtttgcgtattattcaagtctggaaaaccattacaataataagttcattgagaagatccgtggtgcaggcttcgatatgcacaccgtggaatgggtagctcgcgagaagattcatggaacgaactttagcgttatcattactccgaccgaaatcgtcccagccaaacgcacagggccgatcttggaaggcgagtcgttctttggtcacgaaattatcatgaaaaaatataaagactccttcgtgaaggtgcagaacatgctgaatgccatggatcttgttagcgtgcaaatctttggcgaatttgcgggtggtggcattcagaaaggcgtcgattacggagacaaagatttctatgtgtttgacatcctgtctgatagcgggaacgagaaagtttactgggatgactatcgcgtcgaatcgttttgcaccacgctcggtctgaaattagcgcctctgctgggacgtggtagtttcgctgaactgtcccagtacccaaacgatttcaaaagcattgtgaaccgttataatgaattggttgatacgacgggcctggaacatgccaataaacacgtctttggtccgcaagcgtcttctgaaactggcgtagcagaaggctacgttcttaaacccgtctatccgatcttctttaataatggtacacgcgtggcgattaaatgcaagaactccaaattttcggagaaagctaagagcgacaaaccaattaaagcgaaagtggttctgacggagaacgataaacgtgtgctcgaaatctttagcgagtatgttacctggaatcgcgtcagtaacgtactgtcacatattggctcagtgaccgcaaaagattttgggcgtgttatgggtctgacgatgaaagacatcattaatgaagcagcacgcgaaggccatgatatgttgttcgctgataacccgtcggcggtgaagaaagagctgaccattctcatccagaacacgattcgttccaaatggcacgaagttctggag

SEQ ID NO: 218 - protein, 346 aa, synthetic construct
  REGION 1..346: note = variant of RNA ligase 2 from Klebsiella phage KP179
MHHHHHHGGSGMFAYYSSLENHYNNKFIEKIRGAGFDMHTVEWVAREKIHGTNFSVIITPTEIVPAKRTGPILEGESFFGHEIIMKKYKDSFVKVQNMLNAMDLVSVQIFGEFAGGGIQKGVDYGDKDFYVFDILSDSGNEKVYWDDYRVESFCTTLGLKLAPLLGRGSFAELSQYPNDFKSIVNRYNELVDTTGLEHANKHVFGPQASSETGVAEGYVLKPVYPIFFNNGTRVAIKCKNSKFSEKAKSDKPIKAKVVLTENDKRVLEIFSEYVTWNRVSNVLSHIGSVTAKDFGRVMGLTMKDIINEAAREGHDMLFADNPSAVKKELTILIQNTIRSKWHEVLE

SEQ ID NO: 219 - DNA, 1038 bp, synthetic construct
  misc_feature 1..1038: note = variant of RNA ligase 2 from Klebsiella phage KP179
  source 1..1038: mol_type = other DNA
atgcatcaccatcaccatcacggtggcagcaacatgtttgcgtattattcaagtctggaaaaccattacaataataagttcattgagaagatccgtggtgcaggcttcctgatgcacaccgtggaatgggtagctcgcgagaagattcatggaacgaactttagcgttatcattactccgaccgaaatcgtcccagccaaacgcacagggccgatcttggaaggcgagtcgttctttggtcacgaaattatcatgaaaaaatataaagactccttcgtgaaggtgcagaacatgctgaatgccatggatcttgttagcgtgcaaatctttggcgaatttgcgggtggtggcattcagaaaggcgtcgattacggagacaaagatttctatgtgtttgacatcctgtctgatagcgggaacgagaaagtttactgggatgactatcgcgtcgaatcgttttgcacccagctcggtctgaaattagcgcctctgctgggacgtggtagtttcgctgaactgtcccagtacccaaacgatttcaaaagcattgtgaaccgttataatgaattggttgatacgacgggcctggaacatgccaataaacacgtctttggtccgcaagcgtcttctgaaactggcgtagcagaaggctacgttcttaaacccgtctatccgatcttctttaataatggtgggcgcgtggcgattaaatgcaagaactccaaattttcggagaaagccaagctggacaaaccaattaaagcgaaagtggaactgacggagaacgataaacgtctgctcgaaatctttagcgagtatgttacctggaatcgcgtcagtaacgtactgtcacatattggctcagtgaccgcaaaagattttgggcgtgttatgggtctgacgatgaaagacatcattaatgaagcagcacgcgaaggccatgatctgttgttcgctgataacccgtcggcggtgaagaaagagctgaccattctcatccgccacacgattcgttccaaatggcacgaagttctggag

SEQ ID NO: 220 - protein, 346 aa, synthetic construct
  REGION 1..346: note = variant of RNA ligase 2 from Klebsiella phage KP179
MHHHHHHGGSNMFAYYSSLENHYNNKFIEKIRGAGFLMHTVEWVAREKIHGTNFSVIITPTEIVPAKRTGPILEGESFFGHEIIMKKYKDSFVKVQNMLNAMDLVSVQIFGEFAGGGIQKGVDYGDKDFYVFDILSDSGNEKVYWDDYRVESFCTQLGLKLAPLLGRGSFAELSQYPNDFKSIVNRYNELVDTTGLEHANKHVFGPQASSETGVAEGYVLKPVYPIFFNNGGRVAIKCKNSKFSEKAKLDKPIKAKVELTENDKRLLEIFSEYVTWNRVSNVLSHIGSVTAKDFGRVMGLTMKDIINEAAREGHDLLFADNPSAVKKELTILIRHTIRSKWHEVLE

SEQ ID NO: 221 - DNA, 1038 bp, synthetic construct
  misc_feature 1..1038: note = variant of RNA ligase 2 from Klebsiella phage KP179
  source 1..1038: mol_type = other DNA
atgcatcaccatcaccatcacggtggcagcaacgtgtttgcgtattattcaagtctggaaaaccattacaataataagttcattgagaagatccgtggtgcaggcttcctgatgcacaccgtggaatgggtagctcgcgagaagattcatggaacgaactttagcgttatcattactccgaccgaaatcgtcccagccaaacgcacagggccgatcttggaaggcgagtcgttctttggtcacgaaattatcatgaaaaaatataaagactccttcgtgaaggtgcagaacatgctgaatgccatggatcttgttagcgtgcaaatctttggcgaatttgcgggtggtggcattcagaaaggcgtcgattacggagacaaagatttctatgtgtttgacatcctgtctgatagcgggaacgagaaagtttactgggatgactatcgcgtcgaatcgttttgcaccacgctcggtctgaaattagcgcctctgctgggacgtggtagtttcgctgaactgtcccagtacccaaacgatttcaaaagcattgtgaaccgttataatgaattggttgatacgacgggcctggaacatgccaataaacacgtctttggtccgcaagcgtcttctgaaactggcgtagcagaaggctacgttcttaaacccgtctatccgatcttctttaataatggtacgcgcgtggcgattaaatgcaagaactccaaattttcggagaaagccaagctggacaagccaattgtggcggcggtggaactgacggagaacgataaacgtctgctcgaaatctttagcgagtatgttacctggaatcgcgtcagtaacgtactgtcacatattggctcagtgaccgcaaaagattttgggcgtgttatgggtctgacgatgaaagacatcattaatgaagcagcacgcgaaggccatgatctgttgttcgctgataacccgtcggcggtgaagaaagagctgaccattctcatccagaacacgattcgttccaaatggcacgaagttctggag

SEQ ID NO: 222 - protein, 346 aa, synthetic construct
  REGION 1..346: note = variant of RNA ligase 2 from Klebsiella phage KP179
MHHHHHHGGSNVFAYYSSLENHYNNKFIEKIRGAGFLMHTVEWVAREKIHGTNFSVIITPTEIVPAKRTGPILEGESFFGHEIIMKKYKDSFVKVQNMLNAMDLVSVQIFGEFAGGGIQKGVDYGDKDFYVFDILSDSGNEKVYWDDYRVESFCTTLGLKLAPLLGRGSFAELSQYPNDFKSIVNRYNELVDTTGLEHANKHVFGPQASSETGVAEGYVLKPVYPIFFNNGTRVAIKCKNSKFSEKAKLDKPIVAAVELTENDKRLLEIFSEYVTWNRVSNVLSHIGSVTAKDFGRVMGLTMKDIINEAAREGHDLLFADNPSAVKKELTILIQNTIRSKWHEVLE

SEQ ID NO: 223 - DNA, 1038 bp, synthetic construct
  misc_feature 1..1038: note = variant of RNA ligase 2 from Klebsiella phage KP179
  source 1..1038: mol_type = other DNA
atgcatcaccatcaccatcacggtggcagcaacgtgtttgcgtattattcaagtctggaaaaccattacaataataagttcattgagaagatccgtggtgcaggcttcctgatgcacaccgtggaatgggtagctcgcgagaagattcatggaacgaactttagcgttatcattactccgaccgaaatcgtcccagccaaacgcacagggccgatcttggaaggcgagtcgttctttggtcacgaaattatcatgaaaaaatataaagactccttcgtgaaggtgcagaacatgctgaatgccatggatcttgttagcgtgcaaatctttggcgaatttgcgggtggtggcattcagaaaggcgtcgattacggagacaaagatttctatgtgtttgacatcctgtctgatagcgggaacgagaaagtttactgggatgactatcgcgtcgaatcgttttgcaccacgctcggtctgaaattagcgcctctgctgggacgtggtagtttcgctgaactgtcccagtacccaaacgatttcaaaagcattgtgaaccgttataatgaattggttgatacgacgggcctggaacatgccaataaacacgtctttggtccgcaagcgtcttctgaaactggcgtagcagaaggctacgttcttaaacccgtctatccgatcttctttaataccggtacgcgcgtggcgattaaatgcaagaactccaaattttcggagaaagccaagctggacaagccaattaaggcgaaggtggaactgacggagaacgataaacgtctgctcgaaatctttagcgagtatgttacctggaatcgcgtcagtaacgtactgtcacatattggctcagtgaccgcaaaagattttgggcgtgttatgggtctgacgatgaaagacatcattaatgaagcagcacgcgaaggccatgatctgttgttcgctgataacccgtcggcggtgaagaaagagctgaccattctcatccagaacacgattcgttccaaatggcacgaagttctggag

SEQ ID NO: 224 - protein, 346 aa, synthetic construct
  REGION 1..346: note = variant of RNA ligase 2 from Klebsiella phage KP179
MHHHHHHGGSNVFAYYSSLENHYNNKFIEKIRGAGFLMHTVEWVAREKIHGTNFSVIITPTEIVPAKRTGPILEGESFFGHEIIMKKYKDSFVKVQNMLNAMDLVSVQIFGEFAGGGIQKGVDYGDKDFYVFDILSDSGNEKVYWDDYRVESFCTTLGLKLAPLLGRGSFAELSQYPNDFKSIVNRYNELVDTTGLEHANKHVFGPQASSETGVAEGYVLKPVYPIFFNTGTRVAIKCKNSKFSEKAKLDKPIKAKVELTENDKRLLEIFSEYVTWNRVSNVLSHIGSVTAKDFGRVMGLTMKDIINEAAREGHDLLFADNPSAVKKELTILIQNTIRSKWHEVLE

SEQ ID NO: 225 - DNA, 1038 bp, synthetic construct
  misc_feature 1..1038: note = variant of RNA ligase 2 from Klebsiella phage KP179
  source 1..1038: mol_type = other DNA
atgcatcaccatcaccatcacggtggcagcaacctgtttgcgtattattcaagtctggaaaaccattacaataataagttcattgagaagatccgtggtgcaggcttcctgatgcacaccgtggaatgggtagctcgcgagaagattcatggaacgaactttagcgttatcattactccgaccgaaatcgtcccagccaaacgcacagggccgatcttggaaggcgagtcgttctttggtcacgaaattatcatgaaaaaatataaagactccttcgtgaaggtgcagaacatgctgaatgccatggatcttgttagcgtgcaaatctttggcgaatttgcgggtggtggcattcagaaaggcgtcgattacggagacaaagatttctatgtgtttgacatcctgtctgatagcgggaacgagaaagtttactgggatgactatcgcgtcgaatcgttttgcaccacgctcggtctgaaattagcgcctctgctgggacgtggtagtttcgctgaactgtcccagtacccaaacgatttcaaaagcattgtgaaccgttataatgaattggttgatacgacgggcctggaacatgccaataaacacgtctttggtccgcaagcgtcttctgaaactggcgtagcagaaggctacgttcttaaacccgtctatccgatcttctttaataccggtacgcgcgtggcgattaaatgcaagaactccaaattttcggagaaagccaagctggacacgccaattaaggcgaaggtggaactgacggagaacgataaacgtctgctcgaaatctttagcgagtatgttacctggaatcgcgtcagtaacgtactgtcacatattggctcagtgaccgcaaaagattttgggcgtgttatgggtctgacgatgaaagacatcattaatgaagcagcacgcgaaggccatgatctgttgttcgctgataacccgtcggcggtgaagaaagagctgaccattctcatccagaacacgattcgttccaaatggcacgaagttctggag

SEQ ID NO: 226 - protein, 346 aa, synthetic construct
  REGION 1..346: note = variant of RNA ligase 2 from Klebsiella phage KP179
MHHHHHHGGSNLFAYYSSLENHYNNKFIEKIRGAGFLMHTVEWVAREKIHGTNFSVIITPTEIVPAKRTGPILEGESFFGHEIIMKKYKDSFVKVQNMLNAMDLVSVQIFGEFAGGGIQKGVDYGDKDFYVFDILSDSGNEKVYWDDYRVESFCTTLGLKLAPLLGRGSFAELSQYPNDFKSIVNRYNELVDTTGLEHANKHVFGPQASSETGVAEGYVLKPVYPIFFNTGTRVAIKCKNSKFSEKAKLDTPIKAKVELTENDKRLLEIFSEYVTWNRVSNVLSHIGSVTAKDFGRVMGLTMKDIINEAAREGHDLLFADNPSAVKKELTILIQNTIRSKWHEVLE

SEQ ID NO: 227 - DNA, 1038 bp, synthetic construct
  misc_feature 1..1038: note = variant of RNA ligase 2 from Klebsiella phage KP179
  source 1..1038: mol_type = other DNA
atgcatcaccatcaccatcacggtggcagcaacctgtttgcgtattattcaagtctggaaaaccattacaataataagttcattgagaagatccgtggtgcaggcttcctgatgcacaccgtggaatgggtagctcgcgagaagattcatggaacgaactttagcgttatcattactccgaccgaaatcgtcccagccaaacgcacagggccgatcttggaaggcgagtcgttctttggtcacgaaattatcatgaaaaaatataaagactccttcgtgaaggtgcagaacatgctgaatgccatggatcttgttagcgtgcaaatctttggcgaatttgcgggtggtggcattcagaaaggcgtcgattacggagacaaagatttctatgtgtttgacatcctgtctgatagcgggaacgagaaagtttactgggatgactatcgcgtcgaatcgttttgcaccacgctcggtctgaaattagcgcctctgctgggacgtggtagtttcgctgaactgtcccagtacccaaacgatttcaaaagcattgtgaaccgttataatgaattggttgatacgacgggcctggaacatgccaataaacacgtctttggtccgcaagcgtcttctgaaactggcgtagcagaaggctacgttcttaaacccgtctatccgatcttctttaataccggtacgcgcgtggcgattaaatgcaagaactccaaattttcggagaaagccaagctggactcgccaattgtggcggcggtggaactgacggagaacgataaacgtctgctcgaaatctttagcgagtatgttacctggaatcgcgtcagtaacgtactgtcacatattggctcagtgaccgcaaaagattttgggcgtgttatgggtctgacgatgaaagacatcattaatgaagcagcacgcgaaggccatgatctgttgttcgctgataacccgtcggcggtgaagaaagagctgaccattctcatccagaacacgattcgttccaaatggcacgaagttctggag

SEQ ID NO: 228 - protein, 346 aa, synthetic construct
  REGION 1..346: note = variant of RNA ligase 2 from Klebsiella phage KP179
MHHHHHHGGSNLFAYYSSLENHYNNKFIEKIRGAGFLMHTVEWVAREKIHGTNFSVIITPTEIVPAKRTGPILEGESFFGHEIIMKKYKDSFVKVQNMLNAMDLVSVQIFGEFAGGGIQKGVDYGDKDFYVFDILSDSGNEKVYWDDYRVESFCTTLGLKLAPLLGRGSFAELSQYPNDFKSIVNRYNELVDTTGLEHANKHVFGPQASSETGVAEGYVLKPVYPIFFNTGTRVAIKCKNSKFSEKAKLDSPIVAAVELTENDKRLLEIFSEYVTWNRVSNVLSHIGSVTAKDFGRVMGLTMKDIINEAAREGHDLLFADNPSAVKKELTILIQNTIRSKWHEVLE

SEQ ID NO: 229 - DNA, 1038 bp, synthetic construct
  misc_feature 1..1038: note = variant of RNA ligase 2 from Klebsiella phage KP179
  source 1..1038: mol_type = other DNA
atgcatcaccatcaccatcacggtggcagcaacgcgtttgcgtattattcaagtctggaaaaccattacaataacaagttcattgagaagatccgtggtgcaggcttcctgcgtcacaccgtggaatgggtagctcgcgagaagattcatggaacgaactttagcgttatcattactccgaccgaaatcgtcccagccaaacgcacagggccgatcttggaaggcgagtcgttctttggtcacgaaattatcatgaaaaaatataaagactccttcgtgaaggtgcagaacatgctgaatgccatggatcttgttagcgtgcaaatctttggcgaatttgcgggtggtggcattcagaaaggcgtcgattacggagacaaagatttctatgtgtttgacatcctgtctgatagcgggaacgagaaagtttactgggatgactatcgcgtcgaatcgttttgcaccacgctcggtctgaaattagcgcctctgctgggacgtggtagtttcgctgaactgtcccagtacccaaacgatttcaaaagcattgtgaaccgttataatgaattggttgatacgacgggcctggaacatgccaataaacacgtctttggtccgcaagcgtcttctgaaactggcgtagcagaaggctacgttcttaaacccgtctatccgatcttctttaataccggtacgcgcgtggcgattaaatgcaagaactccaaattttcggagaaagccaagctggacaaaccaattaaagcgaaagtggaactgacggagaacgataaacgtctgctcgaaatctttagcgagtatgttacctggaatcgcgtcagtaacgtactgtcacatattggctcagtgaccgcaaaagattttgggcgtgttatgggtctgacgatgaaagacatcattaatgaagcagcacgcgaaggccatgatctgttgttcgctgataacccgtcggcggtgaagaaagagctgaccattctcatccagaacacgattcgttccaaatggcacgaagttctggag

SEQ ID NO: 230 - protein, 346 aa, synthetic construct
  REGION 1..346: note = variant of RNA ligase 2 from Klebsiella phage KP179
MHHHHHHGGSNAFAYYSSLENHYNNKFIEKIRGAGFLRHTVEWVAREKIHGTNFSVIITPTEIVPAKRTGPILEGESFFGHEIIMKKYKDSFVKVQNMLNAMDLVSVQIFGEFAGGGIQKGVDYGDKDFYVFDILSDSGNEKVYWDDYRVESFCTTLGLKLAPLLGRGSFAELSQYPNDFKSIVNRYNELVDTTGLEHANKHVFGPQASSETGVAEGYVLKPVYPIFFNTGTRVAIKCKNSKFSEKAKLDKPIKAKVELTENDKRLLEIFSEYVTWNRVSNVLSHIGSVTAKDFGRVMGLTMKDIINEAAREGHDLLFADNPSAVKKELTILIQNTIRSKWHEVLE

SEQ ID NO: 231 - DNA, 1038 bp, synthetic construct
  misc_feature 1..1038: note = variant of RNA ligase 2 from Klebsiella phage KP179
  source 1..1038: mol_type = other DNA
atgcatcaccatcaccatcacggtggcagcaacatgtttgcgtattattcaagtctggaaaaccattacaataataagttcattgagaagatccgtggtgcaggcttcctgatgcacaccgtggaatgggtagctcgcgagaagattcatggaacgaactttagcgttatcattactccgaccgaaatcgtcccagccaaacgcacagggccgatcttggaaggcgagtcgttctttggtcacgaaattatcatgaaaaaatataaagactccttcgtgaaggtgcagaacatgctgaatgccatggatcttgttagcgtgcaaatctttggcgaatttgcgggtggtggcattcagaaaggcgtcgattacggagacaaagatttctatgtgtttgacatcctgtctgatagcgggaacgagaaagtttactgggatgactatcgcgtcgaatcgttttgcaccacgctcggtctgaaattagcgcctctgctgggacgtggtagtttcgctgaactgtcccagtacccaaacgatttcaaaagcattgtgaaccgttataatgaattggttgatacgacgggcctggaacatgccaataaacacgtctttggtccgcaagcgtcttctgaaactggcgtagcagaaggctacgttcttaaacccgtctatccgatcttctttaataccggtacgcgcgtggcgattaaatgcaagaactccaaattttcggagaaagccaagctggactcgccaattaaggcgaaggtggaactgacggagaacgataaacgtctgctcgaaatctttagcgagtatgttacctggaatcgcgtcagtaacgtactgtcacatattggctcagtgaccgcaaaagattttgggcgtgttatgggtctgacgatgaaagacatcattaatgaagcagcacgcgaaggccatgatctgttgttcgctgataacccgtcggcggtgaagaaagagctgaccattctcatccagaacacgattcgttccaaatggcacgaagttctggag

SEQ ID NO: 232 - protein, 346 aa, synthetic construct
  REGION 1..346: note = variant of RNA ligase 2 from Klebsiella phage KP179
MHHHHHHGGSNMFAYYSSLENHYNNKFIEKIRGAGFLMHTVEWVAREKIHGTNFSVIITPTEIVPAKRTGPILEGESFFGHEIIMKKYKDSFVKVQNMLNAMDLVSVQIFGEFAGGGIQKGVDYGDKDFYVFDILSDSGNEKVYWDDYRVESFCTTLGLKLAPLLGRGSFAELSQYPNDFKSIVNRYNELVDTTGLEHANKHVFGPQASSETGVAEGYVLKPVYPIFFNTGTRVAIKCKNSKFSEKAKLDSPIKAKVELTENDKRLLEIFSEYVTWNRVSNVLSHIGSVTAKDFGRVMGLTMKDIINEAAREGHDLLFADNPSAVKKELTILIQNTIRSKWHEVLE

SEQ ID NO: 233 - DNA, 1038 bp, synthetic construct
  misc_feature 1..1038: note = variant of RNA ligase 2 from Klebsiella phage KP179
  source 1..1038: mol_type = other DNA
atgcatcaccatcaccatcacggtggcagcaacccgtttgcgtattattcaagtctggaaaaccattacaataataagttcattgagaagatccgtggtgcaggcttcctgcgtcacaccgtggaatgggtagctcgcgagaagattcatggaacgaactttagcgttatcattactccgaccgaaatcgtcccagccaaacgcacagggccgatcttggaaggcgagtcgttctttggtcacgaaattatcatgaaaaaatataaagactccttcgtgaaggtgcagaacatgctgaatgccatggatcttgttagcgtgcaaatctttggcgaatttgcgggtggtggcattcagaaaggcgtcgattacggagacaaagatttctatgtgtttgacatcctgtctgatagcgggaacgagaaagtttactgggatgactatcgcgtcgaatcgttttgcaccacgctcggtctgaaattagcgcctctgctgggacgtggtagtttcgctgaactgtcccagtacccaaacgatttcaaaagcattgtgaaccgttataatgaattggttgatacgacgggcctggaacatgccaataaacacgtctttggtccgcaagcgtcttctgaaactggcgtagcagaaggctacgttcttaaacccgtctatccgatcttctttaataacggtacgcgcgtggcgattaaatgcaagaactccaaattttcggagaaagccaagctggacaagccaattgtggcgaaggtggaactgacggagaacgataaacgtctgctcgaaatctttagcgagtatgttacctggaatcgcgtcagtaacgtactgtcacatattggctcagtgaccgcaaaagattttgggcgtgttatgggtctgacgatgaaagacatcattaatgaagcagcacgcgaaggccatgatctgttgttcgctgataacccgtcggcggtgaagaaagagctgaccattctcatccagaacacgattcgttccaaatggcacgaagttctggag

SEQ ID NO: 234 - protein, 346 aa, synthetic construct
  REGION 1..346: note = variant of RNA ligase 2 from Klebsiella phage KP179
MHHHHHHGGSNPFAYYSSLENHYNNKFIEKIRGAGFLRHTVEWVAREKIHGTNFSVIITPTEIVPAKRTGPILEGESFFGHEIIMKKYKDSFVKVQNMLNAMDLVSVQIFGEFAGGGIQKGVDYGDKDFYVFDILSDSGNEKVYWDDYRVESFCTTLGLKLAPLLGRGSFAELSQYPNDFKSIVNRYNELVDTTGLEHANKHVFGPQASSETGVAEGYVLKPVYPIFFNNGTRVAIKCKNSKFSEKAKLDKPIVAKVELTENDKRLLEIFSEYVTWNRVSNVLSHIGSVTAKDFGRVMGLTMKDIINEAAREGHDLLFADNPSAVKKELTILIQNTIRSKWHEVLE

SEQ ID NO: 235 - DNA, 1038 bp, synthetic construct
  misc_feature 1..1038: note = variant of RNA ligase 2 from Klebsiella phage KP179
  source 1..1038: mol_type = other DNA
atgcatcaccatcaccatcacggtggcagcaacgtgtttgcgtattattcaagtctggaaaaccattacaataataagttcattgagaagatccgtggtgcaggcttcctgatgcacaccgtggaatgggtagctcgcgagaagattcatggaacgaactttagcgttatcattactccgaccgaaatcgtcccagccaaacgcacagggccgatcttggaaggcgagtcgttctttggtcacgaaattatcatgaaaaaatataaagactccttcgtgaaggtgcagaacatgctgaatgccatggatcttgttagcgtgcaaatctttggcgaatttgcgggtggtggcattcagaaaggcgtcgattacggagacaaagatttctatgtgtttgacatcctgtctgatagcgggaacgagaaagtttactgggatgactatcgcgtcgaatcgttttgcaccacgctcggtctgaaattagcgcctctgctgggacgtggtagtttcgctgaactgtcccagtacccaaacgatttcaaaagcattgtgaaccgttataatgaattggttgatacgacgggcctggaacatgccaataaacacgtctttggtccgcaagcgtcttctgaaactggcgtagcagaaggctacgttcttaaacccgtctatccgatcttctttaataccggtacgcgcgtggcgattaaatgcaagaactccaaattttcggagaaagccaagctggacacgccaattaaggcgaaggtggaactgacggagaacgataaacgtctgctcgaaatctttagcgagtatgttacctggaatcgcgtcagtaacgtactgtcacatattggctcagtgaccgcaaaagattttgggcgtgttatgggtctgacgatgaaagacatcattaatgaagcagcacgcgaaggccatgatctgttgttcgctgataacccgtcggcggtgaagaaagagctgaccattctcatccagaacacgattcgttccaaatggcacgaagttctggag

SEQ ID NO: 236 - protein, 346 aa, synthetic construct
  REGION 1..346: note = variant of RNA ligase 2 from Klebsiella phage KP179
MHHHHHHGGSNVFAYYSSLENHYNNKFIEKIRGAGFLMHTVEWVAREKIHGTNFSVIITPTEIVPAKRTGPILEGESFFGHEIIMKKYKDSFVKVQNMLNAMDLVSVQIFGEFAGGGIQKGVDYGDKDFYVFDILSDSGNEKVYWDDYRVESFCTTLGLKLAPLLGRGSFAELSQYPNDFKSIVNRYNELVDTTGLEHANKHVFGPQASSETGVAEGYVLKPVYPIFFNTGTRVAIKCKNSKFSEKAKLDTPIKAKVELTENDKRLLEIFSEYVTWNRVSNVLSHIGSVTAKDFGRVMGLTMKDIINEAAREGHDLLFADNPSAVKKELTILIQNTIRSKWHEVLE

SEQ ID NO: 237 - DNA, 1038 bp, synthetic construct
  misc_feature 1..1038: note = variant of RNA ligase 2 from Klebsiella phage KP179
  source 1..1038: mol_type = other DNA
atgcatcaccatcaccatcacggtggcagcaacatgtttgcgtattattcaagtctggaaaaccattacaataataagttcattgagaagatccgtggtgcaggcttcctgatgcacaccgtggaatgggtagctcgcgagaagattcatggaacgaactttagcgttatcattactccgaccgaaatcgtcccagccaaacgcacagggccgatcttggaaggcgagtcgttctttggtcacgaaattatcatgaaaaaatataaagactccttcgtgaaggtgcagaacatgctgaatgccatggatcttgttagcgtgcaaatctttggcgaatttgcgggtggtggcattcagaaaggcgtcgattacggagacaaagatttctatgtgtttgacatcctgtctgatagcgggaacgagaaagtttactgggatgactatcgcgtcgaatcgttttgcaccacgctcggtctgaaattagcgcctctgctgggacgtggtagtttcgctgaactgtcccagtacccaaacgatttcaaaagcattgtgaaccgttataatgaattggttgatacgacgggcctggaacatgccaataaacacgtctttggtccgcaagcgtcttctgaaactggcgtagcagaaggctacgttcttaaacccgtctatccgatcttctttaataccggtacgcgcgtggcgattaaatgcaagaactccaaattttcggagaaagccaagctggacaagccaattaaggcggcggtggaactgacggagaacgataaacgtctgctcgaaatctttagcgagtatgttacctggaatcgcgtcagtaacgtactgtcacatattggctcagtgaccgcaaaagattttgggcgtgttatgggtctgacgatgaaagacatcattaatgaagcagcacgcgaaggccatgatctgttgttcgctgataacccgtcggcggtgaagaaagagctgaccattctcatccagaacacgattcgttccaaatggcacgaagttctggag

SEQ ID NO: 238 - protein, 346 aa, synthetic construct
  REGION 1..346: note = variant of RNA ligase 2 from Klebsiella phage KP179
MHHHHHHGGSNMFAYYSSLENHYNNKFIEKIRGAGFLMHTVEWVAREKIHGTNFSVIITPTEIVPAKRTGPILEGESFFGHEIIMKKYKDSFVKVQNMLNAMDLVSVQIFGEFAGGGIQKGVDYGDKDFYVFDILSDSGNEKVYWDDYRVESFCTTLGLKLAPLLGRGSFAELSQYPNDFKSIVNRYNELVDTTGLEHANKHVFGPQASSETGVAEGYVLKPVYPIFFNTGTRVAIKCKNSKFSEKAKLDKPIKAAVELTENDKRLLEIFSEYVTWNRVSNVLSHIGSVTAKDFGRVMGLTMKDIINEAAREGHDLLFADNPSAVKKELTILIQNTIRSKWHEVLE

SEQ ID NO: 239 - DNA, 1038 bp, synthetic construct
  misc_feature 1..1038: note = variant of RNA ligase 2 from Klebsiella phage KP179
  source 1..1038: mol_type = other DNA
atgcatcaccatcaccatcacggtggcagcaacatgtttgcgtattattcaagtctggaaaaccattacaataataagttcattgagaagatccgtggtgcaggcttcctgatgcacaccgtggaatgggtagctcgcgagaagattcatggaacgaactttagcgttatcattactccgaccgaaatcgtcccagccaaacgcacagggccgatcttggaaggcgagtcgttctttggtcacgaaattatcatgaaaaaatataaagactccttcgtgaaggtgcagaacatgctgaatgccatggatcttgttagcgtgcaaatctttggcgaatttgcgggtggtggcattcagaaaggcgtcgattacggagacaaagatttctatgtgtttgacatcctgtctgatagcgggaacgagaaagtttactgggatgactatcgcgtcgaatcgttttgcaccacgctcggtctgaaattagcgcctctgctgggacgtggtagtttcgctgaactgtcccagtacccaaacgatttcaaaagcattgtgaaccgttataatgaattggttgatacgacgggcctggaacatgccaataaacacgtctttggtccgcaagcgtcttctgaaactggcgtagcagaaggctacgttcttaaacccgtctatccgatcttctttaataacggtacgcgcgtggcgattaaatgcaagaactccaaattttcggagaaagccaagctggacaagccaattgtggcgaaggtggaactgacggagaacgataaacgtctgctcgaaatctttagcgagtatgttacctggaatcgcgtcagtaacgtactgtcacatattggctcagtgaccgcaaaagattttgggcgtgttatgggtctgacgatgaaagacatcattaatgaagcagcacgcgaaggccatgatctgttgttcgctgataacccgtcggcggtgaagaaagagctgaccattctcatccagaacacgattcgttccaaatggcacgaagttctggag

SEQ ID NO: 240 - protein, 346 aa, synthetic construct
  REGION 1..346: note = variant of RNA ligase 2 from Klebsiella phage KP179
MHHHHHHGGSNMFAYYSSLENHYNNKFIEKIRGAGFLMHTVEWVAREKIHGTNFSVIITPTEIVPAKRTGPILEGESFFGHEIIMKKYKDSFVKVQNMLNAMDLVSVQIFGEFAGGGIQKGVDYGDKDFYVFDILSDSGNEKVYWDDYRVESFCTTLGLKLAPLLGRGSFAELSQYPNDFKSIVNRYNELVDTTGLEHANKHVFGPQASSETGVAEGYVLKPVYPIFFNNGTRVAIKCKNSKFSEKAKLDKPIVAKVELTENDKRLLEIFSEYVTWNRVSNVLSHIGSVTAKDFGRVMGLTMKDIINEAAREGHDLLFADNPSAVKKELTILIQNTIRSKWHEVLE

SEQ ID NO: 241 - DNA, 1038 bp, synthetic construct
  misc_feature 1..1038: note = variant of RNA ligase 2 from Klebsiella phage KP179
  source 1..1038: mol_type = other DNA
atgcatcaccatcaccatcacggtggcagcaacatgtttgcgtattattcaagtctggaaaaccattacaataataagttcattgagaagatccgtggtgcaggcttcctgatgcacaccgtggaatgggtagctcgcgagaagattcatggaacgaactttagcgttatcattactccgaccgaaatcgtcccagccaaacgcacagggccgatcttggaaggcgagtcgttctttggtcacgaaattatcatgaaaaaatataaagactccttcgtgaaggtgcagaacatgctgaatgccatggatcttgttagcgtgcaaatctttggcgaatttgcgggtggtggcattcagaaaggcgtcgattacggagacaaagatttctatgtgtttgacatcctgtctgatagcgggaacgagaaagtttactgggatgactatcgcgtcgaatcgttttgcaccacgctcggtctgaaattagcgcctctgctgggacgtggtagtttcgctgaactgtcccagtacccaaacgatttcaaaagcattgtgaaccgttataatgaattggttgatacgacgggcctggaacatgccaataaacacgtctttggtccgcaagcgtcttctgaaactggcgtagcagaaggctacgttcttaaacccgtctatccgatcttctttaataccggtacgcgcgtggcgattaaatgcaagaactccaaattttcggagaaagccaagctggacaaaccaattaaagcgaaagtggaactgacggagaacgataaacgtctgctcgaaatctttagcgagtatgttacctggaatcgcgtcagtaacgtactgtcacatattggctcagtgaccgcaaaagattttgggcgtgttatgggtctgacgatgaaagacatcattaatgaagcagcacgcgaaggccatgatctgttgttcgctgataacccgtcggcggtgaagaaagagctgaccattctcatccagaacacgattcgttccaaatggcacgaagttctggag

SEQ ID NO: 242 - protein, 346 aa, synthetic construct
  REGION 1..346: note = variant of RNA ligase 2 from Klebsiella phage KP179
MHHHHHHGGSNMFAYYSSLENHYNNKFIEKIRGAGFLMHTVEWVAREKIHGTNFSVIITPTEIVPAKRTGPILEGESFFGHEIIMKKYKDSFVKVQNMLNAMDLVSVQIFGEFAGGGIQKGVDYGDKDFYVFDILSDSGNEKVYWDDYRVESFCTTLGLKLAPLLGRGSFAELSQYPNDFKSIVNRYNELVDTTGLEHANKHVFGPQASSETGVAEGYVLKPVYPIFFNTGTRVAIKCKNSKFSEKAKLDKPIKAKVELTENDKRLLEIFSEYVTWNRVSNVLSHIGSVTAKDFGRVMGLTMKDIINEAAREGHDLLFADNPSAVKKELTILIQNTIRSKWHEVLE

SEQ ID NO: 243 - DNA, 1038 bp, synthetic construct
  misc_feature 1..1038: note = variant of RNA ligase 2 from Klebsiella phage KP179
  source 1..1038: mol_type = other DNA
atgcatcaccatcaccatcacggtggcagcaacacgtttgcgtattattcaagtctggaaaaccattacaataataagttcattgagaagatccgtggtgcaggcttcctgatgcacaccgtggaatgggtagctcgcgagaagattcatggaacgaactttagcgttatcattactccgaccgaaatcgtcccagccaaacgcacagggccgatcttggaaggcgagtcgttctttggtcacgaaattatcatgaaaaaatataaagactccttcgtgaaggtgcagaacatgctgaatgccatggatcttgttagcgtgcaaatctttggcgaatttgcgggtggtggcattcagaaaggcgtcgattacggagacaaagatttctatgtgtttgacatcctgtctgatagcgggaacgagaaagtttactgggatgactatcgcgtcgaatcgttttgcaccacgctcggtctgaaattagcgcctctgctgggacgtggtagtttcgctgaactgtcccagtacccaaacgatttcaaaagcattgtgaaccgttataatgaattggttgatacgacgggcctggaacatgccaataaacacgtctttggtccgcaagcgtcttctgaaactggcgtagcagaaggctacgttcttaaacccgtctatccgatcttctttaataccggtacgcgcgtggcgattaaatgcaagaactccaaattttcggagaaagccaagctggactcgccaattaaggcgaaggtggaactgacggagaacgataaacgtctgctcgaaatctttagcgagtatgttacctggaatcgcgtcagtaacgtactgtcacatattggctcagtgaccgcaaaagattttgggcgtgttatgggtctgacgatgaaagacatcattaatgaagcagcacgcgaaggccatgatctgttgttcgctgataacccgtcggcggtgaagaaagagctgaccattctcatccagaacacgattcgttccaaatggcacgaagttctggag

SEQ ID NO: 244 - protein, 346 aa, synthetic construct
  REGION 1..346: note = variant of RNA ligase 2 from Klebsiella phage KP179
MHHHHHHGGSNTFAYYSSLENHYNNKFIEKIRGAGFLMHTVEWVAREKIHGTNFSVIITPTEIVPAKRTGPILEGESFFGHEIIMKKYKDSFVKVQNMLNAMDLVSVQIFGEFAGGGIQKGVDYGDKDFYVFDILSDSGNEKVYWDDYRVESFCTTLGLKLAPLLGRGSFAELSQYPNDFKSIVNRYNELVDTTGLEHANKHVFGPQASSETGVAEGYVLKPVYPIFFNTGTRVAIKCKNSKFSEKAKLDSPIKAKVELTENDKRLLEIFSEYVTWNRVSNVLSHIGSVTAKDFGRVMGLTMKDIINEAAREGHDLLFADNPSAVKKELTILIQNTIRSKWHEVLE

SEQ ID NO: 245 - DNA, 1038 bp, synthetic construct
  misc_feature 1..1038: note = variant of RNA ligase 2 from Klebsiella phage KP179
  source 1..1038: mol_type = other DNA
atgcatcaccatcaccatcacggtggcagcaacacgtttgcgtattattcaagtctggaaaaccattacaataataagttcattgagaagatccgtggtgcaggcttcctgatgcacaccgtggaatgggtagctcgcgagaagattcatggaacgaactttagcgttatcattactccgaccgaaatcgtcccagccaaacgcacagggccgatcttggaaggcgagtcgttctttggtcacgaaattatcatgaaaaaatataaagactccttcgtgaaggtgcagaacatgctgaatgccatggatcttgttagcgtgcaaatctttggcgaatttgcgggtggtggcattcagaaaggcgtcgattacggagacaaagatttctatgtgtttgacatcctgtctgatagcgggaacgagaaagtttactgggatgactatcgcgtcgaatcgttttgcaccacgctcggtctgaaattagcgcctctgctgggacgtggtagtttcgctgaactgtcccagtacccaaacgatttcaaaagcattgtgaaccgttataatgaattggttgatacgacgggcctggaacatgccaataaacacgtctttggtccgcaagcgtcttctgaaactggcgtagcagaaggctacgttcttaaacccgtctatccgatcttctttaataccggtacgcgcgtggcgattaaatgcaagaactccaaattttcggagaaagccaagctggacaagccaattgtggcgaaggtggaactgacggagaacgataaacgtctgctcgaaatctttagcgagtatgttacctggaatcgcgtcagtaacgtactgtcacatattggctcagtgaccgcaaaagattttgggcgtgttatgggtctgacgatgaaagacatcattaatgaagcagcacgcgaaggccatgatctgttgttcgctgataacccgtcggcggtgaagaaagagctgaccattctcatccagaacacgattcgttccaaatggcacgaagttctggag

SEQ ID NO: 246 - protein, 346 aa, synthetic construct
  REGION 1..346: note = variant of RNA ligase 2 from Klebsiella phage KP179
MHHHHHHGGSNTFAYYSSLENHYNNKFIEKIRGAGFLMHTVEWVAREKIHGTNFSVIITPTEIVPAKRTGPILEGESFFGHEIIMKKYKDSFVKVQNMLNAMDLVSVQIFGEFAGGGIQKGVDYGDKDFYVFDILSDSGNEKVYWDDYRVESFCTTLGLKLAPLLGRGSFAELSQYPNDFKSIVNRYNELVDTTGLEHANKHVFGPQASSETGVAEGYVLKPVYPIFFNTGTRVAIKCKNSKFSEKAKLDKPIVAKVELTENDKRLLEIFSEYVTWNRVSNVLSHIGSVTAKDFGRVMGLTMKDIINEAAREGHDLLFADNPSAVKKELTILIQNTIRSKWHEVLE

SEQ ID NO: 247 - DNA, 1038 bp, synthetic construct
  misc_feature 1..1038: note = variant of RNA ligase 2 from Klebsiella phage KP179
  source 1..1038: mol_type = other DNA
atgcatcaccatcaccatcacggtggcagcaacgtgtttgcgtattattcaagtctggaaaaccattacaataataagttcattgagaagatccgtggtgcaggcttcctgcgtcacaccgtggaatgggtagctcgcgagaagattcatggaacgaactttagcgttatcattactccgaccgaaatcgtcccagccaaacgcacagggccgatcttggaaggcgagtcgttctttggtcacgaaattatcatgaaaaaatataaagactccttcgtgaaggtgcagaacatgctgaatgccatggatcttgttagcgtgcaaatctttggcgaatttgcgggtggtggcattcagaaaggcgtcgattacggagacaaagatttctatgtgtttgacatcctgtctgatagcgggaacgagaaagtttactgggatgactatcgcgtcgaatcgttttgcaccacgctcggtctgaaattagcgcctctgctgggacgtggtagtttcgctgaactgtcccagtacccaaacgatttcaaaagcattgtgaaccgttataatgaattggttgatacgacgggcctggaacatgccaataaacacgtctttggtccgcaagcgtcttctgaaactggcgtagcagaaggctacgttcttaaacccgtctatccgatcttctttaataccggtacgcgcgtggcgattaaatgcaagaactccaaattttcggagaaagccaagctggacacgccaattaaggcggcggtggaactgacggagaacgataaacgtctgctcgaaatctttagcgagtatgttacctggaatcgcgtcagtaacgtactgtcacatattggctcagtgaccgcaaaagattttgggcgtgttatgggtctgacgatgaaagacatcattaatgaagcagcacgcgaaggccatgatctgttgttcgctgataacccgtcggcggtgaagaaagagctgaccattctcatacagaacacgattcgttccaaatggcacgaagttctggag

SEQ ID NO: 248 - protein, 346 aa, synthetic construct
  REGION 1..346: note = variant of RNA ligase 2 from Klebsiella phage KP179
MHHHHHHGGSNVFAYYSSLENHYNNKFIEKIRGAGFLRHTVEWVAREKIHGTNFSVIITPTEIVPAKRTGPILEGESFFGHEIIMKKYKDSFVKVQNMLNAMDLVSVQIFGEFAGGGIQKGVDYGDKDFYVFDILSDSGNEKVYWDDYRVESFCTTLGLKLAPLLGRGSFAELSQYPNDFKSIVNRYNELVDTTGLEHANKHVFGPQASSETGVAEGYVLKPVYPIFFNTGTRVAIKCKNSKFSEKAKLDTPIKAAVELTENDKRLLEIFSEYVTWNRVSNVLSHIGSVTAKDFGRVMGLTMKDIINEAAREGHDLLFADNPSAVKKELTILIQNTIRSKWHEVLE

SEQ ID NO: 249 - DNA, 1038 bp, synthetic construct
  misc_feature 1..1038: note = variant of RNA ligase 2 from Klebsiella phage KP179
  source 1..1038: mol_type = other DNA
atgcatcaccatcaccatcacggtggcagcaacctgtttgcgtattattcaagtctggaaaaccattacaataataagttcattgagaagatccgtggtgcaggcttcctgatgcacaccgtggaatgggtagctcgcgagaagattcatggaacgaactttagcgttatcattactccgaccgaaatcgtcccagccaaacgcacagggccgatcttggaaggcgagtcgttctttggtcacgaaattatcatgaaaaaatataaagactccttcgtgaaggtgcagaacatgctgaatgccatggatcttgttagcgtgcaaatctttggcgaatttgcgggtggtggcattcagaaaggcgtcgattacggagacaaagatttctatgtgtttgacatcctgtctgatagcgggaacgagaaagtttactgggatgactatcgcgtcgaatcgttttgcaccacgctcggtctgaaattagcgcctctgctgggacgtggtagtttcgctgaactgtcccagtacccaaacgatttcaaaagcattgtgaaccgttataatgaattggttgatacgacgggcctggaacatgccaataaacacgtctttggtccgcaagcgtcttctgaaactggcgtagcagaaggctacgttcttaaacccgtctatccgatcttctttaataacggtacgcgcgtggcgattaaatgcaagaactccaaattttcggagaaagccaagctggactcgccaattaaggcgaaggtggaactgacggagaacgataaacgtctgctcgaaatctttagcgagtatgttacctggaatcgcgtcagtaacgtactgtcacatattggctcagtgaccgcaaaagattttgggcgtgttatgggtctgacgatgaaagacatcattaatgaagcagcacgcgaaggccatgatctgttgttcgctgataacccgtcggcggtgaagaaagagctgaccattctcatccagaacacgattcgttccaaatggcacgaagttctggag

SEQ ID NO: 250 - protein, 346 aa, synthetic construct
  REGION 1..346: note = variant of RNA ligase 2 from Klebsiella phage KP179
MHHHHHHGGSNLFAYYSSLENHYNNKFIEKIRGAGFLMHTVEWVAREKIHGTNFSVIITPTEIVPAKRTGPILEGESFFGHEIIMKKYKDSFVKVQNMLNAMDLVSVQIFGEFAGGGIQKGVDYGDKDFYVFDILSDSGNEKVYWDDYRVESFCTTLGLKLAPLLGRGSFAELSQYPNDFKSIVNRYNELVDTTGLEHANKHVFGPQASSETGVAEGYVLKPVYPIFFNNGTRVAIKCKNSKFSEKAKLDSPIKAKVELTENDKRLLEIFSEYVTWNRVSNVLSHIGSVTAKDFGRVMGLTMKDIINEAAREGHDLLFADNPSAVKKELTILIQNTIRSKWHEVLE

SEQ ID NO: 251 - DNA, 1038 bp, synthetic construct
  misc_feature 1..1038: note = variant of RNA ligase 2 from Klebsiella phage KP179
  source 1..1038: mol_type = other DNA
atgcatcaccatcaccatcacggtggcagcaacacgtttgcgtattattcaagtctggaaaaccattacaataataagttcattgagaagatccgtggtgcaggcttcctgatgcacaccgtggaatgggtagctcgcgagaagattcatggaacgaactttagcgttatcattactccgaccgaaatcgtcccagccaaacgcacagggccgatcttggaaggcgagtcgttctttggtcacgaaattatcatgaaaaaatataaagactccttcgtgaaggtgcagaacatgctgaatgccatggatcttgttagcgtgcaaatctttggcgaatttgcgggtggtggcattcagaaaggcgtcgattacggagacaaagatttctatgtgtttgacatcctgtctgatagcgggaacgagaaagtttactgggatgactatcgcgtcgaatcgttttgcaccacgctcggtctgaaattagcgcctctgctgggacgtggtagtttcgctgaactgtcccagtacccaaacgatttcaaaagcattgtgaaccgttataatgaattggttgatacgacgggcctggaacatgccaataaacacgtctttggtccgcaagcgtcttctgaaactggcgtagcagaaggctacgttcttaaacccgtctatccgatcttctttaataacggtacgcgcgtggcgattaaatgcaagaactccaaattttcggagaaagccaagctggacacgccaattgtggcggcggtggaactgacggagaacgataaacgtctgctcgaaatctttagcgagtatgttacctggaatcgcgtcagtaacgtactgtcacatattggctcagtgaccgcaaaagattttgggcgtgttatgggtctgacgatgaaagacatcattaatgaagcagcacgcgaaggccatgatctgttgttcgctgataacccgtcggcggtgaagaaagagctgaccattctcatccagaacacgattcgttccaaatggcacgaagttctggag

SEQ ID NO: 252 - protein, 346 aa, synthetic construct
  REGION 1..346: note = variant of RNA ligase 2 from Klebsiella phage KP179
MHHHHHHGGSNTFAYYSSLENHYNNKFIEKIRGAGFLMHTVEWVAREKIHGTNFSVIITPTEIVPAKRTGPILEGESFFGHEIIMKKYKDSFVKVQNMLNAMDLVSVQIFGEFAGGGIQKGVDYGDKDFYVFDILSDSGNEKVYWDDYRVESFCTTLGLKLAPLLGRGSFAELSQYPNDFKSIVNRYNELVDTTGLEHANKHVFGPQASSETGVAEGYVLKPVYPIFFNNGTRVAIKCKNSKFSEKAKLDTPIVAAVELTENDKRLLEIFSEYVTWNRVSNVLSHIGSVTAKDFGRVMGLTMKDIINEAAREGHDLLFADNPSAVKKELTILIQNTIRSKWHEVLE

SEQ ID NO: 253 - DNA, 1038 bp, synthetic construct
  misc_feature 1..1038: note = variant of RNA ligase 2 from Klebsiella phage KP179
  source 1..1038: mol_type = other DNA
atgcatcaccatcaccatcacggtggcagcaacgtgtttgcgtattattcaagtctggaaaaccattacaataataagttcattgagaagatccgtggtgcaggcttcctgatgcacaccgtggaatgggtagctcgcgagaagattcatggaacgaactttagcgttatcattactccgaccgaaatcgtcccagccaaacgcacagggccgatcttggaaggcgagtcgttctttggtcacgaaattatcatgaaaaaatataaagactccttcgtgaaggtgcagaacatgctgaatgccatggatcttgttagcgtgcaaatctttggcgaatttgcgggtggtggcattcagaaaggcgtcgattacggagacaaagatttctatgtgtttgacatcctgtctgatagcgggaacgagaaagtttactgggatgactatcgcgtcgaatcgttttgcaccacgctcggtctgaaattagcgcctctgctgggacgtggtagtttcgctgaactgtcccagtacccaaacgatttcaaaagcattgtgaaccgttataatgaattggttgatacgacgggcctggaacatgccaataaacacgtctttggtccgcaagcgtcttctgaaactggcgtagcagaaggctacgttcttaaacccgtctatccgatcttctttaataccggtacgcgcgtggcgattaaatgcaagaactccaaattttcggagaaagccaagctggactcgccaattaaggcgaaggtggaactgacggagaacgataaacgtctgctcgaaatctttagcgagtatgttacctggaatcgcgtcagtaacgtactgtcacatattggctcagtgaccgcaaaagattttgggcgtgttatgggtctgacgatgaaagacatcattaatgaagcagcacgcgaaggccatgatctgttgttcgctgataacccttcggcggtgaagaaagagctgaccattctcatccagaacacgattcgttccaaatggcacgaagttctggag

SEQ ID NO: 254 - protein, 346 aa, synthetic construct
  REGION 1..346: note = variant of RNA ligase 2 from Klebsiella phage KP179
MHHHHHHGGSNVFAYYSSLENHYNNKFIEKIRGAGFLMHTVEWVAREKIHGTNFSVIITPTEIVPAKRTGPILEGESFFGHEIIMKKYKDSFVKVQNMLNAMDLVSVQIFGEFAGGGIQKGVDYGDKDFYVFDILSDSGNEKVYWDDYRVESFCTTLGLKLAPLLGRGSFAELSQYPNDFKSIVNRYNELVDTTGLEHANKHVFGPQASSETGVAEGYVLKPVYPIFFNTGTRVAIKCKNSKFSEKAKLDSPIKAKVELTENDKRLLEIFSEYVTWNRVSNVLSHIGSVTAKDFGRVMGLTMKDIINEAAREGHDLLFADNPSAVKKELTILIQNTIRSKWHEVLE

SEQ ID NO: 255 - DNA, 1038 bp, synthetic construct
  misc_feature 1..1038: note = variant of RNA ligase 2 from Klebsiella phage KP179
  source 1..1038: mol_type = other DNA
atgcatcaccatcaccatcacggtggcagcaacatgtttgcgtattattcaagtctggaaaaccattacaataataagttcattgagaagatccgtggtgcaggcttcctgcgtcacaccgtggaatgggtagctcgcgagaagattcatggaacgaactttagcgttatcattactccgaccgaaatcgtcccagccaaacgcacagggccgatcttggaaggcgagtcgttctttggtcacgaaattatcatgaaaaaatataaagactccttcgtgaaggtgcagaacatgctgaatgccatggatcttgttagcgtgcaaatctttggcgaatttgcgggtggtggcattcagaaaggcgtcgattacggagacaaagatttctatgtgtttgacatcctgtctgatagcgggaacgagaaagtttactgggatgactatcgcgtcgaatcgttttgcaccacgctcggtctgaaattagcgcctctgctgggacgtggtagtttcgctgaactgtcccagtacccaaacgatttcaaaagcattgtgaaccgttataatgaattggttgatacgacgggcctggaacatgccaataaacacgtctttggtccgcaagcgtcttctgaaactggcgtagcagaaggctacgttcttaaacccgtctatccgatcttctttaataacggtacgcgcgtggcgattaaatgcaagaactccaaattttcggagaaagccaagctggacaagccaattaaggcgaaggtggaactgacggagaacgataaacgtctgctcgaaatctttagcgagtatgttacctggaatcgcgtcagtaacgtactgtcacatattggctcagtgaccgcaaaagattttgggcgtgttatgggtctgacgatgaaagacatcattaatgaagcagcacgcgaaggccatgatctgttgttcgctgataacccgtcggcggtgaagaaagagctgaccattctcatccagaacacgattcgttccaaatggcacgaagttctggag

SEQ ID NO: 256 - protein, 346 aa, synthetic construct
  REGION 1..346: note = variant of RNA ligase 2 from Klebsiella phage KP179
MHHHHHHGGSNMFAYYSSLENHYNNKFIEKIRGAGFLRHTVEWVAREKIHGTNFSVIITPTEIVPAKRTGPILEGESFFGHEIIMKKYKDSFVKVQNMLNAMDLVSVQIFGEFAGGGIQKGVDYGDKDFYVFDILSDSGNEKVYWDDYRVESFCTTLGLKLAPLLGRGSFAELSQYPNDFKSIVNRYNELVDTTGLEHANKHVFGPQASSETGVAEGYVLKPVYPIFFNNGTRVAIKCKNSKFSEKAKLDKPIKAKVELTENDKRLLEIFSEYVTWNRVSNVLSHIGSVTAKDFGRVMGLTMKDIINEAAREGHDLLFADNPSAVKKELTILIQNTIRSKWHEVLE

SEQ ID NO: 257 - DNA, 1038 bp, synthetic construct
  misc_feature 1..1038: note = variant of RNA ligase 2 from Klebsiella phage KP179
  source 1..1038: mol_type = other DNA
atgcatcaccatcaccatcacggtggcagcaacacgtttgcgtattattcaagtctggaaaaccattacaataataagttcattgagaagatccgtggtgcaggcttcctgatgcacaccgtggaatgggtagctcgcgagaagattcatggaacgaactttagcgttatcattactccgaccgaaatcgtcccagccaaacgcacagggccgatcttggaaggcgagtcgttctttggtcacgaaattatcatgaaaaaatataaagactccttcgtgaaggtgcagaacatgctgaatgccatggatcttgttagcgtgcaaatctttggcgaatttgcgggtggtggcattcagaaaggcgtcgattacggagacaaagatttctatgtgtttgacatcctgtctgatagcgggaacgagaaagtttactgggatgactatcgcgtcgaatcgttttgcaccacgctcggtctgaaattagcgcctctgctgggacgtggtagtttcgctgaactgtcccagtacccaaacgatttcaaaagcattgtgaaccgttataatgaattggttgatacgacgggcctggaacatgccaataaacacgtctttggtccgcaagcgtcttctgaaactggcgtagcagaaggctacgttcttaaacccgtctatccgatcttctttaataccggtacgcgcgtggcgattaaatgcaagaactccaaattttcggagaaagccaagctggacaagccaattaaggcggcggtggaactgacggagaacgataaacgtctgctcgaaatctttagcgagtatgttacctggaatcgcgtcagtaacgtactgtcacatattggctcagtgaccgcaaaagattttgggcgtgttatgggtctgacgatgaaagacatcattaatgaagcagcacgcgaaggccatgatctgttgttcgctgataacccgtcggcggtgaagaaagagctgaccattctcatccagaacacgattcgttccaaatggcacgaagttctggag

SEQ ID NO: 258 - protein, 346 aa, synthetic construct
  REGION 1..346: note = variant of RNA ligase 2 from Klebsiella phage KP179
MHHHHHHGGSNTFAYYSSLENHYNNKFIEKIRGAGFLMHTVEWVAREKIHGTNFSVIITPTEIVPAKRTGPILEGESFFGHEIIMKKYKDSFVKVQNMLNAMDLVSVQIFGEFAGGGIQKGVDYGDKDFYVFDILSDSGNEKVYWDDYRVESFCTTLGLKLAPLLGRGSFAELSQYPNDFKSIVNRYNELVDTTGLEHANKHVFGPQASSETGVAEGYVLKPVYPIFFNTGTRVAIKCKNSKFSEKAKLDKPIKAAVELTENDKRLLEIFSEYVTWNRVSNVLSHIGSVTAKDFGRVMGLTMKDIINEAAREGHDLLFADNPSAVKKELTILIQNTIRSKWHEVLE

SEQ ID NO: 259 - DNA, 1038 bp, synthetic construct
  misc_feature 1..1038: note = variant of RNA ligase 2 from Klebsiella phage KP179
  source 1..1038: mol_type = other DNA
atgcatcaccatcaccatcacggtggcagcaacctgtttgcgtattattcaagtctggaaaaccattacaataataagttcattgagaagatccgtggtgcaggcttcctgatgcacaccgtggaatgggtagctcgcgagaagattcatggaacgaactttagcgttatcattactccgaccgaaatcgtcccagccaaacgcacagggccgatcttggaaggcgagtcgttctttggtcacgaaattatcatgaaaaaatataaagactccttcgtgaaggtgcagaacatgctgaatgccatggatcttgttagcgtgcaaatctttggcgaatttgcgggtggtggcattcagaaaggcgtcgattacggagacaaagatttctatgtgtttgacatcctgtctgatagcgggaacgagaaagtttactgggatgactatcgcgtcgaatcgttttgcaccacgctcggtctgaaattagcgcctctgctgggacgtggtagtttcgctgaactgtcccagtacccaaacgatttcaaaagcattgtgaaccgttataatgaattggttgatacgacgggcctggaacatgccaataaacacgtctttggtccgcaagcgtcttctgaaactggcgtagcagaaggctacgttcttaaacccgtctatccgatcttctttaataacggtacgcgcgtggcgattaaatgcaagaactccaaattttcggagaaagccaagctggacaaaccaattaaagcgaaagtggaactgacggagaacgataaacgtctgctcgaaatctttagcgagtatgttacctggaatcgcgtcagtaacgtactgtcacatattggctcagtgaccgcaaaagattttgggcgtgttatgggtctgacgatgaaagacatcattaatgaagcagcacgcgaaggccatgatctgttgttcgctgataacccgtcggcggtgaagaaagagctgaccattctcatccagaacacgattcgttccaaatggcacgaagttctggag

SEQ ID NO: 260 - protein, 346 aa, synthetic construct
  REGION 1..346: note = variant of RNA ligase 2 from Klebsiella phage KP179
MHHHHHHGGSNLFAYYSSLENHYNNKFIEKIRGAGFLMHTVEWVAREKIHGTNFSVIITPTEIVPAKRTGPILEGESFFGHEIIMKKYKDSFVKVQNMLNAMDLVSVQIFGEFAGGGIQKGVDYGDKDFYVFDILSDSGNEKVYWDDYRVESFCTTLGLKLAPLLGRGSFAELSQYPNDFKSIVNRYNELVDTTGLEHANKHVFGPQASSETGVAEGYVLKPVYPIFFNNGTRVAIKCKNSKFSEKAKLDKPIKAKVELTENDKRLLEIFSEYVTWNRVSNVLSHIGSVTAKDFGRVMGLTMKDIINEAAREGHDLLFADNPSAVKKELTILIQNTIRSKWHEVLE

SEQ ID NO: 261 - DNA, 1038 bp, synthetic construct
  misc_feature 1..1038: note = variant of RNA ligase 2 from Klebsiella phage KP179
  source 1..1038: mol_type = other DNA
atgcatcaccatcaccatcacggtggcagcaacgtgtttgcgtattattcaagtctggaaaaccattacaataataagttcattgagaagatccgtggtgcaggcttcctgatgcacaccgtggaatgggtagctcgcgagaagattcatggaacgaactttagcgttatcattactccgaccgaaatcgtcccagccaaacgcacagggccgatcttggaaggcgagtcgttctttggtcacgaaattatcatgaaaaaatataaagactccttcgtgaaggtgcagaacatgctgaatgccatggatcttgttagcgtgcaaatctttggcgaatttgcgggtggtggcattcagaaaggcgtcgattacggagacaaagatttctatgtgtttgacatcctgtctgatagcgggaacgagaaagtttactgggatgactatcgcgtcgaatcgttttgcaccacgctcggtctgaaattagcgcctctgctgggacgtggtagtttcgctgaactgtcccagtacccaaacgatttcaaaagcattgtgaaccgttataatgaattggttgatacgacgggcctggaacatgccaataaacacgtctttggtccgcaagcgtcttctgaaactggcgtagcagaaggctacgttcttaaacccgtctatccgatcttctttaataacggtacgcgcgtggcgattaaatgcaagaactccaaattttcggagaaagccaagctggacaagccaattaaggcgaaggtggaactgacggagaacgataaacgtctgctcgaaatctttagcgagtatgttacctggaatcgcgtcagtaacgtactgtcacatattggctcagtgaccgcaaaagattttgggcgtgttatgggtctgacgatgaaagacatcattaatgaagcagcacgcgaaggccatgatctgttgttcgctgataacccgtcggcggtgaagaaagagctgaccattctcatccagaacacgattcgttccaaatggcacgaagttctggag

SEQ ID NO: 262 - protein, 346 aa, synthetic construct
  REGION 1..346: note = variant of RNA ligase 2 from Klebsiella phage KP179
MHHHHHHGGSNVFAYYSSLENHYNNKFIEKIRGAGFLMHTVEWVAREKIHGTNFSVIITPTEIVPAKRTGPILEGESFFGHEIIMKKYKDSFVKVQNMLNAMDLVSVQIFGEFAGGGIQKGVDYGDKDFYVFDILSDSGNEKVYWDDYRVESFCTTLGLKLAPLLGRGSFAELSQYPNDFKSIVNRYNELVDTTGLEHANKHVFGPQASSETGVAEGYVLKPVYPIFFNNGTRVAIKCKNSKFSEKAKLDKPIKAKVELTENDKRLLEIFSEYVTWNRVSNVLSHIGSVTAKDFGRVMGLTMKDIINEAAREGHDLLFADNPSAVKKELTILIQNTIRSKWHEVLE

SEQ ID NO: 263 - DNA, 1038 bp, synthetic construct
  misc_feature 1..1038: note = variant of RNA ligase 2 from Klebsiella phage KP179
  source 1..1038: mol_type = other DNA
atgcatcaccatcaccatcacggtggcagcaacctgtttgcgtattattcaagtctggaaaaccattacaatatgaagttcattgagaagatccgtggtgcaggcttcctgcgtcacaccgtggaatgggtagctcgcgagaagattcatggaacgaactttagcgttatcattactccgaccgaaatcgtcccagccaaacgcacagggccgatcttggaaggcgagtcgttctttggtcacgaaattatcatgaaaaaatataaagactccttcgtgaaggtgcagaacatgctgaatgccatggatcttgttagcgtgcaaatctttggcgaatttgcgggtggtggcattcagaaaggcgtcgattacggagacaaagatttctatgtgtttgacatcctgtctgatagcgggaacgagaaagtttactgggatgactatcgcgtcgaatcgttttgcaccacgctcggtctgaaattagcgcctctgctgggacgtggtagtttcgctgaactgtcccagtacccaaacgatttcaaaagcattgtgaaccgttataatgaattggttgatacgacgggcctggaacatgccaataaacacgtctttggtccgcaagcgtcttctgaaactggcgtagcagaaggctacgttcttaaacccgtctatccgatcttctttaataccggtacgcgcgtggcgattaaatgcaagaactccaaattttcggagaaagccaagctggacacgccaattaaggcgaaggtggaactgacggagaacgataaacgtctgctcgaaatctttagcgagtatgttacctggaatcgcgtcagtaacgtactgtcacatattggctcagtgaccgcaaaagattttgggcgtgttatgggtctgacgatgaaagacatcattaatgaagcagcacgcgaaggccatgatctgttgttcgctgataacccgtcggcggtgaagaaagagctgaccattctcatccagaacacgattcgttccaaatggcacgaagttctggag

SEQ ID NO: 264 - protein, 346 aa, synthetic construct
  REGION 1..346: note = variant of RNA ligase 2 from Klebsiella phage KP179
MHHHHHHGGSNLFAYYSSLENHYNMKFIEKIRGAGFLRHTVEWVAREKIHGTNFSVIITPTEIVPAKRTGPILEGESFFGHEIIMKKYKDSFVKVQNMLNAMDLVSVQIFGEFAGGGIQKGVDYGDKDFYVFDILSDSGNEKVYWDDYRVESFCTTLGLKLAPLLGRGSFAELSQYPNDFKSIVNRYNELVDTTGLEHANKHVFGPQASSETGVAEGYVLKPVYPIFFNTGTRVAIKCKNSKFSEKAKLDTPIKAKVELTENDKRLLEIFSEYVTWNRVSNVLSHIGSVTAKDFGRVMGLTMKDIINEAAREGHDLLFADNPSAVKKELTILIQNTIRSKWHEVLE

SEQ ID NO: 265 - DNA, 1038 bp, synthetic construct
  misc_feature 1..1038: note = variant of RNA ligase 2 from Klebsiella phage KP179
  source 1..1038: mol_type = other DNA
atgcatcaccatcaccatcacggtggcagcaacctgtttgcgtattattcaagtctggaaaaccattacaataacaagttcattgagaagatccgtggtgcaggcttcctgcgtcacaccgtggaatgggtagctcgcgagaagattcatggaacgaactttagcgttatcattactccgaccgaaatcgtcccagccaaacgcacagggccgatcttggaaggcgagtcgttctttggtcacgaaattatcatgaaaaaatataaagactccttcgtgaaggtgcagaacatgctgaatgccacggatcttgttagcgtgcaaatctttggcgaatttgcgggtggtggcattcagaaaggcgtcgattacggagacaaagatttctatgtgtttgacatcctgtctgatagcgggaacgagaaagtttactgggatgactatcgcgtcgaatcgttttgcaccacgctcggtctgaaattagcgcctctgctgggacgtggtagtttcgctgaactgtcccagtacccaaacgatttcaaaagcattgtgaaccgttataatgaattggttgatacgacgggcctggaacatgccaataaacacgtctttggtccgcaagcgtcttctgaaactggcgtagcagaaggctacgttcttaaacccgtctatccgatcttctttaataccggtacgcgcgtggcgattaaatgcaagaactccaaattttcggagaaagccaagctggacacgccaattaaggcggcggtggaactgacggagaacgataaacgtctgctcgaaatctttagcgagtatgttacctggaatcgcgtcagtaacgtactgtcacatattggctcagtgaccgcaaaagattttgggcgtgttatgggtctgacgatgaaagacatcattaatgaagcagcacgcgaaggccatgatctgttgttcgctgataacccgtcggcggtgaagaaagagctgaccattctcatccagaacacgattcgttccaaatggcacgaagttctggag

SEQ ID NO: 266 - protein, 346 aa, synthetic construct
  REGION 1..346: note = variant of RNA ligase 2 from Klebsiella phage KP179
MHHHHHHGGSNLFAYYSSLENHYNNKFIEKIRGAGFLRHTVEWVAREKIHGTNFSVIITPTEIVPAKRTGPILEGESFFGHEIIMKKYKDSFVKVQNMLNATDLVSVQIFGEFAGGGIQKGVDYGDKDFYVFDILSDSGNEKVYWDDYRVESFCTTLGLKLAPLLGRGSFAELSQYPNDFKSIVNRYNELVDTTGLEHANKHVFGPQASSETGVAEGYVLKPVYPIFFNTGTRVAIKCKNSKFSEKAKLDTPIKAAVELTENDKRLLEIFSEYVTWNRVSNVLSHIGSVTAKDFGRVMGLTMKDIINEAAREGHDLLFADNPSAVKKELTILIQNTIRSKWHEVLE

SEQ ID NO: 267 - DNA, 1038 bp, synthetic construct
  misc_feature 1..1038: note = variant of RNA ligase 2 from Klebsiella phage KP179
  source 1..1038: mol_type = other DNA
atgcatcaccatcaccatcacggtggcagcaacctgtttgcgtattattcaagtctggaaaaccattacaataataagttcattgagaagatccgtggtgcaggcttcctgatgcacaccgtggaatgggtagctcgcgagaagattcatggaacgaactttagcgttatcattactccgaccgaaatcgtcccagccaaacgcacagggccgatcttggaaggcgagtcgttctttggtcacgaaattatcatgaaaaaatataaagactccttcgtgaaggtgcagaacatgctgaatgccatggatcttgttagcgtgcaaatctttggcgaatttgcgggtggtggcattcagaaaggcgtcgattacggagacaaagatttctatgtgtttgacatcctgtctgatagcgggaacgagaaagtttactgggatgactatcgcgtcgaatcgttttgcaccacgctcggtctgaaattagcgcctctgctgggacgtggtagtttcgctgaactgtcccagtacccaaacgatttcaaaagcattgtgaaccgttataatgaattggttgatacgacgggcctggaacatgccaataaacacgtctttggtccgcaagcgtcttctgaaactggcgtagcagaaggctacgttcttaaacccgtctatccgatcttctttaataccggtacgcgcgtggcgattaaatgcaagaactccaaattttcggagaaagccaagctggacaaaccaattaaagcgaaagtggaactgacggagaacgataaacgtctgctcgaaatctttagcgagtatgttacctggaatcgcgtcagtaacgtactgtcacatattggctcagtgaccgcaaaagattttgggcgtgttatgggtctgacgatgaaagacatcattaatgaagcagcacgcgaaggccatgatctgttgttcgctgataacccgtcggcggtgaagaaagagctgaccattctcatccagaacacgattcgttccaaatggcacgaagttctggag

SEQ ID NO: 268 - protein, 346 aa, synthetic construct
  REGION 1..346: note = variant of RNA ligase 2 from Klebsiella phage KP179
MHHHHHHGGSNLFAYYSSLENHYNNKFIEKIRGAGFLMHTVEWVAREKIHGTNFSVIITPTEIVPAKRTGPILEGESFFGHEIIMKKYKDSFVKVQNMLNAMDLVSVQIFGEFAGGGIQKGVDYGDKDFYVFDILSDSGNEKVYWDDYRVESFCTTLGLKLAPLLGRGSFAELSQYPNDFKSIVNRYNELVDTTGLEHANKHVFGPQASSETGVAEGYVLKPVYPIFFNTGTRVAIKCKNSKFSEKAKLDKPIKAKVELTENDKRLLEIFSEYVTWNRVSNVLSHIGSVTAKDFGRVMGLTMKDIINEAAREGHDLLFADNPSAVKKELTILIQNTIRSKWHEVLE

SEQ ID NO: 269 - DNA, 1038 bp, synthetic construct
  misc_feature 1..1038: note = variant of RNA ligase 2 from Klebsiella phage KP179
  source 1..1038: mol_type = other DNA
atgcatcaccatcaccatcacggtggcagcaacgtgtttgcgtattattcaagtctggaaaaccattacaataataagttcattgagaagatccgtggtgcaggcttcctgatgcacaccgtggaatgggtagctcgcgagaagattcatggaacgaactttagcgttatcattactccgaccgaaatcgtcccagccaaacgcacagggccgatcttggaaggcgagtcgttctttggtcacgaaattatcatgaaaaaatataaagactccttcgtgaaggtgcagaacatgctgaatgccatggatcttgttagcgtgcaaatctttggcgaatttgcgggtggtggcattcagaaaggcgtcgattacggagacaaagatttctatgtgtttgacatcctgtctgatagcgggaacgagaaagtttactgggatgactatcgcgtcgaatcgttttgcaccacgctcggtctgaaattagcgcctctgctgggacgtggtagtttcgctgaactgtcccagtacccaaacgatttcaaaagcattgtgaaccgttataatgaattggttgatacgacgggcctggaacatgccaataaacacgtctttggtccgcaagcgtcttctgaaactggcgtagcagaaggctacgttcttaaacccgtctatccgatcttctttaataacggtacgcgcgtggcgattaaatgcaagaactccaaattttcggagaaagccaagctggacaagccaattaaggcggcggtggaactgacggagaacgataaacgtctgctcgaaatctttagcgagtatgttacctggaatcgcgtcagtaacgtactgtcacatattggctcagtgaccgcaaaagattttgggcgtgttatgggtctgacgatgaaagacatcattaatgaagcagcacgcgaaggccatgatctgttgttcgctgataacccgtcggcggtgaagaaagagctgaccattctcatccagaacacgattcgttccaaatggcacgaagttctggag

SEQ ID NO: 270 - protein, 346 aa, synthetic construct
  REGION 1..346: note = variant of RNA ligase 2 from Klebsiella phage KP179
MHHHHHHGGSNVFAYYSSLENHYNNKFIEKIRGAGFLMHTVEWVAREKIHGTNFSVIITPTEIVPAKRTGPILEGESFFGHEIIMKKYKDSFVKVQNMLNAMDLVSVQIFGEFAGGGIQKGVDYGDKDFYVFDILSDSGNEKVYWDDYRVESFCTTLGLKLAPLLGRGSFAELSQYPNDFKSIVNRYNELVDTTGLEHANKHVFGPQASSETGVAEGYVLKPVYPIFFNNGTRVAIKCKNSKFSEKAKLDKPIKAAVELTENDKRLLEIFSEYVTWNRVSNVLSHIGSVTAKDFGRVMGLTMKDIINEAAREGHDLLFADNPSAVKKELTILIQNTIRSKWHEVLE

SEQ ID NO: 271 - DNA, 1038 bp, synthetic construct
  misc_feature 1..1038: note = variant of RNA ligase 2 from Klebsiella phage KP179
  source 1..1038: mol_type = other DNA
atgcatcaccatcaccatcacggtggcagcaacatgtttgcgtattattcaagtctggaaaaccattacaataacaagttcattgagaagatccgtggtgcaggcttcctgcgtcacaccgtggaatgggtagctcgcgagaagattcatggaacgaactttagcgttatcattactccgaccgaaatcgtcccagccaaacgcacagggccgatcttggaaggcgagtcgttctttggtcacgaaattatcatgaaaaaatataaagactccttcgtgaaggtgcagaacatgctgaatgccatggatcttgttagcgtgcaaatctttggcgaatttgcgggtggtggcattcagaaaggcgtcgattacggagacaaagatttctatgtgtttgacatcctgtctgatagcgggaacgagaaagtttactgggatgactatcgcgtcgaatcgttttgcaccacgctcggtctgaaattagcgcctctgctgggacgtggtagtttcgctgaactgtcccagtacccaaacgatttcaaaagcattgtgaaccgttataatgaattggttgatacgacgggcctggaacatgccaataaacacgtctttggtccgcaagcgtcttctgaaactggcgtagcagaaggctacgttcttaaacccgtctatccgatcttctttaataccggtacgcgcgtggcgattaaatgcaagaactccaaattttcggagaaagccaagctggacaagccaattaaggcggcggtggaactgacggagaacgataaacgtctgctcgaaatctttagcgagtatgttacctggaatcgcgtcagtaacgtactgtcacatattggctcagtgaccgcaaaagattttgggcgtgttatgggtctgacgatgaaagacatcattaatgaagcagcacgcgaaggccatgatctgttgttcgctgataacccgtcggcggtgaagaaagagctgaccattctcatccagaacacgattcgttccaaatggcacgaagttctggag

SEQ ID NO: 272 - protein, 346 aa, synthetic construct
  REGION 1..346: note = variant of RNA ligase 2 from Klebsiella phage KP179
MHHHHHHGGSNMFAYYSSLENHYNNKFIEKIRGAGFLRHTVEWVAREKIHGTNFSVIITPTEIVPAKRTGPILEGESFFGHEIIMKKYKDSFVKVQNMLNAMDLVSVQIFGEFAGGGIQKGVDYGDKDFYVFDILSDSGNEKVYWDDYRVESFCTTLGLKLAPLLGRGSFAELSQYPNDFKSIVNRYNELVDTTGLEHANKHVFGPQASSETGVAEGYVLKPVYPIFFNTGTRVAIKCKNSKFSEKAKLDKPIKAAVELTENDKRLLEIFSEYVTWNRVSNVLSHIGSVTAKDFGRVMGLTMKDIINEAAREGHDLLFADNPSAVKKELTILIQNTIRSKWHEVLE

SEQ ID NO: 273 - DNA, 1038 bp, synthetic construct
  misc_feature 1..1038: note = variant of RNA ligase 2 from Klebsiella phage KP179
  source 1..1038: mol_type = other DNA
atgcatcaccatcaccatcacggtggcagcaacgtgtttgcgtattattcaagtctggaaaaccattacaataataagttcattgagaagatccgtggtgcaggcttcctgatgcacaccgtggaatgggtagctcgcgagaagattcatggaacgaactttagcgttatcattactccgaccgaaatcgtcccagccaaacgcacagggccgatcttggaaggcgagtcgttctttggtcacgaaattatcatgaaaaaatataaagactccttcgtgaaggtgcagaacatgctgaatgccatggatcttgttagcgtgcaaatctttggcgaatttgcgggtggtggcattcagaaaggcgtcgattacggagacaaagatttctatgtgtttgacatcctgtctgatagcgggaacgagaaagtttactgggatgactatcgcgtcgaatcgttttgcaccacgctcggtctgaaattagcgcctctgctgggacgtggtagtttcgctgaactgtcccagtacccaaacgatttcaaaagcattgtgaaccgttataatgaattggttgatacgacgggcctggaacatgccaataaacacgtctttggtccgcaagcgtcttctgaaactggcgtagcagaaggctacgttcttaaacccgtctatccgatcttctttaataccggtacgcgcgtggcaattaaatgcaagaactccaaattttcggagaaagccaagctggactcgccaattgtggcggcggtggaactgacggagaacgataaacgtctgctcgaaatctttagcgagtatgttacctggaatcgcgtcagtaacgtactgtcacatattggctcagtgaccgcaaaagattttgggcgtgttatgggtctgacgatgaaagacatcattaatgaagcagcacgcgaaggccatgatctgttgttcgctgataacccgtcggcggtgaagaaagagctgaccattctcatccagaacacgattcgttccaaatggcacgaagttctggag

SEQ ID NO: 274 - protein, 346 aa, synthetic construct
  REGION 1..346: note = variant of RNA ligase 2 from Klebsiella phage KP179
MHHHHHHGGSNVFAYYSSLENHYNNKFIEKIRGAGFLMHTVEWVAREKIHGTNFSVIITPTEIVPAKRTGPILEGESFFGHEIIMKKYKDSFVKVQNMLNAMDLVSVQIFGEFAGGGIQKGVDYGDKDFYVFDILSDSGNEKVYWDDYRVESFCTTLGLKLAPLLGRGSFAELSQYPNDFKSIVNRYNELVDTTGLEHANKHVFGPQASSETGVAEGYVLKPVYPIFFNTGTRVAIKCKNSKFSEKAKLDSPIVAAVELTENDKRLLEIFSEYVTWNRVSNVLSHIGSVTAKDFGRVMGLTMKDIINEAAREGHDLLFADNPSAVKKELTILIQNTIRSKWHEVLE

SEQ ID NO: 275 - DNA, 1038 bp, synthetic construct
  misc_feature 1..1038: note = variant of RNA ligase 2 from Klebsiella phage KP179
  source 1..1038: mol_type = other DNA
atgcatcaccatcaccatcacggtggcagcaacatgtttgcgtattattcaagtctggaaaaccattacaataataagttcattgagaagatccgtggtgcaggcttcctgatgcacaccgtggaatgggtagctcgcgagaagattcatggaacgaactttagcgttatcattactccgaccgaaatcgtcccagccaaacgcacagggccgatcttggaaggcgagtcgttctttggtcacgaaattatcatgaaaaaatataaagactccttcgtgaaggtgcagaacatgctgaatgccatggatcttgttagcgtgcaaatctttggcgaatttgcgggtggtggcattcagaaaggcgtcgattacggagacaaagatttctatgtgtttgacatcctgtctgatagcgggaacgagaaagtttactgggatgactatcgcgtcgaatcgttttgcaccacgctcggtctgaaattagcgcctctgctgggacgtggtagtttcgctgaactgtcccagtacccaaacgatttcaaaagcattgtgaaccgttataatgaattggttgatacgacgggcctggaacatgccaataaacacgtctttggtccgcaagcgtcttctgaaactggcgtagcagaaggctacgttcttaaacccgtctatccgatcttctttaataatggtacgcgcgtggcgattaaatgcaagaactccaaattttcggagaaagccaagctggacaagccaattaaggcggcggtggaactgacggagaacgataaacgtctgctcgaaatctttagcgagtatgttacctggaatcgcgtcagtaacgtactgtcacatattggctcagtgaccgcaaaagattttgggcgtgttatgggtctgacgatgaaagacatcattaatgaagcagcacgcgaaggccatgatctgttgttcgctgataacccgtcggcggtgaagaaagagctgaccattctcatccagaacacgattcgttccaaatggcacgaagttctggag

SEQ ID NO: 276 - protein, 346 aa, synthetic construct
  REGION 1..346: note = variant of RNA ligase 2 from Klebsiella phage KP179
MHHHHHHGGSNMFAYYSSLENHYNNKFIEKIRGAGFLMHTVEWVAREKIHGTNFSVIITPTEIVPAKRTGPILEGESFFGHEIIMKKYKDSFVKVQNMLNAMDLVSVQIFGEFAGGGIQKGVDYGDKDFYVFDILSDSGNEKVYWDDYRVESFCTTLGLKLAPLLGRGSFAELSQYPNDFKSIVNRYNELVDTTGLEHANKHVFGPQASSETGVAEGYVLKPVYPIFFNNGTRVAIKCKNSKFSEKAKLDKPIKAAVELTENDKRLLEIFSEYVTWNRVSNVLSHIGSVTAKDFGRVMGLTMKDIINEAAREGHDLLFADNPSAVKKELTILIQNTIRSKWHEVLE

SEQ ID NO: 277 - DNA, 1038 bp, synthetic construct
  misc_feature 1..1038: note = variant of RNA ligase 2 from Klebsiella phage KP179
  source 1..1038: mol_type = other DNA
atgcatcaccatcaccatcacggtggcagcaacacgtttgcgtattattcaagtctggaaaaccattacaataataagttcattgagaagatccgtggtgcaggcttcctgatgcacaccgtggaatgggtagctcgcgagaagattcatggaacgaactttagcgttatcattactccgaccgaaatcgtcccagccaaacgcacagggccgatcttggaaggcgagtcgttctttggtcacgaaattatcatgaaaaaatataaagactccttcgtgaaggtgcagaacatgctgaatgccatggatcttgttagcgtgcaaatctttggcgaatttgcgggtggtggcattcagaaaggcgtcgattacggagacaaagatttctatgtgtttgacatcctgtctgatagcgggaacgagaaagtttactgggatgactatcgcgtcgaatcgttttgcaccacgctcggtctgaaattagcgcctctgctgggacgtggtagtttcgctgaactgtcccagtacccaaacgatttcaaaagcattgtgaaccgttataatgaattggttgatacgacgggcctggaacatgccaataaacacgtctttggtccgcaagcgtcttctgaaactggcgtagcagaaggctacgttcttaaacccgtctatccgatcttctttaataccggtacgcgcgtggcgattaaatgcaagaactccaaattttcggagaaagccaagctggactcgccaattaaggcggcggtggaactgacggagaacgataaacgtctgctcgaaatctttagcgagtatgttacctggaatcgcgtcagtaacgtactgtcacatattggctcagtgaccgcaaaagattttgggcgtgttatgggtctgacgatgaaagacatcattaatgaagcagcacgcgaaggccatgatctgttgttcgctgataacccgtcggcggtgaagaaagagctgaccattctcatccagaacacgattcgttccaaatggcacgaagttctggag

SEQ ID NO: 278 - protein, 346 aa, synthetic construct
  REGION 1..346: note = variant of RNA ligase 2 from Klebsiella phage KP179
MHHHHHHGGSNTFAYYSSLENHYNNKFIEKIRGAGFLMHTVEWVAREKIHGTNFSVIITPTEIVPAKRTGPILEGESFFGHEIIMKKYKDSFVKVQNMLNAMDLVSVQIFGEFAGGGIQKGVDYGDKDFYVFDILSDSGNEKVYWDDYRVESFCTTLGLKLAPLLGRGSFAELSQYPNDFKSIVNRYNELVDTTGLEHANKHVFGPQASSETGVAEGYVLKPVYPIFFNTGTRVAIKCKNSKFSEKAKLDSPIKAAVELTENDKRLLEIFSEYVTWNRVSNVLSHIGSVTAKDFGRVMGLTMKDIINEAAREGHDLLFADNPSAVKKELTILIQNTIRSKWHEVLE

SEQ ID NO: 279 - DNA, 1038 bp, synthetic construct
  misc_feature 1..1038: note = variant of RNA ligase 2 from Klebsiella phage KP179
  source 1..1038: mol_type = other DNA
atgcatcaccatcaccatcacggtggcagcaacacgtttgcgtattattcaagtctggaaaaccattacaataataagttcattgagaagatccgtggtgcaggcttcctgatgcacaccgtggaatgggtagctcgcgagaagattcatggaacgaactttagcgttatcattactccgaccgaaatcgtcccagccaaacgcacagggccgatcttggaaggcgagtcgttctttggtcacgaaattatcatgaaaaaatataaagactccttcgtgaaggtgcagaacatgctgaatgccatggatcttgttagcgtgcaaatctttggcgaatttgcgggtggtggcattcagaaaggcgtcgattacggagacaaagatttctatgtgtttgacatcctgtctgatagcgggaacgagaaagtttactgggatgactatcgcgtcgaatcgttttgcaccacgctcggtctgaaattagcgcctctgctgggacgtggtagtttcgctgaactgtcccagtacccaaacgatttcaaaagcattgtgaaccgttataatgaattggttgatacgacgggcctggaacatgccaataaacacgtctttggtccgcaagcgtcttctgaaactggcgtagcagaaggctacgttcttaaacccgtctatccgatcttctttaataacggtacgcgcgtggcgattaaatgcaagaactccaaattttcggagaaagccaagctggacacgccaattaaggcgaaggtggaactgacggagaacgataaacgtctgctcgaaatctttagcgagtatgttacctggaatcgcgtcagtaacgtactgtcacatattggctcagtgaccgcaaaagattttgggcgtgttatgggtctgacgatgaaagacatcattaatgaagcagcacgcgaaggccatgatctgttgttcgctgataacccgtcggcggtgaagaaagagctgaccattctcatccagaacacgattcgttccaaatggcacgaagttctggag

SEQ ID NO: 280 - protein, 346 aa, synthetic construct
  REGION 1..346: note = variant of RNA ligase 2 from Klebsiella phage KP179
MHHHHHHGGSNTFAYYSSLENHYNNKFIEKIRGAGFLMHTVEWVAREKIHGTNFSVIITPTEIVPAKRTGPILEGESFFGHEIIMKKYKDSFVKVQNMLNAMDLVSVQIFGEFAGGGIQKGVDYGDKDFYVFDILSDSGNEKVYWDDYRVESFCTTLGLKLAPLLGRGSFAELSQYPNDFKSIVNRYNELVDTTGLEHANKHVFGPQASSETGVAEGYVLKPVYPIFFNNGTRVAIKCKNSKFSEKAKLDTPIKAKVELTENDKRLLEIFSEYVTWNRVSNVLSHIGSVTAKDFGRVMGLTMKDIINEAAREGHDLLFADNPSAVKKELTILIQNTIRSKWHEVLE

SEQ ID NO: 281 - DNA, 1038 bp, synthetic construct
  misc_feature 1..1038: note = variant of RNA ligase 2 from Klebsiella phage KP179
  source 1..1038: mol_type = other DNA
atgcatcaccatcaccatcacggtggcagcaacatgtttgcgtattattcaagtctggaaaaccattacaataataagttcattgagaagatccgtggtgcaggcttcctgatgcacaccgtggaatgggtagctcgcgagaagattcatggaacgaactttagcgttatcattactccgaccgaaatcgtcccagccaaacgcacagggccgatcttggaaggcgagtcgttctttggtcacgaaattatcatgaaaaaatataaagactccttcgtgaaggtgcagaacatgctgaatgccatggatcttgttagcgtgcaaatctttggcgaatttgcgggtggtggcattcagaaaggcgtcgattacggagacaaagatttctatgtgtttgacatcctgtctgatagcgggaacgagaaagtttactgggatgactatcgcgtcgaatcgttttgcaccacgctcggtctgaaattagcgcctctgctgggacgtggtagtttcgctgaactgtcccagtacccaaacgatttcaaaagcattgtgaaccgttataatgaattggttgatacgacgggcctggaacatgccaataaacacgtctttggtccgcaagcgtcttctgaaactggcgtagcagaaggctacgttcttaaacccgtctatccgatcttctttaataccggtacgcgcgtggcgattaaatgcaagaactccaaattttcggagaaagccaagctggactcgccaattctggcgaaggtggaactgacggagaacgataaacgtctgctcgaaatctttagcgagtatgttacctggaatcgcgtcagtaacgtactgtcacatattggctcagtgaccgcaaaagattttgggcgtgttatgggtctgacgatgaaagacatcattaatgaagcagcacgcgaaggccatgatctgttgttcgctgataacccgtcggcggtgaagaaagagctgaccattctcatccagaacacgattcgttccaaatggcacgaagttctggag

SEQ ID NO: 282 - protein, 346 aa, synthetic construct
  REGION 1..346: note = variant of RNA ligase 2 from Klebsiella phage KP179
MHHHHHHGGSNMFAYYSSLENHYNNKFIEKIRGAGFLMHTVEWVAREKIHGTNFSVIITPTEIVPAKRTGPILEGESFFGHEIIMKKYKDSFVKVQNMLNAMDLVSVQIFGEFAGGGIQKGVDYGDKDFYVFDILSDSGNEKVYWDDYRVESFCTTLGLKLAPLLGRGSFAELSQYPNDFKSIVNRYNELVDTTGLEHANKHVFGPQASSETGVAEGYVLKPVYPIFFNTGTRVAIKCKNSKFSEKAKLDSPILAKVELTENDKRLLEIFSEYVTWNRVSNVLSHIGSVTAKDFGRVMGLTMKDIINEAAREGHDLLFADNPSAVKKELTILIQNTIRSKWHEVLE

SEQ ID NO: 283 - DNA, 1038 bp, synthetic construct
  misc_feature 1..1038: note = variant of RNA ligase 2 from Klebsiella phage KP179
  source 1..1038: mol_type = other DNA
atgcatcaccatcaccatcacggtggcagcaacatgtttgcgtattattcaagtctggaaaaccattacaataataagttcattgagaagatccgtggtgcaggcttcctgatgcacaccgtggaatgggtagctcgcgagaagattcatggaacgaactttagcgttatcattactccgaccgaaatcgtcccagccaaacgcacagggccgatcttggaaggcgagtcgttctttggtcacgaaattatcatgaaaaaatataaagactccttcgtgaaggtgcagaacatgctgaatgccatggatcttgttagcgtgcaaatctttggcgaatttgcgggtggtggcattcagaaaggcgtcgattacggagacaaagatttctatgtgtttgacatcctgtctgatagcgggaacgagaaagtttactgggatgactatcgcgtcgaatcgttttgcaccacgctcggtctgaaattagcgcctctgctgggacgtggtagtttcgctgaactgtcccagtacccaaacgatttcaaaagcattgtgaaccgttataatgaattggttgatacgacgggcctggaacatgccaataaacacgtctttggtccgcaagcgtcttctgaaactggcgtagcagaaggctacgttcttaaacccgtctatccgatcttctttaataccggtacgcgcgtggcgattaaatgcaagaactccaaattttcggagaaagccaagctggacaagccaattgtggcgaaggtggaactgacggagaacgataaacgtctgctcgaaatctttagcgagtatgttacctggaatcgcgtcagtaacgtactgtcacatattggctcagtgaccgcaaaagattttgggcgtgttatgggtctgacgatgaaagacatcattaatgaagcagcacgcgaaggccatgatctgttgttcgctgataacccgtcggcggtgaagaaagagctgaccattctcatccagaacacgattcgttccaaatggcacgaagttctggag

SEQ ID NO: 284 - protein, 346 aa, synthetic construct
  REGION 1..346: note = variant of RNA ligase 2 from Klebsiella phage KP179
MHHHHHHGGSNMFAYYSSLENHYNNKFIEKIRGAGFLMHTVEWVAREKIHGTNFSVIITPTEIVPAKRTGPILEGESFFGHEIIMKKYKDSFVKVQNMLNAMDLVSVQIFGEFAGGGIQKGVDYGDKDFYVFDILSDSGNEKVYWDDYRVESFCTTLGLKLAPLLGRGSFAELSQYPNDFKSIVNRYNELVDTTGLEHANKHVFGPQASSETGVAEGYVLKPVYPIFFNTGTRVAIKCKNSKFSEKAKLDKPIVAKVELTENDKRLLEIFSEYVTWNRVSNVLSHIGSVTAKDFGRVMGLTMKDIINEAAREGHDLLFADNPSAVKKELTILIQNTIRSKWHEVLE

SEQ ID NO: 285 - DNA, 1038 bp, synthetic construct
  misc_feature 1..1038: note = variant of RNA ligase 2 from Klebsiella phage KP179
  source 1..1038: mol_type = other DNA
atgcatcaccatcaccatcacggtggcagcaacatgtttgcgtattattcaagtctggaaaaccattacaataataagttcattgagaagatccgtggtgcaggcttcctgatgcacaccgtggaatgggtagctcgcgagaagattcatggaacgaactttagcgttatcattactccgaccgaaatcgtcccagccaaacgcacagggccgatcttggaaggcgagtcgttctttggtcacgaaattatcatgaaaaaatataaagactccttcgtgaaggtgcagaacatgctgaatgccatggatcttgttagcgtgcaaatctttggcgaatttgcgggtggtggcattcagaaaggcgtcgattacggagacaaagatttctatgtgtttgacatcctgtctgatagcgggaacgagaaagtttactgggatgactatcgcgtcgaatcgttttgcaccacgctcggtctgaaattagcgcctctgctgggacgtggtagtttcgctgaactgtcccagtacccaaacgatttcaaaagcattgtgaaccgttataatgaattggttgatacgacgggcctggaacatgccaataaacacgtctttggtccgcaagcgtcttctgaaactggcgtagcagaaggctacgttcttaaacccgtctatccgatcttctttaataatggtacgcgcgtggcgattaaatgcaagaactccaaattttcggagaaagccaagctggactcgccaattctggcgaaggtggaactgacggagaacgataaacgtctgctcgaaatctttagcgagtatgttacctggaatcgcgtcagtaacgtactgtcacatattggctcagtgaccgcaaaagattttgggcgtgttatgggtctgacgatgaaagacatcattaatgaagcagcacgcgaaggccatgatctgttgttcgctgataacccgtcggcggtgaagaaagagctgaccattctcatccagaacacgattcgttccaaatggcacgaagttctggag

SEQ ID NO: 286 - protein, 346 aa, synthetic construct
  REGION 1..346: note = variant of RNA ligase 2 from Klebsiella phage KP179
MHHHHHHGGSNMFAYYSSLENHYNNKFIEKIRGAGFLMHTVEWVAREKIHGTNFSVIITPTEIVPAKRTGPILEGESFFGHEIIMKKYKDSFVKVQNMLNAMDLVSVQIFGEFAGGGIQKGVDYGDKDFYVFDILSDSGNEKVYWDDYRVESFCTTLGLKLAPLLGRGSFAELSQYPNDFKSIVNRYNELVDTTGLEHANKHVFGPQASSETGVAEGYVLKPVYPIFFNNGTRVAIKCKNSKFSEKAKLDSPILAKVELTENDKRLLEIFSEYVTWNRVSNVLSHIGSVTAKDFGRVMGLTMKDIINEAAREGHDLLFADNPSAVKKELTILIQNTIRSKWHEVLE

SEQ ID NO: 287 - DNA, 1038 bp, synthetic construct
  misc_feature 1..1038: note = variant of RNA ligase 2 from Klebsiella phage KP179
  source 1..1038: mol_type = other DNA
atgcatcaccatcaccatcacggtggcagcaacacgtttgcgtattattcaagtctggaaaaccattacaatctgaagttcattgagaagatccgtggtgcaggcttcctgatgcacaccgtggaatgggtagctcgcgagaagattcatggaacgaactttagcgttatcattactccgaccgaaatcgtcccagccaaacgcacagggccgatcttggaaggcgagtcgttctttggtcacgaaattatcatgaaaaaatataaagactccttcgtgaaggtgcagaacatgctgaatgccatggatcttgttagcgtgcaaatctttggcgaatttgcgggtggtggcattcagaaaggcgtcgattacggagacaaagatttctatgtgtttgacatcctgtctgatagcgggaacgagaaagtttactgggatgactatcgcgtcgaatcgttttgcaccacgctcggtctgaaattagcgcctctgctgggacgtggtagtttcgctgaactgtcccagtacccaaacgatttcaaaagcattgtgaaccgttataatgaattggttgatacgacgggcctggaacatgccaataaacacgtctttggtccgcaagcgtcttctgaaactggcgtagcagaaggctacgttcttaaacccgtctatccgatcttctttaataccggtacgcgcgtggcgattaaatgcaagaactccaaattttcggagaaagccaagctggacaaaccaattaaagcgaaagtggaactgacggagaacgataaacgtctgctcgaaatctttagcgagtatgttacctggaatcgcgtcagtaacgtactgtcacatattggctcagtgaccgcaaaagattttgggcgtgttatgggtctgacgatgaaagacatcattaatgaagcagcacgcgaaggccatgatctgttgttcgctgataacccgtcggcggtgaagaaagagctgaccattctcatccagaacacgattcgttccaaatggcacgaagttctggag

SEQ ID NO: 288 - protein, 346 aa, synthetic construct
  REGION 1..346: note = variant of RNA ligase 2 from Klebsiella phage KP179
MHHHHHHGGSNTFAYYSSLENHYNLKFIEKIRGAGFLMHTVEWVAREKIHGTNFSVIITPTEIVPAKRTGPILEGESFFGHEIIMKKYKDSFVKVQNMLNAMDLVSVQIFGEFAGGGIQKGVDYGDKDFYVFDILSDSGNEKVYWDDYRVESFCTTLGLKLAPLLGRGSFAELSQYPNDFKSIVNRYNELVDTTGLEHANKHVFGPQASSETGVAEGYVLKPVYPIFFNTGTRVAIKCKNSKFSEKAKLDKPIKAKVELTENDKRLLEIFSEYVTWNRVSNVLSHIGSVTAKDFGRVMGLTMKDIINEAAREGHDLLFADNPSAVKKELTILIQNTIRSKWHEVLE

SEQ ID NO: 289 - DNA, 1038 bp, synthetic construct
  misc_feature 1..1038: note = variant of RNA ligase 2 from Klebsiella phage KP179
  source 1..1038: mol_type = other DNA
atgcatcaccatcaccatcacggtggcagcaacgtgtttgcgtattattcaagtctggaaaaccattacaataataagttcattgagaagatccgtggtgcaggcttcctgatgcacaccgtggaatgggtagctcgcgagaagattcatggaacgaactttagcgttatcattactccgaccgaaatcgtcccagccaaacgcacagggccgatcttggaaggcgagtcgttctttggtcacgaaattatcatgaaaaaatataaagactccttcgtgaaggtgcagaacatgctgaatgccatggatcttgttagcgtgcaaatctttggcgaatttgcgggtggtggcattcagaaaggcgtcgattacggagacaaagatttctatgtgtttgacatcctgtctgatagcgggaacgagaaagtttactgggatgactatcgcgtcgaatcgttttgcaccacgctcggtctgaaattagcgcctctgctgggacgtggtagtttcgctgaactgtcccagtacccaaacgatttcaaaagcattgtgaaccgttataatgaattggttgatacgacgggcctggaacatgccaataaacacgtctttggtccgcaagcgtcttctgaaactggcgtagcagaaggctacgttcttaaacccgtctatccgatcttctttaataccggtacgcgcgtggcgattaaatgcaagaactccaaattttcggagaaagccaagctggactcgccaattctggcggcggtggaactgacggagaacgataaacgtctgctcgaaatctttagcgagtatgttacctggaatcgcgtcagtaacgtactgtcacatattggctcagtgaccgcaaaagattttgggcgtgttatgggtctgacgatgaaagacatcattaatgaagcagcacgcgaaggccatgatctgttgttcgctgataacccgtcggcggtgaagaaagagctgaccattctcatccagaacacgattcgttccaaatggcacgaagttctggag

SEQ ID NO: 290 - protein, 346 aa, synthetic construct
  REGION 1..346: note = variant of RNA ligase 2 from Klebsiella phage KP179
MHHHHHHGGSNVFAYYSSLENHYNNKFIEKIRGAGFLMHTVEWVAREKIHGTNFSVIITPTEIVPAKRTGPILEGESFFGHEIIMKKYKDSFVKVQNMLNAMDLVSVQIFGEFAGGGIQKGVDYGDKDFYVFDILSDSGNEKVYWDDYRVESFCTTLGLKLAPLLGRGSFAELSQYPNDFKSIVNRYNELVDTTGLEHANKHVFGPQASSETGVAEGYVLKPVYPIFFNTGTRVAIKCKNSKFSEKAKLDSPILAAVELTENDKRLLEIFSEYVTWNRVSNVLSHIGSVTAKDFGRVMGLTMKDIINEAAREGHDLLFADNPSAVKKELTILIQNTIRSKWHEVLE

SEQ ID NO: 291 - DNA, 1038 bp, synthetic construct
  misc_feature 1..1038: note = variant of RNA ligase 2 from Klebsiella phage KP179
  source 1..1038: mol_type = other DNA
atgcatcaccatcaccatcacggtggcagcaacatgtttgcgtattattcaagtctggaaaaccattacaataataagttcattgagaagatccgtggtgcaggcttcctgcgtcacaccgtggaatgggtagctcgcgagaagattcatggaacgaactttagcgttatcattactccgaccgaaatcgtcccagccaaacgcacagggccgatcttggaaggcgagtcgttctttggtcacgaaattatcatgaaaaaatataaagactccttcgtgaaggtgcagaacatgctgaatgccatggatcttgttagcgtgcaaatctttggcgaatttgcgggtggtggcattcagaaaggcgtcgattacggagacaaagatttctatgtgtttgacatcctgtctgatagcgggaacgagaaagtttactgggatgactatcgcgtcgaatcgttttgcaccacgctcggtctgaaattagcgcctctgctgggacgtggtagtttcgctgaactgtcccagtacccaaacgatttcaaaagcattgtgaaccgttataatgaattggttgatacgacgggcctggaacatgccaataaacacgtctttggtccgcaagcgtcttctgaaactggcgtagcagaaggctacgttcttaaacccgtctatccgatcttctttaataccggtacgcgcgtggcgattaaatgcaagaactccaaattttcggagaaagccaagctggacaaaccaattaaagcgaaagtggaactgacggagaacgataaacgtctgctcgaaatctttagcgagtatgttacctggaatcgcgtcagtaacgtactgtcacatattggctcagtgaccgcaaaagattttgggcgtgttatgggtctgacgatgaaagacatcattaatgaagcagcacgcgaaggccatgatctgttgttcgctgataacccgtcggcggtgaagaaagagctgaccattctcatccagaacacgattcgttccaaatggcacgaagttctggag

SEQ ID NO: 292 - protein, 346 aa, synthetic construct
  REGION 1..346: note = variant of RNA ligase 2 from Klebsiella phage KP179
MHHHHHHGGSNMFAYYSSLENHYNNKFIEKIRGAGFLRHTVEWVAREKIHGTNFSVIITPTEIVPAKRTGPILEGESFFGHEIIMKKYKDSFVKVQNMLNAMDLVSVQIFGEFAGGGIQKGVDYGDKDFYVFDILSDSGNEKVYWDDYRVESFCTTLGLKLAPLLGRGSFAELSQYPNDFKSIVNRYNELVDTTGLEHANKHVFGPQASSETGVAEGYVLKPVYPIFFNTGTRVAIKCKNSKFSEKAKLDKPIKAKVELTENDKRLLEIFSEYVTWNRVSNVLSHIGSVTAKDFGRVMGLTMKDIINEAAREGHDLLFADNPSAVKKELTILIQNTIRSKWHEVLE

SEQ ID NO: 293 - DNA, 1038 bp, synthetic construct
  misc_feature 1..1038: note = variant of RNA ligase 2 from Klebsiella phage KP179
  source 1..1038: mol_type = other DNA
atgcatcaccatcaccatcacggtggcagcaacacgtttgcgtattattcaagtctggaaaaccattacaataataagttcattgagaagatccgtggtgcaggcttcctgatgcacaccgtggaatgggtagctcgcgagaagattcatggaacgaactttagcgttatcattactccgaccgaaatcgtcccagccaaacgcacagggccgatcttggaaggcgagtcgttctttggtcacgaaattatcatgaaaaaatataaagactccttcgtgaaggtgcagaacatgctgaatgccatggatcttgttagcgtgcaaatctttggcgaatttgcgggtggtggcattcagaaaggcgtcgattacggagacaaagatttctatgtgtttgacatcctgtctgatagcgggaacgagaaagtttactgggatgactatcgcgtcgaatcgttttgcaccacgctcggtctgaaattagcgcctctgctgggacgtggtagtttcgctgaactgtcccagtacccaaacgatttcaaaagcattgtgaaccgttataatgaattggttgatacgacgggcctggaacatgccaataaacacgtctttggtccgcaagcgtcttctgaaactggcgtagcagaaggctacgttcttaaacccgtctatccgatcttctttaataacggtacgcgcgtggcgattaaatgcaagaactccaaattttcggagaaagccaagctggactcgccaattaaggcgaaggtggaactgacggagaacgataaacgtctgctcgaaatctttagcgagtatgttacctggaatcgcgtcagtaacgtactgtcacatattggctcagtgaccgcaaaagattttgggcgtgttatgggtctgacgatgaaagacatcattaatgaagcagcacgcgaaggccatgatctgttgttcgctgataacccgtcggcggtgaagaaagagctgaccattctcatccagaacacgattcgttccaaatggcacgaagttctggag

SEQ ID NO: 294 - protein, 346 aa, synthetic construct
  REGION 1..346: note = variant of RNA ligase 2 from Klebsiella phage KP179
MHHHHHHGGSNTFAYYSSLENHYNNKFIEKIRGAGFLMHTVEWVAREKIHGTNFSVIITPTEIVPAKRTGPILEGESFFGHEIIMKKYKDSFVKVQNMLNAMDLVSVQIFGEFAGGGIQKGVDYGDKDFYVFDILSDSGNEKVYWDDYRVESFCTTLGLKLAPLLGRGSFAELSQYPNDFKSIVNRYNELVDTTGLEHANKHVFGPQASSETGVAEGYVLKPVYPIFFNNGTRVAIKCKNSKFSEKAKLDSPIKAKVELTENDKRLLEIFSEYVTWNRVSNVLSHIGSVTAKDFGRVMGLTMKDIINEAAREGHDLLFADNPSAVKKELTILIQNTIRSKWHEVLE

SEQ ID NO: 295 - DNA, 1038 bp, synthetic construct
  misc_feature 1..1038: note = variant of RNA ligase 2 from Klebsiella phage KP179
  source 1..1038: mol_type = other DNA
atgcatcaccatcaccatcacggtggcagcaacatgtttgcgtattattcaagtctggaaaaccattacaataataagttcattgagaagatccgtggtgcaggcttcctgcgtcacaccgtggaatgggtagctcgcgagaagattcatggaacgaactttagcgttatcattactccgaccgaaatcgtcccagccaaacgcacagggccgatcttggaaggcgagtcgttctttggtcacgaaattatcatgaaaaaatataaagactccttcgtgaaggtgcagaacatgctgaatgccatggatcttgttagcgtgcaaatctttggcgaatttgcgggtggtggcattcagaaaggcgtcgattacggagacaaagatttctatgtgtttgacatcctgtctgatagcgggaacgagaaagtttactgggatgactatcgcgtcgaatcgttttgcaccacgctcggtctgaaattagcgcctctgctgggacgtggtagtttcgctgaactgtcccagtacccaaacgatttcaaaagcattgtgaaccgttataatgaattggttgatacgacgggcctggaacatgccaataaacacgtctttggtccgcaagcgtcttctgaaactggcgtagcagaaggctacgttcttaaacccgtctatccgatcttctttaataacggtacgcgcgtggcgattaaatgcaagaactccaaattttcggagaaagccaagctggacacgccaattaaggcgaaggtggaactgacggagaacgataaacgtctgctcgaaatctttagcgagtatgttacctggaatcgcgtcagtaacgtactgtcacatattggctcagtgaccgcaaaagattttgggcgtgttatgggtctgacgatgaaagacatcattaatgaagcagcacgcgaaggccatgatctgttgttcgctgataacccgtcggcggtgaagaaagagctgaccattctcatccagaacacgattcgttccaaatggcacgaagttctggag

SEQ ID NO: 296 - protein, 346 aa, synthetic construct
  REGION 1..346: note = variant of RNA ligase 2 from Klebsiella phage KP179
MHHHHHHGGSNMFAYYSSLENHYNNKFIEKIRGAGFLRHTVEWVAREKIHGTNFSVIITPTEIVPAKRTGPILEGESFFGHEIIMKKYKDSFVKVQNMLNAMDLVSVQIFGEFAGGGIQKGVDYGDKDFYVFDILSDSGNEKVYWDDYRVESFCTTLGLKLAPLLGRGSFAELSQYPNDFKSIVNRYNELVDTTGLEHANKHVFGPQASSETGVAEGYVLKPVYPIFFNNGTRVAIKCKNSKFSEKAKLDTPIKAKVELTENDKRLLEIFSEYVTWNRVSNVLSHIGSVTAKDFGRVMGLTMKDIINEAAREGHDLLFADNPSAVKKELTILIQNTIRSKWHEVLE

SEQ ID NO: 297 - DNA, 1038 bp, synthetic construct
  misc_feature 1..1038: note = variant of RNA ligase 2 from Klebsiella phage KP179
  source 1..1038: mol_type = other DNA
atgcatcaccatcaccatcacggtggcagcaacgtgtttgcgtattattcaagtctggaaaaccattacaataataagttcattgagaagatccgtggtgcaggcttcctgatgcacaccgtggaatgggtagctcgcgagaagattcatggaacgaactttagcgttatcattactccgaccgaaatcgtcccagccaaacgcacagggccgatcttggaaggcgagtcgttctttggtcacgaaattatcatgaaaaaatataaagactccttcgtgaaggtgcagaacatgctgaatgccatggatcttgttagcgtgcaaatctttggcgaatttgcgggtggtggcattcagaaaggcgtcgattacggagacaaagatttctatgtgtttgacatcctgtctgatagcgggaacgagaaagtttactgggatgactatcgcgtcgaatcgttttgcaccacgctcggtctgaaattagcgcctctgctgggacgtggtagtttcgctgaactgtcccagtacccaaacgatttcaaaagcattgtgaaccgttataatgaattggttgatacgacgggcctggaacatgccaataaacacgtctttggtccgcaagcgtcttctgaaactggcgtagcagaaggctacgttcttaaacccgtctatccgatcttctttaataccggtacgcgcgtggcgattaaatgcaagaactccaaattttcggagaaagccaagctggactcgccaattaaggcggcggtggaactgacggagaacgataaacgtctgctcgaaatctttagcgagtatgttacctggaatcgcgtcagtaacgtactgtcacatattggctcagtgaccgcaaaagattttgggcgtgttatgggtctgacgatgaaagacatcattaatgaagcagcacgcgaaggccatgatctgttgttcgctgataacccgtcggcggtgaagaaagagctgaccattctcatccagaacacgattcgttccaaatggcacgaagttctggag

SEQ ID NO: 298 - protein, 346 aa, synthetic construct
  REGION 1..346: note = variant of RNA ligase 2 from Klebsiella phage KP179
MHHHHHHGGSNVFAYYSSLENHYNNKFIEKIRGAGFLMHTVEWVAREKIHGTNFSVIITPTEIVPAKRTGPILEGESFFGHEIIMKKYKDSFVKVQNMLNAMDLVSVQIFGEFAGGGIQKGVDYGDKDFYVFDILSDSGNEKVYWDDYRVESFCTTLGLKLAPLLGRGSFAELSQYPNDFKSIVNRYNELVDTTGLEHANKHVFGPQASSETGVAEGYVLKPVYPIFFNTGTRVAIKCKNSKFSEKAKLDSPIKAAVELTENDKRLLEIFSEYVTWNRVSNVLSHIGSVTAKDFGRVMGLTMKDIINEAAREGHDLLFADNPSAVKKELTILIQNTIRSKWHEVLE

SEQ ID NO: 299 - DNA, 1038 bp, synthetic construct
  misc_feature 1..1038: note = variant of RNA ligase 2 from Klebsiella phage KP179
  source 1..1038: mol_type = other DNA
atgcatcaccatcaccatcacggtggcagcaacctgtttgcgtattattcaagtctggaaaaccattacaataataagttcattgagaagatccgtggtgcaggcttcctgatgcacaccgtggaatgggtagctcgcgagaagattcatggaacgaactttagcgttatcattactccgaccgaaatcgtcccagccaaacgcacagggccgatcttggaaggcgagtcgttctttggtcacgaaattatcatgaaaaaatataaagactccttcgtgaaggtgcagaacatgctgaatgccatggatcttgttagcgtgcaaatctttggcgaatttgcgggtggtggcattcagaaaggcgtcgattacggagacaaagatttctatgtgtttgacatcctgtctgatagcgggaacgagaaagtttactgggatgactatcgcgtcgaatcgttttgcaccacgctcggtctgaaattagcgcctctgctgggacgtggtagtttcgctgaactgtcccagtacccaaacgatttcaaaagcattgtgaaccgttataatgaattggttgatacgacgggcctggaacatgccaataaacacgtctttggtccgcaagcgtcttctgaaactggcgtagcagaaggctacgttcttaaacccgtctatccgatcttctttaataccggtacgcgcgtggcgattaaatgcaagaactccaaattttcggagaaagccaagctggacacgccaattgtggcggcggtggaactgacggagaacgataaacgtctgctcgaaatctttagcgagtatgttacctggaatcgcgtcagtaacgtactgtcacatattggctcagtgaccgcaaaagattttgggcgtgttatgggtctgacgatgaaagacatcattaatgaagcagcacgcgaaggccatgatctgttgttcgctgataacccgtcggcggtgaagaaagagctgaccattctcatccagaacacgattcgttccaaatggcacgaagttctggag

SEQ ID NO: 300 - protein, 346 aa, synthetic construct
  REGION 1..346: note = variant of RNA ligase 2 from Klebsiella phage KP179
MHHHHHHGGSNLFAYYSSLENHYNNKFIEKIRGAGFLMHTVEWVAREKIHGTNFSVIITPTEIVPAKRTGPILEGESFFGHEIIMKKYKDSFVKVQNMLNAMDLVSVQIFGEFAGGGIQKGVDYGDKDFYVFDILSDSGNEKVYWDDYRVESFCTTLGLKLAPLLGRGSFAELSQYPNDFKSIVNRYNELVDTTGLEHANKHVFGPQASSETGVAEGYVLKPVYPIFFNTGTRVAIKCKNSKFSEKAKLDTPIVAAVELTENDKRLLEIFSEYVTWNRVSNVLSHIGSVTAKDFGRVMGLTMKDIINEAAREGHDLLFADNPSAVKKELTILIQNTIRSKWHEVLE

SEQ ID NO: 301 - DNA, 1038 bp, synthetic construct
  misc_feature 1..1038: note = variant of RNA ligase 2 from Klebsiella phage KP179
  source 1..1038: mol_type = other DNA
atgcatcaccatcaccatcacggtggcagcaacacgtttgcgtattattcaagtctggaaaaccattacaataacaagttcattgagaagatccgtggtgcaggcttcctgcgtcacaccgtggaatgggtagctcgcgagaagattcatggaacgaactttagcgttatcattactccgaccgaaatcgtcccagccaaacgcacagggccgatcttggaaggcgagtcgttctttggtcacgaaattatcatgaaaaaatataaagactccttcgtgaaggtgcagaacatgctgaatgccatggatcttgttagcgtgcaaatctttggcgaatttgcgggtggtggcattcagaaaggcgtcgattacggagacaaagatttctatgtgtttgacatcctgtctgatagcgggaacgagaaagtttactgggatgactatcgcgtcgaatcgttttgcaccacgctcggtctgaaattagcgcctctgctgggacgtggtagtttcgctgaactgtcccagtacccaaacgatttcaaaagcattgtgaaccgttataatgaattggttgatacgacgggcctggaacatgccaataaacacgtctttggtccgcaagcgtcttctgaaactggcgtagcagaaggctacgttcttaaacccgtctatccgatcttctttaataccggtacgcgcgtggcgattaaatgcaagaactccaaattttcggagaaagccaagctggacaagccaattaaggcggcggtggaactgacggagaacgataaacgtctgctcgaaatctttagcgagtatgttacctggaatcgcgtcagtaacgtactgtcacatattggctcagtgaccgcaaaagattttgggcgtgttatgggtctgacgatgaaagacatcattaatgaagcagcacgcgaaggccatgatctgttgttcgctgataacccgtcggcggtgaagaaagagctgaccattctcatccagaacacgattcgttccaaatggcacgaagttctggag

SEQ ID NO: 302 - protein, 346 aa, synthetic construct
  REGION 1..346: note = variant of RNA ligase 2 from Klebsiella phage KP179
MHHHHHHGGSNTFAYYSSLENHYNNKFIEKIRGAGFLRHTVEWVAREKIHGTNFSVIITPTEIVPAKRTGPILEGESFFGHEIIMKKYKDSFVKVQNMLNAMDLVSVQIFGEFAGGGIQKGVDYGDKDFYVFDILSDSGNEKVYWDDYRVESFCTTLGLKLAPLLGRGSFAELSQYPNDFKSIVNRYNELVDTTGLEHANKHVFGPQASSETGVAEGYVLKPVYPIFFNTGTRVAIKCKNSKFSEKAKLDKPIKAAVELTENDKRLLEIFSEYVTWNRVSNVLSHIGSVTAKDFGRVMGLTMKDIINEAAREGHDLLFADNPSAVKKELTILIQNTIRSKWHEVLE

SEQ ID NO: 303 - DNA, 1038 bp, synthetic construct
  misc_feature 1..1038: note = variant of RNA ligase 2 from Klebsiella phage KP179
  source 1..1038: mol_type = other DNA
atgcatcaccatcaccatcacggtggcagcaacctgtttgcgtattattcaagtctggaaaaccattacaataataagttcattgagaagatccgtggtgcaggcttcctgatgcacaccgtggaatgggtagctcgcgagaagattcatggaacgaactttagcgttatcattactccgaccgaaatcgtcccagccaaacgcacagggccgatcttggaaggcgagtcgttctttggtcacgaaattatcatgaaaaaatataaagactccttcgtgaaggtgcagaacatgctgaatgccatggatcttgttagcgtgcaaatctttggcgaatttgcgggtggtggcattcagaaaggcgtcgattacggagacaaagatttctatgtgtttgacatcctgtctgatagcgggaacgagaaagtttactgggatgactatcgcgtcgaatcgttttgcaccacgctcggtctgaaattagcgcctctgctgggacgtggtagtttcgctgaactgtcccagtacccaaacgatttcaaaagcattgtgaaccgttataatgaattggttgatacgacgggcctggaacatgccaataaacacgtctttggtccgcaagcgtcttctgaaactggcgtagcagaaggctacgttcttaaacccgtctatccgatcttctttaataccggtacgcgcgtggcgattaaatgcaagaactccaaattttcggagaaagccaagctggacaagccaattaaggcggcggtggaactgacggagaacgataaacgtctgctcgaaatctttagcgagtatgttacctggaatcgcgtcagtaacgtactgtcacatattggctcagtgaccgcaaaagattttgggcgtgttatgggtctgacgatgaaagacatcattaatgaagcagcacgcgaaggccatgatctgttgttcgctgataacccgtcggcggtgaagaaagagctgaccattctcatccagaacacgattcgttccaaatggcacgaagttctggag

SEQ ID NO: 304 - protein, 346 aa, synthetic construct
  REGION 1..346: note = variant of RNA ligase 2 from Klebsiella phage KP179
MHHHHHHGGSNLFAYYSSLENHYNNKFIEKIRGAGFLMHTVEWVAREKIHGTNFSVIITPTEIVPAKRTGPILEGESFFGHEIIMKKYKDSFVKVQNMLNAMDLVSVQIFGEFAGGGIQKGVDYGDKDFYVFDILSDSGNEKVYWDDYRVESFCTTLGLKLAPLLGRGSFAELSQYPNDFKSIVNRYNELVDTTGLEHANKHVFGPQASSETGVAEGYVLKPVYPIFFNTGTRVAIKCKNSKFSEKAKLDKPIKAAVELTENDKRLLEIFSEYVTWNRVSNVLSHIGSVTAKDFGRVMGLTMKDIINEAAREGHDLLFADNPSAVKKELTILIQNTIRSKWHEVLE

SEQ ID NO: 305 - DNA, 1038 bp, synthetic construct
  misc_feature 1..1038: note = variant of RNA ligase 2 from Klebsiella phage KP179
  source 1..1038: mol_type = other DNA
atgcatcaccatcaccatcacggtggcagcaacatgtttgcgtattattcaagtctggaaaaccattacaataataagttcattgagaagatccgtggtgcaggcttcctgatgcacaccgtggaatgggtagctcgcgagaagattcatggaacgaactttagcgttatcattactccgaccgaaatcgtcccagccaaacgcacagggccgatcttggaaggcgagtcgttctttggtcacgaaattatcatgaaaaaatataaagactccttcgtgaaggtgcagaacatgctgaatgccacggatcttgttagcgtgcaaatctttggcgaatttgcgggtggtggcattcagaaaggcgtcgattacggagacaaagatttctatgtgtttgacatcctgtctgatagcgggaacgagaaagtttactgggatgactatcgcgtcgaatcgttttgcaccacgctcggtctgaaattagcgcctctgctgggacgtggtagtttcgctgaactgtcccagtacccaaacgatttcaaaagcattgtgaaccgttataatgaattggttgatacgacgggcctggaacatgccaataaacacgtctttggtccgcaagcgtcttctgaaactggcgtagcagaaggctacgttcttaaacccgtctatccgatcttctttaataacggtacgcgcgtggcgattaaatgcaagaactccaaattttcggagaaagccaagctggacaagccaattaaggcgaaggtggaactgacggagaacgataaacgtctgctcgaaatctttagcgagtatgttacctggaatcgcgtcagtaacgtactgtcacatattggctcagtgaccgcaaaagattttgggcgtgttatgggtctgacgatgaaagacatcattaatgaagcagcacgcgaaggccatgatctgttgttcgctgataacccgtcggcggtgaagaaagagctgaccattctcatccagaacacgattcgttccaaatggcacgaagttctggag

SEQ ID NO: 306 - protein, 346 aa, synthetic construct
  REGION 1..346: note = variant of RNA ligase 2 from Klebsiella phage KP179
MHHHHHHGGSNMFAYYSSLENHYNNKFIEKIRGAGFLMHTVEWVAREKIHGTNFSVIITPTEIVPAKRTGPILEGESFFGHEIIMKKYKDSFVKVQNMLNATDLVSVQIFGEFAGGGIQKGVDYGDKDFYVFDILSDSGNEKVYWDDYRVESFCTTLGLKLAPLLGRGSFAELSQYPNDFKSIVNRYNELVDTTGLEHANKHVFGPQASSETGVAEGYVLKPVYPIFFNNGTRVAIKCKNSKFSEKAKLDKPIKAKVELTENDKRLLEIFSEYVTWNRVSNVLSHIGSVTAKDFGRVMGLTMKDIINEAAREGHDLLFADNPSAVKKELTILIQNTIRSKWHEVLE

SEQ ID NO: 307 - DNA, 1038 bp, synthetic construct
  misc_feature 1..1038: note = variant of RNA ligase 2 from Klebsiella phage KP179
  source 1..1038: mol_type = other DNA
atgcatcaccatcaccatcacggtggcagcaacatgtttgcgtattattcaagtctggaaaaccattacaataataagttcattgagaagatccgtggtgcaggcttcctgatgcacaccgtggaatgggtagctcgcgagaagattcatggaacgaactttagcgttatcattactccgaccgaaatcgtcccagccaaacgcacagggccgatcttggaaggcgagtcgttctttggtcacgaaattatcatgaaaaaatataaagactccttcgtgaaggtgcagaacatgctgaatgccatggatcttgttagcgtgcaaatctttggcgaatttgcgggtggtggcattcagaaaggcgtcgattacggagacaaagatttctatgtgtttgacatcctgtctgatagcgggaacgagaaagtttactgggatgactatcgcgtcgaatcgttttgcaccacgctcggtctgaaattagcgcctctgctgggacgtggtagtttcgctgaactgtcccagtacccaaacgatttcaaaagcattgtgaaccgttataatgaattggttgatacgacgggcctggaacatgccaataaacacgtctttggtccgcaagcgtcttctgaaactggcgtagcagaaggctacgttcttaaacccgtctatccgatcttctttaataacggtacgcgcgtggcgattaaatgcaagaactccaaattttcggagaaagccaagctggacacgccaattaaggcgaaggtggaactgacggagaacgataaacgtctgctcgaaatctttagcgagtatgttacctggaatcgcgtcagtaacgtactgtcacatattggctcagtgaccgcaaaagattttgggcgtgttatgggtctgacgatgaaagacatcattaatgaagcagcacgcgaaggccatgatctgttgttcgctgataacccgtcggcggtgaagaaagagctgaccattctcatccagaacacgattcgttccaaatggcacgaagttctggag

SEQ ID NO: 308 - protein, 346 aa, synthetic construct
  REGION 1..346: note = variant of RNA ligase 2 from Klebsiella phage KP179
MHHHHHHGGSNMFAYYSSLENHYNNKFIEKIRGAGFLMHTVEWVAREKIHGTNFSVIITPTEIVPAKRTGPILEGESFFGHEIIMKKYKDSFVKVQNMLNAMDLVSVQIFGEFAGGGIQKGVDYGDKDFYVFDILSDSGNEKVYWDDYRVESFCTTLGLKLAPLLGRGSFAELSQYPNDFKSIVNRYNELVDTTGLEHANKHVFGPQASSETGVAEGYVLKPVYPIFFNNGTRVAIKCKNSKFSEKAKLDTPIKAKVELTENDKRLLEIFSEYVTWNRVSNVLSHIGSVTAKDFGRVMGLTMKDIINEAAREGHDLLFADNPSAVKKELTILIQNTIRSKWHEVLE

SEQ ID NO: 309 - DNA, 1038 bp, synthetic construct
  misc_feature 1..1038: note = variant of RNA ligase 2 from Klebsiella phage KP179
  source 1..1038: mol_type = other DNA
atgcatcaccatcaccatcacggtggcagcaacgtgtttgcgtattattcaagtctggaaaaccattacaatatgaagttcattgagaagatccgtggtgcaggcttcctgatgcacaccgtggaatgggtagctcgcgagaagattcatggaacgaactttagcgttatcattactccgaccgaaatcgtcccagccaaacgcacagggccgatcttggaaggcgagtcgttctttggtcacgaaattatcatgaaaaaatataaagactccttcgtgaaggtgcagaacatgctgaatgccatggatcttgttagcgtgcaaatctttggcgaatttgcgggtggtggcattcagaaaggcgtcgattacggagacaaagatttctatgtgtttgacatcctgtctgatagcgggaacgagaaagtttactgggatgactatcgcgtcgaatcgttttgcaccacgctcggtctgaaattagcgcctctgctgggacgtggtagtttcgctgaactgtcccagtacccaaacgatttcaaaagcattgtgaaccgttataatgaattggttgatacgacgggcctggaacatgccaataaacacgtctttggtccgcaagcgtcttctgaaactggcgtagcagaaggctacgttcttaaacccgtctatccgatcttctttaataacggtacgcgcgtggcgattaaatgcaagaactccaaattttcggagaaagccaagctggacacgccaattaaggcggcggtggaactgacggagaacgataaacgtctgctcgaaatctttagcgagtatgttacctggaatcgcgtcagtaacgtactgtcacatattggctcagtgaccgcaaaagattttgggcgtgttatgggtctgacgatgaaagacatcattaatgaagcagcacgcgaaggccatgatctgttgttcgctgataacccgtcggcggtgaagaaagagctgaccattctcatccagaacacgattcgttccaaatggcacgaagttctggag

SEQ ID NO: 310 - protein, 346 aa, synthetic construct
  REGION 1..346: note = variant of RNA ligase 2 from Klebsiella phage KP179
MHHHHHHGGSNVFAYYSSLENHYNMKFIEKIRGAGFLMHTVEWVAREKIHGTNFSVIITPTEIVPAKRTGPILEGESFFGHEIIMKKYKDSFVKVQNMLNAMDLVSVQIFGEFAGGGIQKGVDYGDKDFYVFDILSDSGNEKVYWDDYRVESFCTTLGLKLAPLLGRGSFAELSQYPNDFKSIVNRYNELVDTTGLEHANKHVFGPQASSETGVAEGYVLKPVYPIFFNNGTRVAIKCKNSKFSEKAKLDTPIKAAVELTENDKRLLEIFSEYVTWNRVSNVLSHIGSVTAKDFGRVMGLTMKDIINEAAREGHDLLFADNPSAVKKELTILIQNTIRSKWHEVLE

SEQ ID NO: 311 - DNA, 1038 bp, synthetic construct
  misc_feature 1..1038: note = variant of RNA ligase 2 from Klebsiella phage KP179
  source 1..1038: mol_type = other DNA
atgcatcaccatcaccatcacggtggcagcaacacgtttgcgtattattcaagtctggaaaaccattacaataataagttcattgagaagatccgtggtgcaggcttcctgatgcacaccgtggaatgggtagctcgcgagaagattcatggaacgaactttagcgttatcattactccgaccgaaatcgtcccagccaaacgcacagggccgatcttggaaggcgagtcgttctttggtcacgaaattatcatgaaaaaatataaagactccttcgtgaaggtgcagaacatgctgaatgccacggatcttgttagcgtgcaaatctttggcgaatttgcgggtggtggcattcagaaaggcgtcgattacggagacaaagatttctatgtgtttgacatcctgtctgatagcgggaacgagaaagtttactgggatgactatcgcgtcgaatcgttttgcaccacgctcggtctgaaattagcgcctctgctgggacgtggtagtttcgctgaactgtcccagtacccaaacgatttcaaaagcattgtgaaccgttataatgaattggttgatacgacgggcctggaacatgccaataaacacgtctttggtccgcaagcgtcttctgaaactggcgtagcagaaggctacgttcttaaacccgtctatccgatcttctttaataacggtacgcgcgtggcgattaaatgcaagaactccaaattttcggagaaagccaagctggacaagccaattaaggcggcggtggaactgacggagaacgataaacgtctgctcgaaatctttagcgagtatgttacctggaatcgcgtcagtaacgtactgtcacatattggctcagtgaccgcaaaagattttgggcgtgttatgggtctgacgatgaaagacatcattaatgaagcagcacgcgaaggccatgatctgttgttcgctgataacccgtcggcggtgaagaaagagctgaccattctcatccagaacacgattcgttccaaatggcacgaagttctggag

SEQ ID NO: 312 - protein, 346 aa, synthetic construct
  REGION 1..346: note = variant of RNA ligase 2 from Klebsiella phage KP179
MHHHHHHGGSNTFAYYSSLENHYNNKFIEKIRGAGFLMHTVEWVAREKIHGTNFSVIITPTEIVPAKRTGPILEGESFFGHEIIMKKYKDSFVKVQNMLNATDLVSVQIFGEFAGGGIQKGVDYGDKDFYVFDILSDSGNEKVYWDDYRVESFCTTLGLKLAPLLGRGSFAELSQYPNDFKSIVNRYNELVDTTGLEHANKHVFGPQASSETGVAEGYVLKPVYPIFFNNGTRVAIKCKNSKFSEKAKLDKPIKAAVELTENDKRLLEIFSEYVTWNRVSNVLSHIGSVTAKDFGRVMGLTMKDIINEAAREGHDLLFADNPSAVKKELTILIQNTIRSKWHEVLE

SEQ ID NO: 313 - DNA, 1038 bp, synthetic construct
  misc_feature 1..1038: note = variant of RNA ligase 2 from Klebsiella phage KP179
  source 1..1038: mol_type = other DNA
atgcatcaccatcaccatcacggtggcagcaacatgtttgcgtattattcaagtctggaaaaccattacaataacaagttcattgagaagatccgtggtgcaggcttcctgatgcacaccgtggaatgggtagctcgcgagaagattcatggaacgaactttagcgttatcattactccgaccgaaatcgtcccagccaaacgcacagggccgatcttggaaggcgagtcgttctttggtcacgaaattatcatgaaaaaatataaagactccttcgtgaaggtgcagaacatgctgaatgccatggatcttgttagcgtgcaaatctttggcgaatttgcgggtggtggcattcagaaaggcgtcgattacggagacaaagatttctatgtgtttgacatcctgtctgatagcgggaacgagaaagtttactgggatgactatcgcgtcgaatcgttttgcaccacgctcggtctgaaattagcgcctctgctgggacgtggtagtttcgctgaactgtcccagtacccaaacgatttcaaaagcattgtgaaccgttataatgaattggttgatacgacgggcctggaacatgccaataaacacgtctttggtccgcaagcgtcttctgaaactggcgtagcagaaggctacgttcttaaacccgtctatccgatcttctttaataccggtacgcgcgtggcgattaaatgcaagaactccaaattttcggagaaagccaagctggacacgccaattaaggcgaaggtggaactgacggagaacgataaacgtctgctcgaaatctttagcgagtatgttacctggaatcgcgtcagtaacgtactgtcacatattggctcagtgaccgcaaaagattttgggcgtgttatgggtctgacgatgaaagacatcattaatgaagcagcacgcgaaggccatgatctgttgttcgctgataacccgtcggcggtgaagaaagagctgaccattctcatccagaacacgattcgttccaaatggcacgaagttctggag

SEQ ID NO: 314 - protein, 346 aa, synthetic construct
  REGION 1..346: note = variant of RNA ligase 2 from Klebsiella phage KP179
MHHHHHHGGSNMFAYYSSLENHYNNKFIEKIRGAGFLMHTVEWVAREKIHGTNFSVIITPTEIVPAKRTGPILEGESFFGHEIIMKKYKDSFVKVQNMLNAMDLVSVQIFGEFAGGGIQKGVDYGDKDFYVFDILSDSGNEKVYWDDYRVESFCTTLGLKLAPLLGRGSFAELSQYPNDFKSIVNRYNELVDTTGLEHANKHVFGPQASSETGVAEGYVLKPVYPIFFNTGTRVAIKCKNSKFSEKAKLDTPIKAKVELTENDKRLLEIFSEYVTWNRVSNVLSHIGSVTAKDFGRVMGLTMKDIINEAAREGHDLLFADNPSAVKKELTILIQNTIRSKWHEVLE

SEQ ID NO: 315 - DNA, 1038 bp, synthetic construct
  misc_feature 1..1038: note = variant of RNA ligase 2 from Klebsiella phage KP179
  source 1..1038: mol_type = other DNA
atgcatcaccatcaccatcacggtggcagcaacacgtttgcgtattattcaagtctggaaaaccattacaataataagttcattgagaagatccgtggtgcaggcttcctgatgcacaccgtggaatgggtagctcgcgagaagattcatggaacgaactttagcgttatcattactccgaccgaaatcgtcccagccaaacgcacagggccgatcttggaaggcgagtcgttctttggtcacgaaattatcatgaaaaaatataaagactccttcgtgaaggtgcagaacatgctgaatgccatggatcttgttagcgtgcaaatctttggcgaatttgcgggtggtggcattcagaaaggcgtcgattacggagacaaagatttctatgtgtttgacatcctgtctgatagcgggaacgagaaagtttactgggatgactatcgcgtcgaatcgttttgcaccacgctcggtctgaaattagcgcctctgctgggacgtggtagtttcgctgaactgtcccagtacccaaacgatttcaaaagcattgtgaaccgttataatgaattggttgatacgacgggcctggaacatgccaataaacacgtctttggtccgcaagcgtcttctgaaactggcgtagcagaaggctacgttcttaaacccgtctatccgatcttctttaataccggtacgcgcgtggcgattaaatgcaagaactccaaattttcggagaaagccaagctggactcgccaattctggcggcggtggaactgacggagaacgataaacgtctgctcgaaatctttagcgagtatgttacctggaatcgcgtcagtaacgtactgtcacatattggctcagtgaccgcaaaagattttgggcgtgttatgggtctgacgatgaaagacatcattaatgaagcagcacgcgaaggccatgatctgttgttcgctgataacccgtcggcggtgaagaaagagctgaccattctcatccagaacacgattcgttccaaatggcacgaagttctggag

SEQ ID NO: 316 - protein, 346 aa, synthetic construct
  REGION 1..346: note = variant of RNA ligase 2 from Klebsiella phage KP179
MHHHHHHGGSNTFAYYSSLENHYNNKFIEKIRGAGFLMHTVEWVAREKIHGTNFSVIITPTEIVPAKRTGPILEGESFFGHEIIMKKYKDSFVKVQNMLNAMDLVSVQIFGEFAGGGIQKGVDYGDKDFYVFDILSDSGNEKVYWDDYRVESFCTTLGLKLAPLLGRGSFAELSQYPNDFKSIVNRYNELVDTTGLEHANKHVFGPQASSETGVAEGYVLKPVYPIFFNTGTRVAIKCKNSKFSEKAKLDSPILAAVELTENDKRLLEIFSEYVTWNRVSNVLSHIGSVTAKDFGRVMGLTMKDIINEAAREGHDLLFADNPSAVKKELTILIQNTIRSKWHEVLE

SEQ ID NO: 317 - DNA, 1038 bp, synthetic construct
  misc_feature 1..1038: note = variant of RNA ligase 2 from Klebsiella phage KP179
  source 1..1038: mol_type = other DNA
atgcatcaccatcaccatcacggtggcagcaacgtgtttgcgtattattcaagtctggaaaaccattacaataataagttcattgagaagatccgtggtgcaggcttcctgcgtcacaccgtggaatgggtagctcgcgagaagattcatggaacgaactttagcgttatcattactccgaccgaaatcgtcccagccaaacgcacagggccgatcttggaaggcgagtcgttctttggtcacgaaattatcatgaaaaaatataaagactccttcgtgaaggtgcagaacatgctgaatgccatggatcttgttagcgtgcaaatctttggcgaatttgcgggtggtggcattcagaaaggcgtcgattacggagacaaagatttctatgtgtttgacatcctgtctgatagcgggaacgagaaagtttactgggatgactatcgcgtcgaatcgttttgcaccacgctcggtctgaaattagcgcctctgctgggacgtggtagtttcgctgaactgtcccagtacccaaacgatttcaaaagcattgtgaaccgttataatgaattggttgatacgacgggcctggaacatgccaataaacacgtctttggtccgcaagcgtcttctgaaactggcgtagcagaaggctacgttcttaaacccgtctatccgatcttctttaataccggtacgcgcgtggcgattaaatgcaagaactccaaattttcggagaaagccaagctggacacgccaattgtggcggcggtggaactgacggagaacgataaacgtctgctcgaaatctttagcgagtatgttacctggaatcgcgtcagtaacgtactgtcacatattggctcagtgaccgcaaaagattttgggcgtgttatgggtctgacgatgaaagacatcattaatgaagcagcacgcgaaggccatgatctgttgttcgctgataacccgtcggcggtgaagaaagagctgaccattctcatccagaacacgattcgttccaaatggcacgaagttctggag

SEQ ID NO: 318 - protein, 346 aa, synthetic construct
  REGION 1..346: note = variant of RNA ligase 2 from Klebsiella phage KP179
MHHHHHHGGSNVFAYYSSLENHYNNKFIEKIRGAGFLRHTVEWVAREKIHGTNFSVIITPTEIVPAKRTGPILEGESFFGHEIIMKKYKDSFVKVQNMLNAMDLVSVQIFGEFAGGGIQKGVDYGDKDFYVFDILSDSGNEKVYWDDYRVESFCTTLGLKLAPLLGRGSFAELSQYPNDFKSIVNRYNELVDTTGLEHANKHVFGPQASSETGVAEGYVLKPVYPIFFNTGTRVAIKCKNSKFSEKAKLDTPIVAAVELTENDKRLLEIFSEYVTWNRVSNVLSHIGSVTAKDFGRVMGLTMKDIINEAAREGHDLLFADNPSAVKKELTILIQNTIRSKWHEVLE

SEQ ID NO: 319 - DNA, 1038 bp, synthetic construct
  misc_feature 1..1038: note = variant of RNA ligase 2 from Klebsiella phage KP179
  source 1..1038: mol_type = other DNA
atgcatcaccatcaccatcacggtggcagcaacacgtttgcgtattattcaagtctggaaaaccattacaataataagttcattgagaagatccgtggtgcaggcttcctgcgtcacaccgtggaatgggtagctcgcgagaagattcatggaacgaactttagcgttatcattactccgaccgaaatcgtcccagccaaacgcacagggccgatcttggaaggcgagtcgttctttggtcacgaaattatcatgaaaaaatataaagactccttcgtgaaggtgcagaacatgctgaatgccatggatcttgttagcgtgcaaatctttggcgaatttgcgggtggtggcattcagaaaggcgtcgattacggagacaaagatttctatgtgtttgacatcctgtctgatagcgggaacgagaaagtttactgggatgactatcgcgtcgaatcgttttgcaccacgctcggtctgaaattagcgcctctgctgggacgtggtagtttcgctgaactgtcccagtacccaaacgatttcaaaagcattgtgaaccgttataatgaattggttgatacgacgggcctggaacatgccaataaacacgtctttggtccgcaagcgtcttctgaaactggcgtagcagaaggctacgttcttaaacccgtctatccgatcttctttaataccggtacgcgcgtggcgattaaatgcaagaactccaaattttcggagaaagccaagctggacaagccaattaaggcgaaggtggaactgacggagaacgataaacgtctgctcgaaatctttagcgagtatgttacctggaatcgcgtcagtaacgtactgtcacatattggctcagtgaccgcaaaagattttgggcgtgttatgggtctgacgatgaaagacatcattaatgaagcagcacgcgaaggccatgatctgttgttcgctgataacccgtcggcggtgaagaaagagctgaccattctcatccagaacacgattcgttccaaatggcacgaagttctggag

SEQ ID NO: 320 - protein, 346 aa, synthetic construct
  REGION 1..346: note = variant of RNA ligase 2 from Klebsiella phage KP179
MHHHHHHGGSNTFAYYSSLENHYNNKFIEKIRGAGFLRHTVEWVAREKIHGTNFSVIITPTEIVPAKRTGPILEGESFFGHEIIMKKYKDSFVKVQNMLNAMDLVSVQIFGEFAGGGIQKGVDYGDKDFYVFDILSDSGNEKVYWDDYRVESFCTTLGLKLAPLLGRGSFAELSQYPNDFKSIVNRYNELVDTTGLEHANKHVFGPQASSETGVAEGYVLKPVYPIFFNTGTRVAIKCKNSKFSEKAKLDKPIKAKVELTENDKRLLEIFSEYVTWNRVSNVLSHIGSVTAKDFGRVMGLTMKDIINEAAREGHDLLFADNPSAVKKELTILIQNTIRSKWHEVLE

SEQ ID NO: 321 - DNA, 1038 bp, synthetic construct
  misc_feature 1..1038: note = variant of RNA ligase 2 from Klebsiella phage KP179
  source 1..1038: mol_type = other DNA
atgcatcaccatcaccatcacggtggcagcaacctgtttgcgtattattcaagtctggaaaaccattacaataataagttcattgagaagatccgtggtgcaggcttcctgcgtcacaccgtggaatgggtagctcgcgagaagattcatggaacgaactttagcgttatcattactccgaccgaaatcgtcccagccaaacgcacagggccgatcttggaaggcgagtcgttctttggtcacgaaattatcatgaaaaaatataaagactccttcgtgaaggtgcagaacatgctgaatgccatggatcttgttagcgtgcaaatctttggcgaatttgcgggtggtggcattcagaaaggcgtcgattacggagacaaagatttctatgtgtttgacatcctgtctgatagcgggaacgagaaagtttactgggatgactatcgcgtcgaatcgttttgcaccacgctcggtctgaaattagcgcctctgctgggacgtggtagtttcgctgaactgtcccagtacccaaacgatttcaaaagcattgtgaaccgttataatgaattggttgatacgacgggcctggaacatgccaataaacacgtctttggtccgcaagcgtcttctgaaactggcgtagcagaaggctacgttcttaaacccgtctatccgatcttctttaataacggcacgcgcgtggcgattaaatgcaagaactccaaattttcggagaaagccaagctggacaagccaattgtggcgaaggtggaactgacggagaacgataaacgtctgctcgaaatctttagcgagtatgttacctggaatcgcgtcagtaacgtactgtcacatattggctcagtgaccgcaaaagattttgggcgtgttatgggtctgacgatgaaagacatcattaatgaagcagcacgcgaaggccatgatctgttgttcgctgataacccgtcggcggtgaagaaagagctgaccattctcatccagaacacgattcgttccaaatggcacgaagttctggag

SEQ ID NO: 322 - protein, 346 aa, synthetic construct
  REGION 1..346: note = variant of RNA ligase 2 from Klebsiella phage KP179
MHHHHHHGGSNLFAYYSSLENHYNNKFIEKIRGAGFLRHTVEWVAREKIHGTNFSVIITPTEIVPAKRTGPILEGESFFGHEIIMKKYKDSFVKVQNMLNAMDLVSVQIFGEFAGGGIQKGVDYGDKDFYVFDILSDSGNEKVYWDDYRVESFCTTLGLKLAPLLGRGSFAELSQYPNDFKSIVNRYNELVDTTGLEHANKHVFGPQASSETGVAEGYVLKPVYPIFFNNGTRVAIKCKNSKFSEKAKLDKPIVAKVELTENDKRLLEIFSEYVTWNRVSNVLSHIGSVTAKDFGRVMGLTMKDIINEAAREGHDLLFADNPSAVKKELTILIQNTIRSKWHEVLE

SEQ ID NO: 323 - DNA, 1038 bp, synthetic construct
  misc_feature 1..1038: note = variant of RNA ligase 2 from Klebsiella phage KP179
  source 1..1038: mol_type = other DNA
atgcatcaccatcaccatcacggtggcagcaacctgtttgcgtattattcaagtctggaaaaccattacaataataagttcattgagaagatccgtggtgcaggcttcctgatgcacaccgtggaatgggtagctcgcgagaagattcatggaacgaactttagcgttatcattactccgaccgaaatcgtcccagccaaacgcacagggccgatcttggaaggcgagtcgttctttggtcacgaaattatcatgaaaaaatataaagactccttcgtgaaggtgcagaacatgctgaatgccatggatcttgttagcgtgcaaatctttggcgaatttgcgggtggtggcattcagaaaggcgtcgattacggagacaaagatttctatgtgtttgacatcctgtctgatagcgggaacgagaaagtttactgggatgactatcgcgtcgaatcgttttgcaccacgctcggtctgaaattagcgcctctgctgggacgtggtagtttcgctgaactgtcccagtacccaaacgatttcaaaagcattgtgaaccgttataatgaattggttgatacgacgggcctggaacatgccaataaacacgtctttggtccgcaagcgtcttctgaaactggcgtagcagaaggctacgttcttaaacccgtctatccgatcttctttaataatggtacgcgcgtggcgattaaatgcaagaactccaaattttcggagaaagccaagctggacacgccaattaaggcggcggtggaactgacggagaacgataaacgtctgctcgaaatctttagcgagtatgttacctggaatcgcgtcagtaacgtactgtcacatattggctcagtgaccgcaaaagattttgggcgtgttatgggtctgacgatgaaagacatcattaatgaagcagcacgcgaaggccatgatctgttgttcgctgataacccgtcggcggtgaagaaagagctgaccattctcatccagaacacgattcgttccaaatggcacgaagttctggag

SEQ ID NO: 324 - protein, 346 aa, synthetic construct
  REGION 1..346: note = variant of RNA ligase 2 from Klebsiella phage KP179
MHHHHHHGGSNLFAYYSSLENHYNNKFIEKIRGAGFLMHTVEWVAREKIHGTNFSVIITPTEIVPAKRTGPILEGESFFGHEIIMKKYKDSFVKVQNMLNAMDLVSVQIFGEFAGGGIQKGVDYGDKDFYVFDILSDSGNEKVYWDDYRVESFCTTLGLKLAPLLGRGSFAELSQYPNDFKSIVNRYNELVDTTGLEHANKHVFGPQASSETGVAEGYVLKPVYPIFFNNGTRVAIKCKNSKFSEKAKLDTPIKAAVELTENDKRLLEIFSEYVTWNRVSNVLSHIGSVTAKDFGRVMGLTMKDIINEAAREGHDLLFADNPSAVKKELTILIQNTIRSKWHEVLE

SEQ ID NO: 325 - DNA, 1038 bp, synthetic construct
  misc_feature 1..1038: note = variant of RNA ligase 2 from Klebsiella phage KP179
  source 1..1038: mol_type = other DNA
atgcatcaccatcaccatcacggtggcagcaacacgtttgcgtattattcaagtctggaaaaccattacaataataagttcattgagaagatccgtggtgcaggcttcctgatgcacaccgtggaatgggtagctcgcgagaagattcatggaacgaactttagcgttatcattactccgaccgaaatcgtcccagccaaacgcacagggccgatcttggaaggcgagtcgttctttggtcacgaaattatcatgaaaaaatataaagactccttcgtgaaggtgcagaacatgctgaatgccatggatcttgttagcgtgcaaatctttggcgaatttgcgggtggtggcattcagaaaggcgtcgattacggagacaaagatttctatgtgtttgacatcctgtctgatagcgggaacgagaaagtttactgggatgactatcgcgtcgaatcgttttgcaccacgctcggtctgaaattagcgcctctgctgggacgtggtagtttcgctgaactgtcccagtacccaaacgatttcaaaagcattgtgaaccgttataatgaattggttgatacgacgggcctggaacatgccaataaacacgtctttggtccgcaagcgtcttctgaaactggcgtagcagaaggctacgttcttaaacccgtctatccgatcttctttaataccggtacgcgcgtggcgattaaatgcaagaactccaaattttcggagaaagccaagctggacaaaccaattaaagcgaaagtggaactgacggagaacgataaacgtctgctcgaaatctttagcgagtatgttacctggaatcgcgtcagtaacgtactgtcacatattggctcagtgaccgcaaaagattttgggcgtgttatgggtctgacgatgaaagacatcattaatgaagcagcacgcgaaggccatgatctgttgttcgctgataacccgtcggcggtgaagaaagagctgaccattctcatccagaacacgattcgttccaaatggcacgaagttctggag

SEQ ID NO: 326 - protein, 346 aa, synthetic construct
  REGION 1..346: note = variant of RNA ligase 2 from Klebsiella phage KP179
MHHHHHHGGSNTFAYYSSLENHYNNKFIEKIRGAGFLMHTVEWVAREKIHGTNFSVIITPTEIVPAKRTGPILEGESFFGHEIIMKKYKDSFVKVQNMLNAMDLVSVQIFGEFAGGGIQKGVDYGDKDFYVFDILSDSGNEKVYWDDYRVESFCTTLGLKLAPLLGRGSFAELSQYPNDFKSIVNRYNELVDTTGLEHANKHVFGPQASSETGVAEGYVLKPVYPIFFNTGTRVAIKCKNSKFSEKAKLDKPIKAKVELTENDKRLLEIFSEYVTWNRVSNVLSHIGSVTAKDFGRVMGLTMKDIINEAAREGHDLLFADNPSAVKKELTILIQNTIRSKWHEVLE

SEQ ID NO: 327 - DNA, 1038 bp, synthetic construct
  misc_feature 1..1038: note = variant of RNA ligase 2 from Klebsiella phage KP179
  source 1..1038: mol_type = other DNA
atgcatcaccatcaccatcacggtggcagcaacatgtttgcgtattattcaagtctggaaaaccattacaataacaagttcattgagaagatccgtggtgcaggcttcctgatgcacaccgtggaatgggtagctcgcgagaagattcatggaacgaactttagcgttatcattactccgaccgaaatcgtcccagccaaacgcacagggccgatcttggaaggcgagtcgttctttggtcacgaaattatcatgaaaaaatataaagactccttcgtgaaggtgcagaacatgctgaatgccacggatcttgttagcgtgcaaatctttggcgaatttgcgggtggtggcattcagaaaggcgtcgattacggagacaaagatttctatgtgtttgacatcctgtctgatagcgggaacgagaaagtttactgggatgactatcgcgtcgaatcgttttgcaccacgctcggtctgaaattagcgcctctgctgggacgtggtagtttcgctgaactgtcccagtacccaaacgatttcaaaagcattgtgaaccgttataatgaattggttgatacgacgggcctggaacatgccaataaacacgtctttggtccgcaagcgtcttctgaaactggcgtagcagaaggctacgttcttaaacccgtctatccgatcttctttaataccggtacgcgcgtggcgattaaatgcaagaactccaaattttcggagaaagccaagctggactcgccaattgtggcggcggtggaactgacggagaacgataaacgtctgctcgaaatctttagcgagtatgttacctggaatcgcgtcagtaacgtactgtcacatattggctcagtgaccgcaaaagattttgggcgtgttatgggtctgacgatgaaagacatcattaatgaagcagcacgcgaaggccatgatctgttgttcgctgataacccgtcggcggtgaagaaagagctgaccattctcatccagaacacgattcgttccaaatggcacgaagttctggag

SEQ ID NO: 328 - protein, 346 aa, synthetic construct
  REGION 1..346: note = variant of RNA ligase 2 from Klebsiella phage KP179
MHHHHHHGGSNMFAYYSSLENHYNNKFIEKIRGAGFLMHTVEWVAREKIHGTNFSVIITPTEIVPAKRTGPILEGESFFGHEIIMKKYKDSFVKVQNMLNATDLVSVQIFGEFAGGGIQKGVDYGDKDFYVFDILSDSGNEKVYWDDYRVESFCTTLGLKLAPLLGRGSFAELSQYPNDFKSIVNRYNELVDTTGLEHANKHVFGPQASSETGVAEGYVLKPVYPIFFNTGTRVAIKCKNSKFSEKAKLDSPIVAAVELTENDKRLLEIFSEYVTWNRVSNVLSHIGSVTAKDFGRVMGLTMKDIINEAAREGHDLLFADNPSAVKKELTILIQNTIRSKWHEVLE

SEQ ID NO: 329 - DNA, 1038 bp, synthetic construct
  misc_feature 1..1038: note = variant of RNA ligase 2 from Klebsiella phage KP179
  source 1..1038: mol_type = other DNA
atgcatcaccatcaccatcacggtggcagcaacatgtttgcgtattattcaagtctggaaaaccattacaataataagttcattgagaagatccgtggtgcaggcttcctgatgcacaccgtggaatgggtagctcgcgagaagattcatggaacgaactttagcgttatcattactccgaccgaaatcgtcccagccaaacgcacagggccgatcttggaaggcgagtcgttctttggtcacgaaattatcatgaaaaaatataaagactccttcgtgaaggtgcagaacatgctgaatgccatggatcttgttagcgtgcaaatctttggcgaatttgcgggtggtggcattcagaaaggcgtcgattacggagacaaagatttctatgtgtttgacatcctgtctgatagcgggaacgagaaagtttactgggatgactatcgcgtcgaatcgttttgcaccacgctcggtctgaaattagcgcctctgctgggacgtggtagtttcgctgaactgtcccagtacccaaacgatttcaaaagcattgtgaaccgttataatgaattggttgatacgacgggcctggaacatgccaataaacacgtctttggtccgcaagcgtcttctgaaactggcgtagcagaaggctacgttcttaaacccgtctatccgatcttctttaataccggtacgcgcgtggcgattaaatgcaagaactccaaattttcggagaaagccaagctggactcgccaattgtggcgaaggtggaactgacggagaacgataaacgtctgctcgaaatctttagcgagtatgttacctggaatcgcgtcagtaacgtactgtcacatattggctcagtgaccgcaaaagattttgggcgtgttatgggtctgacgatgaaagacatcattaatgaagcagcacgcgaaggccatgatctgttgttcgctgataacccgtcggcggtgaagaaagagctgaccattctcatccagaacacgattcgttccaaatggcacgaagttctggag

SEQ ID NO: 330 - protein, 346 aa, synthetic construct
  REGION 1..346: note = variant of RNA ligase 2 from Klebsiella phage KP179
MHHHHHHGGSNMFAYYSSLENHYNNKFIEKIRGAGFLMHTVEWVAREKIHGTNFSVIITPTEIVPAKRTGPILEGESFFGHEIIMKKYKDSFVKVQNMLNAMDLVSVQIFGEFAGGGIQKGVDYGDKDFYVFDILSDSGNEKVYWDDYRVESFCTTLGLKLAPLLGRGSFAELSQYPNDFKSIVNRYNELVDTTGLEHANKHVFGPQASSETGVAEGYVLKPVYPIFFNTGTRVAIKCKNSKFSEKAKLDSPIVAKVELTENDKRLLEIFSEYVTWNRVSNVLSHIGSVTAKDFGRVMGLTMKDIINEAAREGHDLLFADNPSAVKKELTILIQNTIRSKWHEVLE

SEQ ID NO: 331 - DNA, 1038 bp, synthetic construct
  misc_feature 1..1038: note = variant of RNA ligase 2 from Klebsiella phage KP179
  source 1..1038: mol_type = other DNA
atgcatcaccatcaccatcacggtggcagcaacacgtttgcgtattattcaagtctggaaaaccattacaataataagttcattgagaagatccgtggtgcaggcttcctgatgcacaccgtggaatgggtagctcgcgagaagattcatggaacgaactttagcgttatcattactccgaccgaaatcgtcccagccaaacgcacagggccgatcttggaaggcgagtcgttctttggtcacgaaattatcatgaaaaaatataaagactccttcgtgaaggtgcagaacatgctgaatgccatggatcttgttagcgtgcaaatctttggcgaatttgcgggtggtggcattcagaaaggcgtcgattacggagacaaagatttctatgtgtttgacatcctgtctgatagcgggaacgagaaagtttactgggatgactatcgcgtcgaatcgttttgcaccacgctcggtctgaaattagcgcctctgctgggacgtggtagtttcgctgaactgtcccagtacccaaacgatttcaaaagcattgtgaaccgttataatgaattggttgatacgacgggcctggaacatgccaataaacacgtctttggtccgcaagcgtcttctgaaactggcgtagcagaaggctacgttcttaaacccgtctatccgatcttctttaataccggtacgcgcgtggcgattaaatgcaagaactccaaattttcggagaaagccaagctggactcgccaattgtggcggcggtggaactgacggagaacgataaacgtctgctcgaaatctttagcgagtatgttacctggaatcgcgtcagtaacgtactgtcacatattggctcagtgaccgcaaaagattttgggcgtgttatgggtctgacgatgaaagacatcattaatgaagcagcacgcgaaggccatgatctgttgttcgctgataacccgtcggcggtgaagaaagagctgaccattctcatccagaacacgattcgttccaaatggcacgaagttctggag

SEQ ID NO: 332 - protein, 346 aa, synthetic construct
  REGION 1..346: note = variant of RNA ligase 2 from Klebsiella phage KP179
MHHHHHHGGSNTFAYYSSLENHYNNKFIEKIRGAGFLMHTVEWVAREKIHGTNFSVIITPTEIVPAKRTGPILEGESFFGHEIIMKKYKDSFVKVQNMLNAMDLVSVQIFGEFAGGGIQKGVDYGDKDFYVFDILSDSGNEKVYWDDYRVESFCTTLGLKLAPLLGRGSFAELSQYPNDFKSIVNRYNELVDTTGLEHANKHVFGPQASSETGVAEGYVLKPVYPIFFNTGTRVAIKCKNSKFSEKAKLDSPIVAAVELTENDKRLLEIFSEYVTWNRVSNVLSHIGSVTAKDFGRVMGLTMKDIINEAAREGHDLLFADNPSAVKKELTILIQNTIRSKWHEVLE

SEQ ID NO: 333 - DNA, 1038 bp, synthetic construct
  misc_feature 1..1038: note = variant of RNA ligase 2 from Klebsiella phage KP179
  source 1..1038: mol_type = other DNA
atgcatcaccatcaccatcacggtggcagcaacacgtttgcgtattattcaagtctggaaaaccattacaataataagttcattgagaagatccgtggtgcaggcttcctgcgtcacaccgtggaatgggtagctcgcgagaagattcatggaacgaactttagcgttatcattactccgaccgaaatcgtcccagccaaacgcacagggccgatcttggaaggcgagtcgttctttggtcacgaaattatcatgaaaaaatataaagactccttcgtgaaggtgcagaacatgctgaatgccatggatcttgttagcgtgcaaatctttggcgaatttgcgggtggtggcattcagaaaggcgtcgattacggagacaaagatttctatgtgtttgacatcctgtctgatagcgggaacgagaaagtttactgggatgactatcgcgtcgaatcgttttgcaccacgctcggtctgaaattagcgcctctgctgggacgtggtagtttcgctgaactgtcccagtacccaaacgatttcaaaagcattgtgaaccgttataatgaattggttgatacgacgggcctggaacatgccaataaacacgtctttggtccgcaagcgtcttctgaaactggcgtagcagaaggctacgttcttaaacccgtctatccgatcttctttaataacggtacgcgcgtggcgattaaatgcaagaactccaaattttcggagaaagccaagctggactcgccaattaaggcgaaggtggaactgacggagaacgataaacgtctgctcgaaatctttagcgagtatgttacctggaatcgcgtcagtaacgtactgtcacatattggctcagtgaccgcaaaagattttgggcgtgttatgggtctgacgatgaaagacatcattaatgaagcagcacgcgaaggccatgatctgttgttcgctgataacccgtcggcggtgaagaaagagctgaccattctcatccagaacacgattcgttccaaatggcacgaagttctggag

SEQ ID NO: 334 - protein, 346 aa, synthetic construct
  REGION 1..346: note = variant of RNA ligase 2 from Klebsiella phage KP179
MHHHHHHGGSNTFAYYSSLENHYNNKFIEKIRGAGFLRHTVEWVAREKIHGTNFSVIITPTEIVPAKRTGPILEGESFFGHEIIMKKYKDSFVKVQNMLNAMDLVSVQIFGEFAGGGIQKGVDYGDKDFYVFDILSDSGNEKVYWDDYRVESFCTTLGLKLAPLLGRGSFAELSQYPNDFKSIVNRYNELVDTTGLEHANKHVFGPQASSETGVAEGYVLKPVYPIFFNNGTRVAIKCKNSKFSEKAKLDSPIKAKVELTENDKRLLEIFSEYVTWNRVSNVLSHIGSVTAKDFGRVMGLTMKDIINEAAREGHDLLFADNPSAVKKELTILIQNTIRSKWHEVLE

SEQ ID NO: 335 - DNA, 1038 bp, synthetic construct
  misc_feature 1..1038: note = variant of RNA ligase 2 from Klebsiella phage KP179
  source 1..1038: mol_type = other DNA
atgcatcaccatcaccatcacggtggcagcaacacgtttgcgtattattcaagtctggaaaaccattacaataacaagttcattgagaagatccgtggtgcaggcttcctgatgcacaccgtggaatgggtagctcgcgagaagattcatggaacgaactttagcgttatcattactccgaccgaaatcgtcccagccaaacgcacagggccgatcttggaaggcgagtcgttctttggtcacgaaattatcatgaaaaaatataaagactccttcgtgaaggtgcagaacatgctgaatgccatggatcttgttagcgtgcaaatctttggcgaatttgcgggtggtggcattcagaaaggcgtcgattacggagacaaagatttctatgtgtttgacatcctgtctgatagcgggaacgagaaagtttactgggatgactatcgcgtcgaatcgttttgcaccacgctcggtctgaaattagcgcctctgctgggacgtggtagtttcgctgaactgtcccagtacccaaacgatttcaaaagcattgtgaaccgttataatgaattggttgatacgacgggcctggaacatgccaataaacacgtctttggtccgcaagcgtcttctgaaactggcgtagcagaaggctacgttcttaaacccgtctatccgatcttctttaataccggtacgcgcgtggcgattaaatgcaagaactccaaattttcggagaaagccaagctggactcgccaattgtggcgaaggtggaactgacggagaacgataaacgtctgctcgaaatctttagcgagtatgttacctggaatcgcgtcagtaacgtactgtcacatattggctcagtgaccgcaaaagattttgggcgtgttatgggtctgacgatgaaagacatcattaatgaagcagcacgcgaaggccatgatctgttgttcgctgataacccgtcggcggtgaagaaagagctgaccattctcatccagaacacgattcgttccaaatggcacgaagttctggag

SEQ ID NO: 336 - protein, 346 aa, synthetic construct
  REGION 1..346: note = variant of RNA ligase 2 from Klebsiella phage KP179
MHHHHHHGGSNTFAYYSSLENHYNNKFIEKIRGAGFLMHTVEWVAREKIHGTNFSVIITPTEIVPAKRTGPILEGESFFGHEIIMKKYKDSFVKVQNMLNAMDLVSVQIFGEFAGGGIQKGVDYGDKDFYVFDILSDSGNEKVYWDDYRVESFCTTLGLKLAPLLGRGSFAELSQYPNDFKSIVNRYNELVDTTGLEHANKHVFGPQASSETGVAEGYVLKPVYPIFFNTGTRVAIKCKNSKFSEKAKLDSPIVAKVELTENDKRLLEIFSEYVTWNRVSNVLSHIGSVTAKDFGRVMGLTMKDIINEAAREGHDLLFADNPSAVKKELTILIQNTIRSKWHEVLE

SEQ ID NO: 337 - DNA, 1038 bp, synthetic construct
  misc_feature 1..1038: note = variant of RNA ligase 2 from Klebsiella phage KP179
  source 1..1038: mol_type = other DNA
atgcatcaccatcaccatcacggtggcagcaacacgtttgcgtattattcaagtctggaaaaccattacaataataagttcattgagaagatccgtggtgcaggcttcctgatgcacaccgtggaatgggtagctcgcgagaagattcatggaacgaactttagcgttatcattactccgaccgaaatcgtcccagccaaacgcacagggccgatcttggaaggcgagtcgttctttggtcacgaaattatcatgaaaaaatataaagactccttcgtgaaggtgcagaacatgctgaatgccatggatcttgttagcgtgcaaatctttggcgaatttgcgggtggtggcattcagaaaggcgtcgattacggagacaaagatttctatgtgtttgacatcctgtctgatagcgggaacgagaaagtttactgggatgactatcgcgtcgaatcgttttgcaccacgctcggtctgaaattagcgcctctgctgggacgtggtagtttcgctgaactgtcccagtacccaaacgatttcaaaagcattgtgaaccgttataatgaattggttgatacgacgggcctggaacatgccaataaacacgtctttggtccgcaagcgtcttctgaaactggcgtagcagaaggctacgttcttaaacccgtctatccgatcttctttaataccggtacgcgcgtggcgattaaatgcaagaactccaaattttcggagaaagccaagctggacacgccaattaaggcgaaggtggaactgacggagaacgataaacgtctgctcgaaatctttagcgagtatgttacctggaatcgcgtcagtaacgtactgtcacatattggctcagtgaccgcaaaagattttgggcgtgttatgggtctgacgatgaaagacatcattaatgaagcagcacgcgaaggccatgatctgttgttcgctgataacccgtcggcggtgaagaaagagctgaccattctcatccagaacacgattcgttccaaatggcacgaagttctggag

SEQ ID NO: 338 - protein, 346 aa, synthetic construct
  REGION 1..346: note = variant of RNA ligase 2 from Klebsiella phage KP179
MHHHHHHGGSNTFAYYSSLENHYNNKFIEKIRGAGFLMHTVEWVAREKIHGTNFSVIITPTEIVPAKRTGPILEGESFFGHEIIMKKYKDSFVKVQNMLNAMDLVSVQIFGEFAGGGIQKGVDYGDKDFYVFDILSDSGNEKVYWDDYRVESFCTTLGLKLAPLLGRGSFAELSQYPNDFKSIVNRYNELVDTTGLEHANKHVFGPQASSETGVAEGYVLKPVYPIFFNTGTRVAIKCKNSKFSEKAKLDTPIKAKVELTENDKRLLEIFSEYVTWNRVSNVLSHIGSVTAKDFGRVMGLTMKDIINEAAREGHDLLFADNPSAVKKELTILIQNTIRSKWHEVLE

SEQ ID NO: 339 - DNA, 1038 bp, synthetic construct
  misc_feature 1..1038: note = variant of RNA ligase 2 from Klebsiella phage KP179
  source 1..1038: mol_type = other DNA
atgcatcaccatcaccatcacggtggcagcaacatgtttgcgtattattcaagtctggaaaaccattacaataataagttcattgagaagatccgtggtgcaggcttcctgatgcacaccgtggaatgggtagctcgcgagaagattcatggaacgaactttagcgttatcattactccgaccgaaatcgtcccagccaaacgcacagggccgatcttggaaggcgagtcgttctttggtcacgaaattatcatgaaaaaatataaagactccttcgtgaaggtgcagaacatgctgaatgccatggatcttgttagcgtgcaaatctttggcgaatttgcgggtggtggcattcagaaaggcgtcgattacggagacaaagatttctatgtgtttgacatcctgtctgatagcgggaacgagaaagtttactgggatgactatcgcgtcgaatcgttttgcacccagctcggtctgaaattagcgcctctgctgggacgtggtagtttcgctgaactgtcccagtacccaaacgatttcaaaagcattgtgaaccgttataatgaattggttgatacgacgggcctggaacatgccaataaacacgtctttggtccgcaagcgtcttctgaaactggcgtagcagaaggctacgttcttaaacccgtctatccgatcttctttaataatggtacgcgcgtggcgattaaatgcaagaactccaaattttcggagaaagccacgctggacaaaccaattaaagcgaaagtggaactgacggagaacgataaacgtctgctcgaaatctttagcgagtatgttacctggaatcgcgtcagtaacgtactgtcacatattggctcagtgaccgcaaaagattttgggcgtgttatgggtctgacgatgaaagacatcattaatgaagcagcacgcgaaggccatgatctgttgttcgctgataacccgtcggcggtgaagaaagagctgaccattctcatccgccacacgattcgttccaaatggcacgaagttctggag

SEQ ID NO: 340 - protein, 346 aa, synthetic construct
  REGION 1..346: note = variant of RNA ligase 2 from Klebsiella phage KP179
MHHHHHHGGSNMFAYYSSLENHYNNKFIEKIRGAGFLMHTVEWVAREKIHGTNFSVIITPTEIVPAKRTGPILEGESFFGHEIIMKKYKDSFVKVQNMLNAMDLVSVQIFGEFAGGGIQKGVDYGDKDFYVFDILSDSGNEKVYWDDYRVESFCTQLGLKLAPLLGRGSFAELSQYPNDFKSIVNRYNELVDTTGLEHANKHVFGPQASSETGVAEGYVLKPVYPIFFNNGTRVAIKCKNSKFSEKATLDKPIKAKVELTENDKRLLEIFSEYVTWNRVSNVLSHIGSVTAKDFGRVMGLTMKDIINEAAREGHDLLFADNPSAVKKELTILIRHTIRSKWHEVLE

SEQ ID NO: 341 - DNA, 1038 bp, synthetic construct
  misc_feature 1..1038: note = variant of RNA ligase 2 from Klebsiella phage KP179
  source 1..1038: mol_type = other DNA
atgcatcaccatcaccatcacggtggcagcaacgtgtttgcgtattattcaagtctggaaaaccattacaataataagttcattgagaagatccgtggtgcaggcttcctgcgtcacaccgtggaatgggtagctcgcgagaagattcatggaacgaactttagcgttatcattactccgaccgaaatcgtcccagccaaacgcacagggccgatcttggaaggcgagtcgttctttggtcacgaaattatcatgaaaaaatataaagactccttcgtgaaggtgcagaacatgctgaatgccatggatcttgttagcgtgcaaatctttggcgaatttgcgggtggtggcattcagaaaggcgtcgattacggagacaaagatttctatgtgtttgacatcctgtctgatagcgggaacgagaaagtttactgggatgactatcgcgtcgaatcgttttgcaccacgctcggtctgaaattagcgcctctgctgggacgtggtagtttcgctgaactgtcccagtacccaaacgatttcaaaagcattgtgaaccgttataatgaattggttgatacgacgggcctggaacatgccaataaacacgtctttggtccgcaagcgtcttctgaaactggcgtagcagaaggctacgttcttaaacccgtctatccgatcttctttaataccggtacgcgcgtggcgattaaatgcaagaactccaaattttcggagaaagccaagctggacaaaccaattaaagcgaaagtggaactgacggagaacgataaacgtctgctcgaaatctttagcgagtatgttacctggaatcgcgtcagtaacgtactgtcacatattggctcagtgaccgcaaaagattttgggcgtgttatgggtctgacgatgaaagacatcattaatgaagcagcacgcgaaggccatgatctgttgttcgctgataacccgtcggcggtgaagaaagagctgaccattctcatccagaacacgattcgttccaaatggcacgaagttctggag

SEQ ID NO: 342 - protein, 346 aa, synthetic construct
  REGION 1..346: note = variant of RNA ligase 2 from Klebsiella phage KP179
MHHHHHHGGSNVFAYYSSLENHYNNKFIEKIRGAGFLRHTVEWVAREKIHGTNFSVIITPTEIVPAKRTGPILEGESFFGHEIIMKKYKDSFVKVQNMLNAMDLVSVQIFGEFAGGGIQKGVDYGDKDFYVFDILSDSGNEKVYWDDYRVESFCTTLGLKLAPLLGRGSFAELSQYPNDFKSIVNRYNELVDTTGLEHANKHVFGPQASSETGVAEGYVLKPVYPIFFNTGTRVAIKCKNSKFSEKAKLDKPIKAKVELTENDKRLLEIFSEYVTWNRVSNVLSHIGSVTAKDFGRVMGLTMKDIINEAAREGHDLLFADNPSAVKKELTILIQNTIRSKWHEVLE

SEQ ID NO: 343 - DNA, 1038 bp, synthetic construct
  misc_feature 1..1038: note = variant of RNA ligase 2 from Klebsiella phage KP179
  source 1..1038: mol_type = other DNA
atgcatcaccatcaccatcacggtggcagcaacacgtttgcgtattattcaagtctggaaaaccattacaatatgaagttcattgagaagatccgtggtgcaggcttcctgcgtcacaccgtggaatgggtagctcgcgagaagattcatggaacgaactttagcgttatcattactccgaccgaaatcgtcccagccaaacgcacagggccgatcttggaaggcgagtcgttctttggtcacgaaattatcatgaaaaaatataaagactccttcgtgaaggtgcagaacatgctgaatgccatggatcttgttagcgtgcaaatctttggcgaatttgcgggtggtggcattcagaaaggcgtcgattacggagacaaagatttctatgtgtttgacatcctgtctgatagcgggaacgagaaagtttactgggatgactatcgcgtcgaatcgttttgcaccacgctcggtctgaaattagcgcctctgctgggacgtggtagtttcgctgaactgtcccagtacccaaacgatttcaaaagcattgtgaaccgttataatgaattggttgatacgacgggcctggaacatgccaataaacacgtctttggtccgcaagcgtcttctgaaactggcgtagcagaaggctacgttcttaaacccgtctatccgatcttctttaataacggtacgcgcgtggcgattaaatgcaagaactccaaattttcggagaaagccaagctggacaaaccaattaaagcgaaagtggaactgacggagaacgataaacgtctgctcgaaatctttagcgagtatgttacctggaatcgcgtcagtaacgtactgtcacatattggctcagtgaccgcaaaagattttgggcgtgttatgggtctgacgatgaaagacatcattaatgaagcagcacgcgaaggccatgatctgttgttcgctgataacccgtcggcggtgaagaaagagctgaccattctcatccagaacacgattcgttccaaatggcacgaagttctggag

SEQ ID NO: 344 - protein, 346 aa, synthetic construct
  REGION 1..346: note = variant of RNA ligase 2 from Klebsiella phage KP179
MHHHHHHGGSNTFAYYSSLENHYNMKFIEKIRGAGFLRHTVEWVAREKIHGTNFSVIITPTEIVPAKRTGPILEGESFFGHEIIMKKYKDSFVKVQNMLNAMDLVSVQIFGEFAGGGIQKGVDYGDKDFYVFDILSDSGNEKVYWDDYRVESFCTTLGLKLAPLLGRGSFAELSQYPNDFKSIVNRYNELVDTTGLEHANKHVFGPQASSETGVAEGYVLKPVYPIFFNNGTRVAIKCKNSKFSEKAKLDKPIKAKVELTENDKRLLEIFSEYVTWNRVSNVLSHIGSVTAKDFGRVMGLTMKDIINEAAREGHDLLFADNPSAVKKELTILIQNTIRSKWHEVLE

SEQ ID NO: 345 - DNA, 1038 bp, synthetic construct
  misc_feature 1..1038: note = variant of RNA ligase 2 from Klebsiella phage KP179
  source 1..1038: mol_type = other DNA
atgcatcaccatcaccatcacggtggcagcaacgtgtttgcgtattattcaagtctggaaaaccattacaataacaagttcattgagaagatccgtggtgcaggcttcctgatgcacaccgtggaatgggtagctcgcgagaagattcatggaacgaactttagcgttatcattactccgaccgaaatcgtcccagccaaacgcacagggccgatcttggaaggcgagtcgttctttggtcacgaaattatcatgaaaaaatataaagactccttcgtgaaggtgcagaacatgctgaatgccacggatcttgttagcgtgcaaatctttggcgaatttgcgggtggtggcattcagaaaggcgtcgattacggagacaaagatttctatgtgtttgacatcctgtctgatagcgggaacgagaaagtttactgggatgactatcgcgtcgaatcgttttgcaccacgctcggtctgaaattagcgcctctgctgggacgtggtagtttcgctgaactgtcccagtacccaaacgatttcaaaagcattgtgaaccgttataatgaattggttgatacgacgggcctggaacatgccaataaacacgtctttggtccgcaagcgtcttctgaaactggcgtagcagaaggctacgttcttaaacccgtctatccgatcttctttaataccggtacgcgcgtggcgattaaatgcaagaactccaaattttcggagaaagccaagctggacacgccaattgtggcgaaggtggaactgacggagaacgataaacgtctgctcgaaatctttagcgagtatgttacctggaatcgcgtcagtaacgtactgtcacatattggctcagtgaccgcaaaagattttgggcgtgttatgggtctgacgatgaaagacatcattaatgaagcagcacgcgaaggccatgatctgttgttcgctgataacccgtcggcggtgaagaaagagctgaccattctcatccagaacacgattcgttccaaatggcacgaagttctggag

SEQ ID NO: 346 - protein, 346 aa, synthetic construct
  REGION 1..346: note = variant of RNA ligase 2 from Klebsiella phage KP179
MHHHHHHGGSNVFAYYSSLENHYNNKFIEKIRGAGFLMHTVEWVAREKIHGTNFSVIITPTEIVPAKRTGPILEGESFFGHEIIMKKYKDSFVKVQNMLNATDLVSVQIFGEFAGGGIQKGVDYGDKDFYVFDILSDSGNEKVYWDDYRVESFCTTLGLKLAPLLGRGSFAELSQYPNDFKSIVNRYNELVDTTGLEHANKHVFGPQASSETGVAEGYVLKPVYPIFFNTGTRVAIKCKNSKFSEKAKLDTPIVAKVELTENDKRLLEIFSEYVTWNRVSNVLSHIGSVTAKDFGRVMGLTMKDIINEAAREGHDLLFADNPSAVKKELTILIQNTIRSKWHEVLE

SEQ ID NO: 347 - DNA, 1038 bp, synthetic construct
  misc_feature 1..1038: note = variant of RNA ligase 2 from Klebsiella phage KP179
  source 1..1038: mol_type = other DNA
atgcatcaccatcaccatcacggtggcagcaacctgtttgcgtattattcaagtctggaaaaccattacaataataagttcattgagaagatccgtggtgcaggcttcctgatgcacaccgtggaatgggtagctcgcgagaagattcatggaacgaactttagcgttatcattactccgaccgaaatcgtcccagccaaacgcacagggccgatcttggaaggcgagtcgttctttggtcacgaaattatcatgaaaaaatataaagactccttcgtgaaggtgcagaacatgctgaatgccatggatcttgttagcgtgcaaatctttggcgaatttgcgggtggtggcattcagaaaggcgtcgattacggagacaaagatttctatgtgtttgacatcctgtctgatagcgggaacgagaaagtttactgggatgactatcgcgtcgaatcgttttgcaccacgctcggtctgaaattagcgcctctgctgggacgtggtagtttcgctgaactgtcccagtacccaaacgatttcaaaagcattgtgaaccgttataatgaattggttgatacgacgggcctggaacatgccaataaacacgtctttggtccgcaagcgtcttctgaaactggcgtagcagaaggctacgttcttaaacccgtctatccgatcttctttaataacggtacgcgcgtggcgattaaatgcaagaactccaaattttcggagaaagccaagctggacaagccaattaaggcggcggtggaactgacggagaacgataaacgtctgctcgaaatctttagcgagtatgttacctggaatcgcgtcagtaacgtactgtcacatattggctcagtgaccgcaaaagattttgggcgtgttatgggtctgacgatgaaagacatcattaatgaagcagcacgcgaaggccatgatctgttgttcgctgataacccgtcggcggtgaagaaagagctgaccattctcatccagaacacgattcgttccaaatggcacgaagttctggag

SEQ ID NO: 348 - protein, 346 aa, synthetic construct
  REGION 1..346: note = variant of RNA ligase 2 from Klebsiella phage KP179
MHHHHHHGGSNLFAYYSSLENHYNNKFIEKIRGAGFLMHTVEWVAREKIHGTNFSVIITPTEIVPAKRTGPILEGESFFGHEIIMKKYKDSFVKVQNMLNAMDLVSVQIFGEFAGGGIQKGVDYGDKDFYVFDILSDSGNEKVYWDDYRVESFCTTLGLKLAPLLGRGSFAELSQYPNDFKSIVNRYNELVDTTGLEHANKHVFGPQASSETGVAEGYVLKPVYPIFFNNGTRVAIKCKNSKFSEKAKLDKPIKAAVELTENDKRLLEIFSEYVTWNRVSNVLSHIGSVTAKDFGRVMGLTMKDIINEAAREGHDLLFADNPSAVKKELTILIQNTIRSKWHEVLE

SEQ ID NO: 349 - DNA, 1038 bp, synthetic construct
  misc_feature 1..1038: note = variant of RNA ligase 2 from Klebsiella phage KP179
  source 1..1038: mol_type = other DNA
atgcatcaccatcaccatcacggtggcagcaacacgtttgcgtattattcaagtctggaaaaccattacaataataagttcattgagaagatccgtggtgcaggcttcctgatgcacaccgtggaatgggtagctcgcgagaagattcatggaacgaactttagcgttatcattactccgaccgaaatcgtcccagccaaacgcacagggccgatcttggaaggcgagtcgttctttggtcacgaaattatcatgaaaaaatataaagactccttcgtgaaggtgcagaacatgctgaatgccatggatcttgttagcgtgcaaatctttggcgaatttgcgggtggtggcattcagaaaggcgtcgattacggagacaaagatttctatgtgtttgacatcctgtctgatagcgggaacgagaaagtttactgggatgactatcgcgtcgaatcgttttgcaccacgctcggtctgaaattagcgcctctgctgggacgtggtagtttcgctgaactgtcccagtacccaaacgatttcaaaagcattgtgaaccgttataatgaattggttgatacgacgggcctggaacatgccaataaacacgtctttggtccgcaagcgtcttctgaaactggcgtagcagaaggctacgttcttaaacccgtctatccgatcttctttaataacggtacgcgcgtggcgattaaatgcaagaactccaaattttcggagaaagccaagctggacaaaccaattaaagcgaaagtggaactgacggagaacgataaacgtctgctcgaaatctttagcgagtatgttacctggaatcgcgtcagtaacgtactgtcacatattggctcagtgaccgcaaaagattttgggcgtgttatgggtctgacgatgaaagacatcattaatgaagcagcacgcgaaggccatgatctgttgttcgctgataacccgtcggcggtgaagaaagagctgaccattctcatccagaacacgattcgttccaaatggcacgaagttctggag

SEQ ID NO: 350 - protein, 346 aa, synthetic construct
  REGION 1..346: note = variant of RNA ligase 2 from Klebsiella phage KP179
MHHHHHHGGSNTFAYYSSLENHYNNKFIEKIRGAGFLMHTVEWVAREKIHGTNFSVIITPTEIVPAKRTGPILEGESFFGHEIIMKKYKDSFVKVQNMLNAMDLVSVQIFGEFAGGGIQKGVDYGDKDFYVFDILSDSGNEKVYWDDYRVESFCTTLGLKLAPLLGRGSFAELSQYPNDFKSIVNRYNELVDTTGLEHANKHVFGPQASSETGVAEGYVLKPVYPIFFNNGTRVAIKCKNSKFSEKAKLDKPIKAKVELTENDKRLLEIFSEYVTWNRVSNVLSHIGSVTAKDFGRVMGLTMKDIINEAAREGHDLLFADNPSAVKKELTILIQNTIRSKWHEVLE

SEQ ID NO: 351 - DNA, 1038 bp, synthetic construct
  misc_feature 1..1038: note = variant of RNA ligase 2 from Klebsiella phage KP179
  source 1..1038: mol_type = other DNA
atgcatcaccatcaccatcacggtggcagcaacatgtttgcgtattattcaagtctggaaaaccattacaataataagttcattgagaagatccgtggtgcaggcttcctgatgcacaccgtggaatgggtagctcgcgagaagattcatggaacgaactttagcgttatcattactccgaccgaaatcgtcccagccaaacgcacagggccgatcttggaaggcgagtcgttctttggtcacgaaattatcatgaaaaaatataaagactccttcgtgaaggtgcagaacatgctgaatgccatggatcttgttagcgtgcaaatctttggcgaatttgcgggtggtggcattcagaaaggcgtcgattacggagacaaagatttctatgtgtttgacatcctgtctgatagcgggaacgagaaagtttactgggatgactatcgcgtcgaatcgttttgcaccacgctcggtctgaaattagcgcctctgctgggacgtggtagtttcgctgaactgtcccagtacccaaacgatttcaaaagcattgtgaaccgttataatgaattggttgatacgacgggcctggaacatgccaataaacacgtctttggtccgcaagcgtcttctgaaactggcgtagcagaaggctacgttcttaaacccgtctatccgatcttctttaataccggtacgcgcgtggcgattaaatgcaagaactccaaattttcggagaaagccaagctggacacgccaattctggcgaaggtggaactgacggagaacgataaacgtctgctcgaaatctttagcgagtatgttacctggaatcgcgtcagtaacgtactgtcacatattggctcagtgaccgcaaaagattttgggcgtgttatgggtctgacgatgaaagacatcattaatgaagcagcacgcgaaggccatgatctgttgttcgctgataacccgtcggcggtgaagaaagagctgaccattctcatccagaacacgattcgttccaaatggcacgaagttctggag

SEQ ID NO: 352 - protein, 346 aa, synthetic construct
  REGION 1..346: note = variant of RNA ligase 2 from Klebsiella phage KP179
MHHHHHHGGSNMFAYYSSLENHYNNKFIEKIRGAGFLMHTVEWVAREKIHGTNFSVIITPTEIVPAKRTGPILEGESFFGHEIIMKKYKDSFVKVQNMLNAMDLVSVQIFGEFAGGGIQKGVDYGDKDFYVFDILSDSGNEKVYWDDYRVESFCTTLGLKLAPLLGRGSFAELSQYPNDFKSIVNRYNELVDTTGLEHANKHVFGPQASSETGVAEGYVLKPVYPIFFNTGTRVAIKCKNSKFSEKAKLDTPILAKVELTENDKRLLEIFSEYVTWNRVSNVLSHIGSVTAKDFGRVMGLTMKDIINEAAREGHDLLFADNPSAVKKELTILIQNTIRSKWHEVLE

SEQ ID NO: 353 - DNA, 1038 bp, synthetic construct
  misc_feature 1..1038: note = variant of RNA ligase 2 from Klebsiella phage KP179
  source 1..1038: mol_type = other DNA
atgcatcaccatcaccatcacggtggcagcaacgtgtttgcgtattattcaagtctggaaaaccattacaatctgaagttcattgagaagatccgtggtgcaggcttcctgcgtcacaccgtggaatgggtagctcgcgagaagattcatggaacgaactttagcgttatcattactccgaccgaaatcgtcccagccaaacgcacagggccgatcttggaaggcgagtcgttctttggtcacgaaattatcatgaaaaaatataaagactccttcgtgaaggtgcagaacatgctgaatgccatggatcttgttagcgtgcaaatctttggcgaatttgcgggtggtggcattcagaaaggcgtcgattacggagacaaagatttctatgtgtttgacatcctgtctgatagcgggaacgagaaagtttactgggatgactatcgcgtcgaatcgttttgcaccacgctcggtctgaaattagcgcctctgctgggacgtggtagtttcgctgaactgtcccagtacccaaacgatttcaaaagcattgtgaaccgttataatgaattggttgatacgacgggcctggaacatgccaataaacacgtctttggtccgcaagcgtcttctgaaactggcgtagcagaaggctacgttcttaaacccgtctatccgatcttctttaataacggtacgcgcgtggcgattaaatgcaagaactccaaattttcggagaaagccaagctggacaaaccaattaaagcgaaagtggaactgacggagaacgataaacgtctgctcgaaatctttagcgagtatgttacctggaatcgcgtcagtaacgtactgtcacatattggctcagtgaccgcaaaagattttgggcgtgttatgggtctgacgatgaaagacatcattaatgaagcagcacgcgaaggccatgatctgttgttcgctgataacccgtcggcggtgaagaaagagctgaccattctcatccagaacacgattcgttccaaatggcacgaagttctggag

SEQ ID NO: 354 - protein, 346 aa, synthetic construct
  REGION 1..346: note = variant of RNA ligase 2 from Klebsiella phage KP179
MHHHHHHGGSNVFAYYSSLENHYNLKFIEKIRGAGFLRHTVEWVAREKIHGTNFSVIITPTEIVPAKRTGPILEGESFFGHEIIMKKYKDSFVKVQNMLNAMDLVSVQIFGEFAGGGIQKGVDYGDKDFYVFDILSDSGNEKVYWDDYRVESFCTTLGLKLAPLLGRGSFAELSQYPNDFKSIVNRYNELVDTTGLEHANKHVFGPQASSETGVAEGYVLKPVYPIFFNNGTRVAIKCKNSKFSEKAKLDKPIKAKVELTENDKRLLEIFSEYVTWNRVSNVLSHIGSVTAKDFGRVMGLTMKDIINEAAREGHDLLFADNPSAVKKELTILIQNTIRSKWHEVLE

SEQ ID NO: 355 - DNA, 1038 bp, synthetic construct
  misc_feature 1..1038: note = variant of RNA ligase 2 from Klebsiella phage KP179
  source 1..1038: mol_type = other DNA
atgcatcaccatcaccatcacggtggcagcaacacgtttgcgtattattcaagtctggaaaaccattacaataataagttcattgagaagatccgtggtgcaggcttcctgcgtcacaccgtggaatgggtagctcgcgagaagattcatggaacgaactttagcgttatcattactccgaccgaaatcgtcccagccaaacgcacagggccgatcttggaaggcgagtcgttctttggtcacgaaattatcatgaaaaaatataaagactccttcgtgaaggtgcagaacatgctgaatgccatggatcttgttagcgtgcaaatctttggcgaatttgcgggtggtggcattcagaaaggcgtcgattacggagacaaagatttctatgtgtttgacatcctgtctgatagcgggaacgagaaagtttactgggatgactatcgcgtcgaatcgttttgcaccacgctcggtctgaaattagcgcctctgctgggacgtggtagtttcgctgaactgtcccagtacccaaacgatttcaaaagcattgtgaaccgttataatgaattggttgatacgacgggcctggaacatgccaataaacacgtctttggtccgcaagcgtcttctgaaactggcgtagcagaaggctacgttcttaaacccgtctatccgatcttctttaataacggtacgcgcgtggcgattaaatgcaagaactccaaattttcggagaaagccaagctggactcgccaattgtggcgaaggtggaactgacggagaacgataaacgtctgctcgaaatctttagcgagtatgttacctggaatcgcgtcagtaacgtactgtcacatattggctcagtgaccgcaaaagattttgggcgtgttatgggtctgacgatgaaagacatcattaatgaagcagcacgcgaaggccatgatctgttgttcgctgataacccgtcggcggtgaagaaagagctgaccattctcatccagaacacgattcgttccaaatggcacgaagttctggag

SEQ ID NO: 356 - protein, 346 aa, synthetic construct
  REGION 1..346: note = variant of RNA ligase 2 from Klebsiella phage KP179
MHHHHHHGGSNTFAYYSSLENHYNNKFIEKIRGAGFLRHTVEWVAREKIHGTNFSVIITPTEIVPAKRTGPILEGESFFGHEIIMKKYKDSFVKVQNMLNAMDLVSVQIFGEFAGGGIQKGVDYGDKDFYVFDILSDSGNEKVYWDDYRVESFCTTLGLKLAPLLGRGSFAELSQYPNDFKSIVNRYNELVDTTGLEHANKHVFGPQASSETGVAEGYVLKPVYPIFFNNGTRVAIKCKNSKFSEKAKLDSPIVAKVELTENDKRLLEIFSEYVTWNRVSNVLSHIGSVTAKDFGRVMGLTMKDIINEAAREGHDLLFADNPSAVKKELTILIQNTIRSKWHEVLE

SEQ ID NO: 357 - DNA, 1038 bp, synthetic construct
  misc_feature 1..1038: note = variant of RNA ligase 2 from Klebsiella phage KP179
  source 1..1038: mol_type = other DNA
atgcatcaccatcaccatcacggtggcagcaacgtgtttgcgtattattcaagtctggaaaaccattacaataataagttcattgagaagatccgtggtgcaggcttcctgatgcacaccgtggaatgggtagctcgcgagaagattcatggaacgaactttagcgttatcattactccgaccgaaatcgtcccagccaaacgcacagggccgatcttggaaggcgagtcgttctttggtcacgaaattatcatgaaaaaatataaagactccttcgtgaaggtgcagaacatgctgaatgccatggatcttgttagcgtgcaaatctttggcgaatttgcgggtggtggcattcagaaaggcgtcgattacggagacaaagatttctatgtgtttgacatcctgtctgatagcgggaacgagaaagtttactgggatgactatcgcgtcgaatcgttttgcaccacgctcggtctgaaattagcgcctctgctgggacgtggtagtttcgctgaactgtcccagtacccaaacgatttcaaaagcattgtgaaccgttataatgaattggttgatacgacgggcctggaacatgccaataaacacgtctttggtccgcaagcgtcttctgaaactggcgtagcagaaggctacgttcttaaacccgtctatccgatcttctttaataacggtacgcgcgtggcgattaaatgcaagaactccaaattttcggagaaagccaagctggactcgccaattctggcggcggtggaactgacggagaacgataaacgtctgctcgaaatctttagcgagtatgttacctggaatcgcgtcagtaacgtactgtcacatattggctcagtgaccgcaaaagattttgggcgtgttatgggtctgacgatgaaagacatcattaatgaagcagcacgcgaaggccatgatctgttgttcgctgataacccgtcggcggtgaagaaagagctgaccattctcatccagaacacgattcgttccaaatggcacgaagttctggag

SEQ ID NO: 358 - protein, 346 aa, synthetic construct
  REGION 1..346: note = variant of RNA ligase 2 from Klebsiella phage KP179
MHHHHHHGGSNVFAYYSSLENHYNNKFIEKIRGAGFLMHTVEWVAREKIHGTNFSVIITPTEIVPAKRTGPILEGESFFGHEIIMKKYKDSFVKVQNMLNAMDLVSVQIFGEFAGGGIQKGVDYGDKDFYVFDILSDSGNEKVYWDDYRVESFCTTLGLKLAPLLGRGSFAELSQYPNDFKSIVNRYNELVDTTGLEHANKHVFGPQASSETGVAEGYVLKPVYPIFFNNGTRVAIKCKNSKFSEKAKLDSPILAAVELTENDKRLLEIFSEYVTWNRVSNVLSHIGSVTAKDFGRVMGLTMKDIINEAAREGHDLLFADNPSAVKKELTILIQNTIRSKWHEVLE

SEQ ID NO: 359 - DNA, 1038 bp, synthetic construct
  misc_feature 1..1038: note = variant of RNA ligase 2 from Klebsiella phage KP179
  source 1..1038: mol_type = other DNA
atgcatcaccatcaccatcacggtggcagcaacacgtttgcgtattattcaagtctggaaaaccattacaataacaagttcattgagaagatccgtggtgcaggcttcctgatgcacaccgtggaatgggtagctcgcgagaagattcatggaacgaactttagcgttatcattactccgaccgaaatcgtcccagccaaacgcacagggccgatcttggaaggcgagtcgttctttggtcacgaaattatcatgaaaaaatataaagactccttcgtgaaggtgcagaacatgctgaatgccatggatcttgttagcgtgcaaatctttggcgaatttgcgggtggtggcattcagaaaggcgtcgattacggagacaaagatttctatgtgtttgacatcctgtctgatagcgggaacgagaaagtttactgggatgactatcgcgtcgaatcgttttgcaccacgctcggtctgaaattagcgcctctgctgggacgtggtagtttcgctgaactgtcccagtacccaaacgatttcaaaagcattgtgaaccgttataatgaattggttgatacgacgggcctggaacatgccaataaacacgtctttggtccgcaagcgtcttctgaaactggcgtagcagaaggctacgttcttaaacccgtctatccgatcttctttaataacggtacgcgcgtggcgattaaatgcaagaactccaaattttcggagaaagccaagctggacacgccaattgtggcgaaggtggaactgacggagaacgataaacgtctgctcgaaatctttagcgagtatgttacctggaatcgcgtcagtaacgtactgtcacatattggctcagtgaccgcaaaagattttgggcgtgttatgggtctgacgatgaaagacatcattaatgaagcagcacgcgaaggccatgatctgttgttcgctgataacccgtcggcggtgaagaaagagctgaccattctcatccagaacacgattcgttccaaatggcacgaagttctggag

SEQ ID NO: 360 - protein, 346 aa, synthetic construct
  REGION 1..346: note = variant of RNA ligase 2 from Klebsiella phage KP179
MHHHHHHGGSNTFAYYSSLENHYNNKFIEKIRGAGFLMHTVEWVAREKIHGTNFSVIITPTEIVPAKRTGPILEGESFFGHEIIMKKYKDSFVKVQNMLNAMDLVSVQIFGEFAGGGIQKGVDYGDKDFYVFDILSDSGNEKVYWDDYRVESFCTTLGLKLAPLLGRGSFAELSQYPNDFKSIVNRYNELVDTTGLEHANKHVFGPQASSETGVAEGYVLKPVYPIFFNNGTRVAIKCKNSKFSEKAKLDTPIVAKVELTENDKRLLEIFSEYVTWNRVSNVLSHIGSVTAKDFGRVMGLTMKDIINEAAREGHDLLFADNPSAVKKELTILIQNTIRSKWHEVLE

SEQ ID NO: 361 - DNA, 1038 bp, synthetic construct
  misc_feature 1..1038: note = variant of RNA ligase 2 from Klebsiella phage KP179
  source 1..1038: mol_type = other DNA
atgcatcaccatcaccatcacggtggcagcaacacgtttgcgtattattcaagtctggaaaaccattacaataacaagttcattgagaagatccgtggtgcaggcttcctgatgcacaccgtggaatgggtagctcgcgagaagattcatggaacgaactttagcgttatcattactccgaccgaaatcgtcccagccaaacgcacagggccgatcttggaaggcgagtcgttctttggtcacgaaattatcatgaaaaaatataaagactccttcgtgaaggtgcagaacatgctgaatgccacggatcttgttagcgtgcaaatctttggcgaatttgcgggtggtggcattcagaaaggcgtcgattacggagacaaagatttctatgtgtttgacatcctgtctgatagcgggaacgagaaagtttactgggatgactatcgcgtcgaatcgttttgcaccacgctcggtctgaaattagcgcctctgctgggacgtggtagtttcgctgaactgtcccagtacccaaacgatttcaaaagcattgtgaaccgttataatgaattggttgatacgacgggcctggaacatgccaataaacacgtctttggtccgcaagcgtcttctgaaactggcgtagcagaaggctacgttcttaaacccgtctatccgatcttctttaataacggtacgcgcgtggcgattaaatgcaagaactccaaattttcggagaaagccaagctggacaaaccaattaaagcgaaagtggaactgacggagaacgataaacgtctgctcgaaatctttagcgagtatgttacctggaatcgcgtcagtaacgtactgtcacatattggctcagtgaccgcaaaagattttgggcgtgttatgggtctgacgatgaaagacatcattaatgaagcagcacgcgaaggccatgatctgttgttcgctgataacccgtcggcggtgaagaaagagctgaccattctcatccagaacacgattcgttccaaatggcacgaagttctggag

SEQ ID NO: 362 - protein, 346 aa, synthetic construct
  REGION 1..346: note = variant of RNA ligase 2 from Klebsiella phage KP179
MHHHHHHGGSNTFAYYSSLENHYNNKFIEKIRGAGFLMHTVEWVAREKIHGTNFSVIITPTEIVPAKRTGPILEGESFFGHEIIMKKYKDSFVKVQNMLNATDLVSVQIFGEFAGGGIQKGVDYGDKDFYVFDILSDSGNEKVYWDDYRVESFCTTLGLKLAPLLGRGSFAELSQYPNDFKSIVNRYNELVDTTGLEHANKHVFGPQASSETGVAEGYVLKPVYPIFFNNGTRVAIKCKNSKFSEKAKLDKPIKAKVELTENDKRLLEIFSEYVTWNRVSNVLSHIGSVTAKDFGRVMGLTMKDIINEAAREGHDLLFADNPSAVKKELTILIQNTIRSKWHEVLE

SEQ ID NO: 363 - DNA, 1038 bp, synthetic construct
  misc_feature 1..1038: note = variant of RNA ligase 2 from Klebsiella phage KP179
  source 1..1038: mol_type = other DNA
atgcatcaccatcaccatcacggtggcagcaacgtgtttgcgtattattcaagtctggaaaaccattacaataataagttcattgagaagatccgtggtgcaggcttcctgcgtcacaccgtggaatgggtagctcgcgagaagattcatggaacgaactttagcgttatcattactccgaccgaaatcgtcccagccaaacgcacagggccgatcttggaaggcgagtcgttctttggtcacgaaattatcatgaaaaaatataaagactccttcgtgaaggtgcagaacatgctgaatgccatggatcttgttagcgtgcaaatctttggcgaatttgcgggtggtggcattcagaaaggcgtcgattacggagacaaagatttctatgtgtttgacatcctgtctgatagcgggaacgagaaagtttactgggatgactatcgcgtcgaatcgttttgcaccacgctcggtctgaaattagcgcctctgctgggacgtggtagtttcgctgaactgtcccagtacccaaacgatttcaaaagcattgtgaaccgttataatgaattggttgatacgacgggcctggaacatgccaataaacacgtctttggtccgcaagcgtcttctgaaactggcgtagcagaaggctacgttcttaaacccgtctatccgatcttctttaataacggtacgcgcgtggcgattaaatgcaagaactccaaattttcggagaaagccaagctggactcgccaattaaggcgaaggtggaactgacggagaacgataaacgtctgctcgaaatctttagcgagtatgttacctggaatcgcgtcagtaacgtactgtcacatattggctcagtgaccgcaaaagattttgggcgtgttatgggtctgacgatgaaagacatcattaatgaagcagcacgcgaaggccatgatctgttgttcgctgataacccgtcggcggtgaagaaagagctgaccattctcatccagaacacgattcgttccaaatggcacgaagttctggag

SEQ ID NO: 364 - protein, 346 aa, synthetic construct
  REGION 1..346: note = variant of RNA ligase 2 from Klebsiella phage KP179
MHHHHHHGGSNVFAYYSSLENHYNNKFIEKIRGAGFLRHTVEWVAREKIHGTNFSVIITPTEIVPAKRTGPILEGESFFGHEIIMKKYKDSFVKVQNMLNAMDLVSVQIFGEFAGGGIQKGVDYGDKDFYVFDILSDSGNEKVYWDDYRVESFCTTLGLKLAPLLGRGSFAELSQYPNDFKSIVNRYNELVDTTGLEHANKHVFGPQASSETGVAEGYVLKPVYPIFFNNGTRVAIKCKNSKFSEKAKLDSPIKAKVELTENDKRLLEIFSEYVTWNRVSNVLSHIGSVTAKDFGRVMGLTMKDIINEAAREGHDLLFADNPSAVKKELTILIQNTIRSKWHEVLE

SEQ ID NO: 365 - DNA, 1038 bp, synthetic construct
  misc_feature 1..1038: note = variant of RNA ligase 2 from Klebsiella phage KP179
  source 1..1038: mol_type = other DNA
atgcatcaccatcaccatcacggtggcagcaacgtgtttgcgtattattcaagtctggaaaaccattacaataataagttcattgagaagatccgtggtgcaggcttcctgatgcacaccgtggaatgggtagctcgcgagaagattcatggaacgaactttagcgttatcattactccgaccgaaatcgtcccagccaaacgcacagggccgatcttggaaggcgagtcgttctttggtcacgaaattatcatgaaaaaatataaagactccttcgtgaaggtgcagaacatgctgaatgccatggatcttgttagcgtgcaaatctttggcgaatttgcgggtggtggcattcagaaaggcgtcgattacggagacaaagatttctatgtgtttgacatcctgtctgatagcgggaacgagaaagtttactgggatgactatcgcgtcgaatcgttttgcaccacgctcggtctgaaattagcgcctctgctgggacgtggtagtttcgctgaactgtcccagtacccaaacgatttcaaaagcattgtgaaccgttataatgaattggttgatacgacgggcctggaacatgccaataaacacgtctttggtccgcaagcgtcttctgaaactggcgtagcagaaggctacgttcttaaacccgtctatccgatcttctttaataccggtacgcgcgtggcgattaaatgcaagaactccaaattttcggagaaagccaagctggactcgccaattctggcgaaggtggaactgacggagaacgataaacgtctgctcgaaatctttagcgagtatgttacctggaatcgcgtcagtaacgtactgtcacatattggctcagtgaccgcaaaagattttgggcgtgttatgggtctgacgatgaaagacatcattaatgaagcagcacgcgaaggccatgatctgttgttcgctgataacccgtcggcggtgaagaaagagctgaccattctcatccagaacacgattcgttccaaatggcacgaagttctggag

SEQ ID NO: 366 - protein, 346 aa, synthetic construct
  REGION 1..346: note = variant of RNA ligase 2 from Klebsiella phage KP179
MHHHHHHGGSNVFAYYSSLENHYNNKFIEKIRGAGFLMHTVEWVAREKIHGTNFSVIITPTEIVPAKRTGPILEGESFFGHEIIMKKYKDSFVKVQNMLNAMDLVSVQIFGEFAGGGIQKGVDYGDKDFYVFDILSDSGNEKVYWDDYRVESFCTTLGLKLAPLLGRGSFAELSQYPNDFKSIVNRYNELVDTTGLEHANKHVFGPQASSETGVAEGYVLKPVYPIFFNTGTRVAIKCKNSKFSEKAKLDSPILAKVELTENDKRLLEIFSEYVTWNRVSNVLSHIGSVTAKDFGRVMGLTMKDIINEAAREGHDLLFADNPSAVKKELTILIQNTIRSKWHEVLE

SEQ ID NO: 367 - DNA, 1038 bp, synthetic construct
  misc_feature 1..1038: note = variant of RNA ligase 2 from Klebsiella phage KP179
  source 1..1038: mol_type = other DNA
atgcatcaccatcaccatcacggtggcagcaacacgtttgcgtattattcaagtctggaaaaccattacaataataagttcattgagaagatccgtggtgcaggcttcctgatgcacaccgtggaatgggtagctcgcgagaagattcatggaacgaactttagcgttatcattactccgaccgaaatcgtcccagccaaacgcacagggccgatcttggaaggcgagtcgttctttggtcacgaaattatcatgaaaaaatataaagactccttcgtgaaggtgcagaacatgctgaatgccatggatcttgttagcgtgcaaatctttggcgaatttgcgggtggtggcattcagaaaggcgtcgattacggagacaaagatttctatgtgtttgacatcctgtctgatagcgggaacgagaaagtttactgggatgactatcgcgtcgaatcgttttgcaccacgctcggtctgaaattagcgcctctgctgggacgtggtagtttcgctgaactgtcccagtacccaaacgatttcaaaagcattgtgaaccgttataatgaattggttgatacgacgggcctggaacatgccaataaacacgtctttggtccgcaagcgtcttctgaaactggcgtagcagaaggctacgttcttaaacccgtctatccgatcttctttaataatggtacgcgcgtggcgattaaatgcaagaactccaaattttcggagaaagccaagctggacacgccaattaaggcggcggtggaactgacggagaacgataaacgtctgctcgaaatctttagcgagtatgttacctggaatcgcgtcagtaacgtactgtcacatattggctcagtgaccgcaaaagattttgggcgtgttatgggtctgacgatgaaagacatcattaatgaagcagcacgcgaaggccatgatctgttgttcgctgataacccgtcggcggtgaagaaagagctgaccattctcatccagaacacgattcgttccaaatggcacgaagttctggag

SEQ ID NO: 368 - protein, 346 aa, synthetic construct
  REGION 1..346: note = variant of RNA ligase 2 from Klebsiella phage KP179
MHHHHHHGGSNTFAYYSSLENHYNNKFIEKIRGAGFLMHTVEWVAREKIHGTNFSVIITPTEIVPAKRTGPILEGESFFGHEIIMKKYKDSFVKVQNMLNAMDLVSVQIFGEFAGGGIQKGVDYGDKDFYVFDILSDSGNEKVYWDDYRVESFCTTLGLKLAPLLGRGSFAELSQYPNDFKSIVNRYNELVDTTGLEHANKHVFGPQASSETGVAEGYVLKPVYPIFFNNGTRVAIKCKNSKFSEKAKLDTPIKAAVELTENDKRLLEIFSEYVTWNRVSNVLSHIGSVTAKDFGRVMGLTMKDIINEAAREGHDLLFADNPSAVKKELTILIQNTIRSKWHEVLE

SEQ ID NO: 369 - DNA, 1038 bp, synthetic construct
  misc_feature 1..1038: note = variant of RNA ligase 2 from Klebsiella phage KP179
  source 1..1038: mol_type = other DNA
atgcatcaccatcaccatcacggtggcagcaacatgtttgcgtattattcaagtctggaaaaccattacaataataagttcattgagaagatccgtggtgcaggcttcctgcgtcacaccgtggaatgggtagctcgcgagaagattcatggaacgaactttagcgttatcattactccgaccgaaatcgtcccagccaaacgcacagggccgatcttggaaggcgagtcgttctttggtcacgaaattatcatgaaaaaatataaagactccttcgtgaaggtgcagaacatgctgaatgccatggatcttgttagcgtgcaaatctttggcgaatttgcgggtggtggcattcagaaaggcgtcgattacggagacaaagatttctatgtgtttgacatcctgtctgatagcgggaacgagaaagtttactgggatgactatcgcgtcgaatcgttttgcaccacgctcggtctgaaattagcgcctctgctgggacgtggtagtttcgctgaactgtcccagtacccaaacgatttcaaaagcattgtgaaccgttataatgaattggttgatacgacgggcctggaacatgccaataaacacgtctttggtccgcaagcgtcttctgaaactggcgtagcagaaggctacgttcttaaacccgtctatccgatcttctttaataccggtacgcgcgtggcgattaaatgcaagaactccaaattttcggagaaagccaagctggactcgccaattgtggcggcggtggaactgacggagaacgataaacgtctgctcgaaatctttagcgagtatgttacctggaatcgcgtcagtaacgtactgtcacatattggctcagtgaccgcaaaagattttgggcgtgttatgggtctgacgatgaaagacatcattaatgaagcagcacgcgaaggccatgatctgttgttcgctgataacccgtcggcggtgaagaaagagctgaccattctcatccagaacacgattcgttccaaatggcacgaagttctggag

SEQ ID NO: 370 - protein, 346 aa, synthetic construct
  REGION 1..346: note = variant of RNA ligase 2 from Klebsiella phage KP179
MHHHHHHGGSNMFAYYSSLENHYNNKFIEKIRGAGFLRHTVEWVAREKIHGTNFSVIITPTEIVPAKRTGPILEGESFFGHEIIMKKYKDSFVKVQNMLNAMDLVSVQIFGEFAGGGIQKGVDYGDKDFYVFDILSDSGNEKVYWDDYRVESFCTTLGLKLAPLLGRGSFAELSQYPNDFKSIVNRYNELVDTTGLEHANKHVFGPQASSETGVAEGYVLKPVYPIFFNTGTRVAIKCKNSKFSEKAKLDSPIVAAVELTENDKRLLEIFSEYVTWNRVSNVLSHIGSVTAKDFGRVMGLTMKDIINEAAREGHDLLFADNPSAVKKELTILIQNTIRSKWHEVLE

SEQ ID NO: 371 - DNA, 1038 bp, synthetic construct
  misc_feature 1..1038: note = variant of RNA ligase 2 from Klebsiella phage KP179
  source 1..1038: mol_type = other DNA
atgcatcaccatcaccatcacggtggcagcaacgtgtttgcgtattattcaagtctggaaaaccattacaataataagttcattgagaagatccgtggtgcaggcttcctgatgcacaccgtggaatgggtagctcgcgagaagattcatggaacgaactttagcgttatcattactccgaccgaaatcgtcccagccaaacgcacagggccgatcttggaaggcgagtcgttctttggtcacgaaattatcatgaaaaaatataaagactccttcgtgaaggtgcagaacatgctgaatgccatggatcttgttagcgtgcaaatctttggcgaatttgcgggtggtggcattcagaaaggcgtcgattacggagacaaagatttctatgtgtttgacatcctgtctgatagcgggaacgagaaagtttactgggatgactatcgcgtcgaatcgttttgcaccacgctcggtctgaaattagcgcctctgctgggacgtggtagtttcgctgaactgtcccagtacccaaacgatttcaaaagcattgtgaaccgttataatgaattggttgatacgacgggcctggaacatgccaataaacacgtctttggtccgcaagcgtcttctgaaactggcgtagcagaaggctacgttcttaaacccgtctatccgatcttctttaataccggtacgcgcgtggcgattaaatgcaagaactccaaattttcggagaaagccaagctggacacgccaattaaggcggcggtggaactgacggagaacgataaacgtctgctcgaaatctttagcgagtatgttacctggaatcgcgtcagtaacgtactgtcacatattggctcagtgaccgcaaaagattttgggcgtgttatgggtctgacgatgaaagacatcattaatgaagcagcacgcgaaggccatgatctgttgttcgctgataacccgtcggcggtgaagaaagagctgaccattctcatccagaacacgattcgttccaaatggcacgaagttctggag

SEQ ID NO: 372 - protein, 346 aa, synthetic construct
  REGION 1..346: note = variant of RNA ligase 2 from Klebsiella phage KP179
MHHHHHHGGSNVFAYYSSLENHYNNKFIEKIRGAGFLMHTVEWVAREKIHGTNFSVIITPTEIVPAKRTGPILEGESFFGHEIIMKKYKDSFVKVQNMLNAMDLVSVQIFGEFAGGGIQKGVDYGDKDFYVFDILSDSGNEKVYWDDYRVESFCTTLGLKLAPLLGRGSFAELSQYPNDFKSIVNRYNELVDTTGLEHANKHVFGPQASSETGVAEGYVLKPVYPIFFNTGTRVAIKCKNSKFSEKAKLDTPIKAAVELTENDKRLLEIFSEYVTWNRVSNVLSHIGSVTAKDFGRVMGLTMKDIINEAAREGHDLLFADNPSAVKKELTILIQNTIRSKWHEVLE

SEQ ID NO: 373 - DNA, 1038 bp, synthetic construct
  misc_feature 1..1038: note = variant of RNA ligase 2 from Klebsiella phage KP179
  source 1..1038: mol_type = other DNA
atgcatcaccatcaccatcacggtggcagcaacctgtttgcgtattattcaagtctggaaaaccattacaatatgaagttcattgagaagatccgtggtgcaggcttcctgatgcacaccgtggaatgggtagctcgcgagaagattcatggaacgaactttagcgttatcattactccgaccgaaatcgtcccagccaaacgcacagggccgatcttggaaggcgagtcgttctttggtcacgaaattatcatgaaaaaatataaagactccttcgtgaaggtgcagaacatgctgaatgccatggatcttgttagcgtgcaaatctttggcgaatttgcgggtggtggcattcagaaaggcgtcgattacggagacaaagatttctatgtgtttgacatcctgtctgatagcgggaacgagaaagtttactgggatgactatcgcgtcgaatcgttttgcaccacgctcggtctgaaattagcgcctctgctgggacgtggtagtttcgctgaactgtcccagtacccaaacgatttcaaaagcattgtgaaccgttataatgaattggttgatacgacgggcctggaacatgccaataaacacgtctttggtccgcaagcgtcttctgaaactggcgtagcagaaggctacgttcttaaacccgtctatccgatcttctttaataccggtacgcgcgtggcgattaaatgcaagaactccaaattttcggagaaagccaagctggactcgccaattaaggcggcggtggaactgacggagaacgataaacgtctgctcgaaatctttagcgagtatgttacctggaatcgcgtcagtaacgtactgtcacatattggctcagtgaccgcaaaagattttgggcgtgttatgggtctgacgatgaaagacatcattaatgaagcagcacgcgaaggccatgatctgttgttcgctgataacccgtcggcggtgaagaaagagctgaccattctcatccagaacacgattcgttccaaatggcacgaagttctggag

SEQ ID NO: 374 - protein, 346 aa, synthetic construct
  REGION 1..346: note = variant of RNA ligase 2 from Klebsiella phage KP179
MHHHHHHGGSNLFAYYSSLENHYNMKFIEKIRGAGFLMHTVEWVAREKIHGTNFSVIITPTEIVPAKRTGPILEGESFFGHEIIMKKYKDSFVKVQNMLNAMDLVSVQIFGEFAGGGIQKGVDYGDKDFYVFDILSDSGNEKVYWDDYRVESFCTTLGLKLAPLLGRGSFAELSQYPNDFKSIVNRYNELVDTTGLEHANKHVFGPQASSETGVAEGYVLKPVYPIFFNTGTRVAIKCKNSKFSEKAKLDSPIKAAVELTENDKRLLEIFSEYVTWNRVSNVLSHIGSVTAKDFGRVMGLTMKDIINEAAREGHDLLFADNPSAVKKELTILIQNTIRSKWHEVLE

SEQ ID NO: 375 - DNA, 1038 bp, synthetic construct
  misc_feature 1..1038: note = variant of RNA ligase 2 from Klebsiella phage KP179
  source 1..1038: mol_type = other DNA
atgcatcaccatcaccatcacggtggcagcaacacgtttgcgtattattcaagtctggaaaaccattacaataataagttcattgagaagatccgtggtgcaggcttcctgatgcacaccgtggaatgggtagctcgcgagaagattcatggaacgaactttagcgttatcattactccgaccgaaatcgtcccagccaaacgcacagggccgatcttggaaggcgagtcgttctttggtcacgaaattatcatgaaaaaatataaagactccttcgtgaaggtgcagaacatgctgaatgccatggatcttgttagcgtgcaaatctttggcgaatttgcgggtggtggcattcagaaaggcgtcgattacggagacaaagatttctatgtgtttgacatcctgtctgatagcgggaacgagaaagtttactgggatgactatcgcgtcgaatcgttttgcaccacgctcggtctgaaattagcgcctctgctgggacgtggtagtttcgctgaactgtcccagtacccaaacgatttcaaaagcattgtgaaccgttataatgaattggttgatacgacgggcctggaacatgccaataaacacgtctttggtccgcaagcgtcttctgaaactggcgtagcagaaggctacgttcttaaacccgtctatccgatcttctttaataccggtacgcgcgtggcgattaaatgcaagaactccaaattttcggagaaagccaagctggacaaaccaattaaagcgaaagtggaactgacggagaacgataaacgtctgctcgaaatctttagcgagtatgttacctggaatcgcgtcagtaacgtactgtcacatattggctcagtgaccgcaaaagattttgggcgtgttatgggtctgacgatgaaagacatcattaatgaagcagcatgcgaaggccatgatctgttgttcgctgataacccgtcggcggtgaagaaagagctgaccattctcatccagaacacgattcgttccaaatggcacgaagttctggag

SEQ ID NO: 376 - protein, 346 aa, synthetic construct
  REGION 1..346: note = variant of RNA ligase 2 from Klebsiella phage KP179
MHHHHHHGGSNTFAYYSSLENHYNNKFIEKIRGAGFLMHTVEWVAREKIHGTNFSVIITPTEIVPAKRTGPILEGESFFGHEIIMKKYKDSFVKVQNMLNAMDLVSVQIFGEFAGGGIQKGVDYGDKDFYVFDILSDSGNEKVYWDDYRVESFCTTLGLKLAPLLGRGSFAELSQYPNDFKSIVNRYNELVDTTGLEHANKHVFGPQASSETGVAEGYVLKPVYPIFFNTGTRVAIKCKNSKFSEKAKLDKPIKAKVELTENDKRLLEIFSEYVTWNRVSNVLSHIGSVTAKDFGRVMGLTMKDIINEAACEGHDLLFADNPSAVKKELTILIQNTIRSKWHEVLE

SEQ ID NO: 377 - DNA, 1038 bp, synthetic construct
  misc_feature 1..1038: note = variant of RNA ligase 2 from Klebsiella phage KP179
  source 1..1038: mol_type = other DNA
atgcatcaccatcaccatcacggtggcagcaacctgtttgcgtattattcaagtctggaaaaccattacaataataagttcattgagaagatccgtggtgcaggcttcctgcgtcacaccgtggaatgggtagctcgcgagaagattcatggaacgaactttagcgttatcattactccgaccgaaatcgtcccagccaaacgcacagggccgatcttggaaggcgagtcgttctttggtcacgaaattatcatgaaaaaatataaagactccttcgtgaaggtgcagaacatgctgaatgccatggatcttgttagcgtgcaaatctttggcgaatttgcgggtggtggcattcagaaaggcgtcgattacggagacaaagatttctatgtgtttgacatcctgtctgatagcgggaacgagaaagtttactgggatgactatcgcgtcgaatcgttttgcaccacgctcggtctgaaattagcgcctctgctgggacgtggtagtttcgctgaactgtcccagtacccaaacgatttcaaaagcattgtgaaccgttataatgaattggttgatacgacgggcctggaacatgccaataaacacgtctttggtccgcaagcgtcttctgaaactggcgtagcagaaggctacgttcttaaacccgtctatccgatcttctttaataccggtacgcgcgtggcgattaaatgcaagaactccaaattttcggagaaagccaagctggactcgccaattgtggcggcggtggaactgacggagaacgataaacgtctgctcgaaatctttagcgagtatgttacctggaatcgcgtcagtaacgtactgtcacatattggctcagtgaccgcaaaagattttgggcgtgttatgggtctgacgatgaaagacatcattaatgaagcagcacgcgaaggccatgatctgttgttcgctgataacccgtcggcggtgaagaaagagctgaccattctcatccagaacacgattcgttccaaatggcacgaagttctggag

SEQ ID NO: 378 - protein, 346 aa, synthetic construct
  REGION 1..346: note = variant of RNA ligase 2 from Klebsiella phage KP179
MHHHHHHGGSNLFAYYSSLENHYNNKFIEKIRGAGFLRHTVEWVAREKIHGTNFSVIITPTEIVPAKRTGPILEGESFFGHEIIMKKYKDSFVKVQNMLNAMDLVSVQIFGEFAGGGIQKGVDYGDKDFYVFDILSDSGNEKVYWDDYRVESFCTTLGLKLAPLLGRGSFAELSQYPNDFKSIVNRYNELVDTTGLEHANKHVFGPQASSETGVAEGYVLKPVYPIFFNTGTRVAIKCKNSKFSEKAKLDSPIVAAVELTENDKRLLEIFSEYVTWNRVSNVLSHIGSVTAKDFGRVMGLTMKDIINEAAREGHDLLFADNPSAVKKELTILIQNTIRSKWHEVLE

SEQ ID NO: 379 - DNA, 1038 bp, synthetic construct
  misc_feature 1..1038: note = variant of RNA ligase 2 from Klebsiella phage KP179
  source 1..1038: mol_type = other DNA
atgcatcaccatcaccatcacggtggcagcaacctgtttgcgtattattcaagtctggaaaaccattacaataataagttcattgagaagatccgtggtgcaggcttcctgatgcacaccgtggaatgggtagctcgcgagaagattcatggaacgaactttagcgttatcattactccgaccgaaatcgtcccagccaaacgcacagggccgatcttggaaggcgagtcgttctttggtcacgaaattatcatgaaaaaatataaagactccttcgtgaaggtgcagaacatgctgaatgccatggatcttgttagcgtgcaaatctttggcgaatttgcgggtggtggcattcagaaaggcgtcgattacggagacaaagatttctatgtgtttgacatcctgtctgatagcgggaacgagaaagtttactgggatgactatcgcgtcgaatcgttttgcaccacgctcggtctgaaattagcgcctctgctgggacgtggtagtttcgctgaactgtcccagtacccaaacgatttcaaaagcattgtgaaccgttataatgaattggttgatacgacgggcctggaacatgccaataaacacgtctttggtccgcaagcgtcttctgaaactggcgtagcagaaggctacgttcttaaacccgtctatccgatcttctttaataccggtacgcgcgtggcgattaaatgcaagaactccaaattttcggagaaagccaagctggacacgccaattctggcgaaggtggaactgacggagaacgataaacgtctgctcgaaatctttagcgagtatgttacctggaatcgcgtcagtaacgtactgtcacatattggctcagtgaccgcaaaagattttgggcgtgttatgggtctgacgatgaaagacatcattaatgaagcagcacgcgaaggccatgatctgttgttcgctgataacccgtcggcggtgaagaaagagctgaccattctcatccagaacacgattcgttccaaatggcacgaagttctggag

SEQ ID NO: 380 - protein, 346 aa, synthetic construct
  REGION 1..346: note = variant of RNA ligase 2 from Klebsiella phage KP179
MHHHHHHGGSNLFAYYSSLENHYNNKFIEKIRGAGFLMHTVEWVAREKIHGTNFSVIITPTEIVPAKRTGPILEGESFFGHEIIMKKYKDSFVKVQNMLNAMDLVSVQIFGEFAGGGIQKGVDYGDKDFYVFDILSDSGNEKVYWDDYRVESFCTTLGLKLAPLLGRGSFAELSQYPNDFKSIVNRYNELVDTTGLEHANKHVFGPQASSETGVAEGYVLKPVYPIFFNTGTRVAIKCKNSKFSEKAKLDTPILAKVELTENDKRLLEIFSEYVTWNRVSNVLSHIGSVTAKDFGRVMGLTMKDIINEAAREGHDLLFADNPSAVKKELTILIQNTIRSKWHEVLE

SEQ ID NO: 381 - DNA, 1038 bp, synthetic construct
  misc_feature 1..1038: note = variant of RNA ligase 2 from Klebsiella phage KP179
  source 1..1038: mol_type = other DNA
atgcatcaccatcaccatcacggtggcagcaacctgtttgcgtattattcaagtctggaaaaccattacaataacaagttcattgagaagatccgtggtgcaggcttcctgatgcacaccgtggaatgggtagctcgcgagaagattcatggaacgaactttagcgttatcattactccgaccgaaatcgtcccagccaaacgcacagggccgatcttggaaggcgagtcgttctttggtcacgaaattatcatgaaaaaatataaagactccttcgtgaaggtgcagaacatgctgaatgccatggatcttgttagcgtgcaaatctttggcgaatttgcgggtggtggcattcagaaaggcgtcgattacggagacaaagatttctatgtgtttgacatcctgtctgatagcgggaacgagaaagtttactgggatgactatcgcgtcgaatcgttttgcaccacgctcggtctgaaattagcgcctctgctgggacgtggtagtttcgctgaactgtcccagtacccaaacgatttcaaaagcattgtgaaccgttataatgaattggttgatacgacgggcctggaacatgccaataaacacgtctttggtccgcaagcgtcttctgaaactggcgtagcagaaggctacgttcttaaacccgtctatccgatcttctttaataatggtacgcgcgtggcgattaaatgcaagaactccaaattttcggagaaagccaagctggacaagccaattgtggcgaaggtggaactgacggagaacgataaacgtctgctcgaaatctttagcgagtatgttacctggaatcgcgtcagtaacgtactgtcacatattggctcagtgaccgcaaaagattttgggcgtgttatgggtctgacgatgaaagacatcattaatgaagcagcacgcgaaggccatgatctgttgttcgctgataacccgtcggcggtgaagaaagagctgaccattctcatccagaacacgattcgttccaaatggcacgaagttctggag

SEQ ID NO: 382 - protein, 346 aa, synthetic construct
  REGION 1..346: note = variant of RNA ligase 2 from Klebsiella phage KP179
MHHHHHHGGSNLFAYYSSLENHYNNKFIEKIRGAGFLMHTVEWVAREKIHGTNFSVIITPTEIVPAKRTGPILEGESFFGHEIIMKKYKDSFVKVQNMLNAMDLVSVQIFGEFAGGGIQKGVDYGDKDFYVFDILSDSGNEKVYWDDYRVESFCTTLGLKLAPLLGRGSFAELSQYPNDFKSIVNRYNELVDTTGLEHANKHVFGPQASSETGVAEGYVLKPVYPIFFNNGTRVAIKCKNSKFSEKAKLDKPIVAKVELTENDKRLLEIFSEYVTWNRVSNVLSHIGSVTAKDFGRVMGLTMKDIINEAAREGHDLLFADNPSAVKKELTILIQNTIRSKWHEVLE

SEQ ID NO: 383 - DNA, 1038 bp, synthetic construct
  misc_feature 1..1038: note = variant of RNA ligase 2 from Klebsiella phage KP179
  source 1..1038: mol_type = other DNA
atgcatcaccatcaccatcacggtggcagcaacatgtttgcgtattattcaagtctggaaaaccattacaataataagttcattgagaagatccgtggtgcaggcttcctgcgtcacaccgtggaatgggtagctcgcgagaagattcatggaacgaactttagcgttatcattactccgaccgaaatcgtcccagccaaacgcacagggccgatcttggaaggcgagtcgttctttggtcacgaaattatcatgaaaaaatataaagactccttcgtgaaggtgcagaacatgctgaatgccatggatcttgttagcgtgcaaatctttggcgaatttgcgggtggtggcattcagaaaggcgtcgattacggagacaaagatttctatgtgtttgacatcctgtctgatagcgggaacgagaaagtttactgggatgactatcgcgtcgaatcgttttgcaccacgctcggtctgaaattagcgcctctgctgggacgtggtagtttcgctgaactgtcccagtacccaaacgatttcaaaagcattgtgaaccgttataatgaattggttgatacgacgggcctggaacatgccaataaacacgtctttggtccgcaagcgtcttctgaaactggcgtagcagaaggctacgttcttaaacccgtctatccgatcttctttaataccggtacgcgcgtggcgattaaatgcaagaactccaaattttcggagaaagccaagctggactcgccaattgtggcgaaggtggaactgacggagaacgataaacgtctgctcgaaatctttagcgagtatgttacctggaatcgcgtcagtaacgtactgtcacatattggctcagtgaccgcaaaagattttgggcgtgttatgggtctgacgatgaaagacatcattaatgaagcagcacgcgaaggccatgatctgttgttcgctgataacccgtcggcggtgaagaaagagctgaccattctcatccagaacacgattcgttccaaatggcacgaagttctggag

SEQ ID NO: 384 - protein, 346 aa, synthetic construct
  REGION 1..346: note = variant of RNA ligase 2 from Klebsiella phage KP179
MHHHHHHGGSNMFAYYSSLENHYNNKFIEKIRGAGFLRHTVEWVAREKIHGTNFSVIITPTEIVPAKRTGPILEGESFFGHEIIMKKYKDSFVKVQNMLNAMDLVSVQIFGEFAGGGIQKGVDYGDKDFYVFDILSDSGNEKVYWDDYRVESFCTTLGLKLAPLLGRGSFAELSQYPNDFKSIVNRYNELVDTTGLEHANKHVFGPQASSETGVAEGYVLKPVYPIFFNTGTRVAIKCKNSKFSEKAKLDSPIVAKVELTENDKRLLEIFSEYVTWNRVSNVLSHIGSVTAKDFGRVMGLTMKDIINEAAREGHDLLFADNPSAVKKELTILIQNTIRSKWHEVLE

SEQ ID NO: 385 - DNA, 1038 bp, synthetic construct
  misc_feature 1..1038: note = variant of RNA ligase 2 from Klebsiella phage KP179
  source 1..1038: mol_type = other DNA
atgcatcaccatcaccatcacggtggcagcaacctgtttgcgtattattcaagtctggaaaaccattacaataataagttcattgagaagatccgtggtgcaggcttcctgcgtcacaccgtggaatgggtagctcgcgagaagattcatggaacgaactttagcgttatcattactccgaccgaaatcgtcccagccaaacgcacagggccgatcttggaaggcgagtcgttctttggtcacgaaattatcatgaaaaaatataaagactccttcgtgaaggtgcagaacatgctgaatgccatggatcttgttagcgtgcaaatctttggcgaatttgcgggtggtggcattcagaaaggcgtcgattacggagacaaagatttctatgtgtttgacatcctgtctgatagcgggaacgagaaagtttactgggatgactatcgcgtcgaatcgttttgcaccacgctcggtctgaaattagcgcctctgctgggacgtggtagtttcgctgaactgtcccagtacccaaacgatttcaaaagcattgtgaaccgttataatgaattggttgatacgacgggcctggaacatgccaataaacacgtctttggtccgcaagcgtcttctgaaactggcgtagcagaaggctacgttcttaaacccgtctatccgatcttctttaataatggtacgcgcgtggcgattaaatgcaagaactccaaattttcggagaaagccaagctggactcgccaattaaggcggcggtggaactgacggagaacgataaacgtctgctcgaaatctttagcgagtatgttacctggaatcgcgtcagtaacgtactgtcacatattggctcagtgaccgcaaaagattttgggcgtgttatgggtctgacgatgaaagacatcattaatgaagcagcacgcgaaggccatgatctgttgttcgctgataacccgtcggcggtgaagaaagagctgaccattctcatccagaacacgattcgttccaaatggcacgaagttctggag

SEQ ID NO: 386 - protein, 346 aa, synthetic construct
  REGION 1..346: note = variant of RNA ligase 2 from Klebsiella phage KP179
MHHHHHHGGSNLFAYYSSLENHYNNKFIEKIRGAGFLRHTVEWVAREKIHGTNFSVIITPTEIVPAKRTGPILEGESFFGHEIIMKKYKDSFVKVQNMLNAMDLVSVQIFGEFAGGGIQKGVDYGDKDFYVFDILSDSGNEKVYWDDYRVESFCTTLGLKLAPLLGRGSFAELSQYPNDFKSIVNRYNELVDTTGLEHANKHVFGPQASSETGVAEGYVLKPVYPIFFNNGTRVAIKCKNSKFSEKAKLDSPIKAAVELTENDKRLLEIFSEYVTWNRVSNVLSHIGSVTAKDFGRVMGLTMKDIINEAAREGHDLLFADNPSAVKKELTILIQNTIRSKWHEVLE

SEQ ID NO: 387 - DNA, 1038 bp, synthetic construct
  misc_feature 1..1038: note = variant of RNA ligase 2 from Klebsiella phage KP179
  source 1..1038: mol_type = other DNA
atgcatcaccatcaccatcacggtggcagcaacctgtttgcgtattattcaagtctggaaaaccattacaataataagttcattgagaagatccgtggtgcaggcttcctgcgtcacaccgtggaatgggtagctcgcgagaagattcatggaacgaactttagcgttatcattactccgaccgaaatcgtcccagccaaacgcacagggccgatcttggaaggcgagtcgttctttggtcacgaaattatcatgaaaaaatataaagactccttcgtgaaggtgcagaacatgctgaatgccatggatcttgttagcgtgcaaatctttggcgaatttgcgggtggtggcattcagaaaggcgtcgattacggagacaaagatttctatgtgtttgacatcctgtctgatagcgggaacgagaaagtttactgggatgactatcgcgtcgaatcgttttgcaccacgctcggtctgaaattagcgcctctgctgggacgtggtagtttcgctgaactgtcccagtacccaaacgatttcaaaagcattgtgaaccgttataatgaattggttgatacgacgggcctggaacatgccaataaacacgtctttggtccgcaagcgtcttctgaaactggcgtagcagaaggctacgttcttaaacccgtctatccgatcttctttaataacggtacgcgcgtggcgattaaatgcaagaactccaaattttcggagaaagccaagctggactcgccaattaaggcgaaggtggaactgacggagaacgataaacgtctgctcgaaatctttagcgagtatgttacctggaatcgcgtcagtaacgtactgtcacatattggctcagtgaccgcaaaagattttgggcgtgttatgggtctgacgatgaaagacatcattaatgaagcagcacgcgaaggccatgatctgttgttcgctgataacccgtcggcggtgaagaaagagctgaccattctcatccagaacacgattcgttccaaatggcacgaagttctggag

SEQ ID NO: 388 - protein, 346 aa, synthetic construct
  REGION 1..346: note = variant of RNA ligase 2 from Klebsiella phage KP179
MHHHHHHGGSNLFAYYSSLENHYNNKFIEKIRGAGFLRHTVEWVAREKIHGTNFSVIITPTEIVPAKRTGPILEGESFFGHEIIMKKYKDSFVKVQNMLNAMDLVSVQIFGEFAGGGIQKGVDYGDKDFYVFDILSDSGNEKVYWDDYRVESFCTTLGLKLAPLLGRGSFAELSQYPNDFKSIVNRYNELVDTTGLEHANKHVFGPQASSETGVAEGYVLKPVYPIFFNNGTRVAIKCKNSKFSEKAKLDSPIKAKVELTENDKRLLEIFSEYVTWNRVSNVLSHIGSVTAKDFGRVMGLTMKDIINEAAREGHDLLFADNPSAVKKELTILIQNTIRSKWHEVLE

SEQ ID NO: 389 - DNA, 1038 bp, synthetic construct
  misc_feature 1..1038: note = variant of RNA ligase 2 from Klebsiella phage KP179
  source 1..1038: mol_type = other DNA
atgcatcaccatcaccatcacggtggcagcaacatgtttgcgtattattcaagtctggaaaaccattacaataataagttcattgagaagatccgtggtgcaggcttcctgatgcacaccgtggaatgggtagctcgcgagaagattcatggaacgaactttagcgttatcattactccgaccgaaatcgtcccagccaaacgcacagggccgatcttggaaggcgagtcgttctttggtcacgaaattatcatgaaaaaatataaagactccttcgtgaaggtgcagaacatgctgaatgccatggatcttgttagcgtgcaaatctttggcgaatttgcgggtggtggcattcagaaaggcgtcgattacggagacaaagatttctatgtgtttgacatcctgtctgatagcgggaacgagaaagtttactgggatgactatcgcgtcgaatcgttttgcacccagctcggtctgaaattagcgcctctgctgggacgtggtagtttcgctgaactgtcccagtacccaaacgatttcaaaagcattgtgaaccgttataatgaattggttgatacgacgggcctggaacatgccaataaacacgtctttggtccgcaagcgtcttctgaaactggcgtagcagaaggctacgttcttaaacccgtctatccgatcttctttaataatggtacgcgcgtggcgattaaatgcaagaactccaaattttcggagaaagccaagctggacaaaccaattaaagcgaaagtggaactgacggagaacgataaacgtctgctcgaaatctttagcgagtatgttacctggaatcgcgtcagtaacgtactgtcacatattggctcagtgaccgcaaaagattttgggcgtgttatgggtctgacgatgaaagacatcattaatgaagcagcacgcgaaggccatgatctgttgttcgctgataacccgtcggcggtgaagaaagagctgaccattctcatccgccacacgattcgttccaaatggcacgaagttctggag

SEQ ID NO: 390 - protein, 346 aa, synthetic construct
  REGION 1..346: note = variant of RNA ligase 2 from Klebsiella phage KP179
MHHHHHHGGSNMFAYYSSLENHYNNKFIEKIRGAGFLMHTVEWVAREKIHGTNFSVIITPTEIVPAKRTGPILEGESFFGHEIIMKKYKDSFVKVQNMLNAMDLVSVQIFGEFAGGGIQKGVDYGDKDFYVFDILSDSGNEKVYWDDYRVESFCTQLGLKLAPLLGRGSFAELSQYPNDFKSIVNRYNELVDTTGLEHANKHVFGPQASSETGVAEGYVLKPVYPIFFNNGTRVAIKCKNSKFSEKAKLDKPIKAKVELTENDKRLLEIFSEYVTWNRVSNVLSHIGSVTAKDFGRVMGLTMKDIINEAAREGHDLLFADNPSAVKKELTILIRHTIRSKWHEVLE

SEQ ID NO: 391 - DNA, 1038 bp, synthetic construct
  misc_feature 1..1038: note = variant of RNA ligase 2 from Klebsiella phage KP179
  source 1..1038: mol_type = other DNA
atgcatcaccatcaccatcacggtggcagcaacgcgtttgcgtattattcaagtctggaaaaccattacaataataagttcattgagaagatccgtggtgcaggcttcctgatgcacaccgtggaatgggtagctcgcgagaagattcatggaacgaactttagcgttatcattactccgaccgaaatcgtcccagccaaacgcacagggccgatcttggaaggcgagtcgttctttggtcacgaaattatcatgaaaaaatataaagactccttcgtgaaggtgcagaacatgctgaatgccatggatcttgttagcgtgcaaatctttggcgaatttgcgggtggtggcattcagaaaggcgtcgattacggagacaaagatttctatgtgtttgacatcctgtctgatagcgggaacgagaaagtttactgggatgactatcgcgtcgaatcgttttgcaccacgctcggtctgaaattagcgcctctgctgggacgtggtagtttcgctgaactgtcccagtacccaaacgatttcaaaagcattgtgaaccgttataatgaattggttgatacgacgggcctggaacatgccaataaacacgtctttggtccgcaagcgtcttctgaaactggcgtagcagaaggctacgttcttaaacccgtctatccgatcttctttaataccggtacgcgcgtggcgattaaatgcaagaactccaaattttcggagaaagccaagctggacaaaccaattaaagcgaaggtggaactgacggagaacgataaacgtctgctcgaaatctttagcgagtatgttacctggaatcgcgtcagtaacgtactgtcacatattggctcagtgaccgcaaaagattttgggcgtgttatgggtctgacgatgaaagacatcattaatgaagcagcacgcgaaggccatgatctgttgttcgctgataacccgtcggcggtgaagaaagagctgaccattctcatccagaacacgattcgttccaaatggcacgaagttctggag

SEQ ID NO: 392 - protein, 346 aa, synthetic construct
  REGION 1..346: note = variant of RNA ligase 2 from Klebsiella phage KP179
MHHHHHHGGSNAFAYYSSLENHYNNKFIEKIRGAGFLMHTVEWVAREKIHGTNFSVIITPTEIVPAKRTGPILEGESFFGHEIIMKKYKDSFVKVQNMLNAMDLVSVQIFGEFAGGGIQKGVDYGDKDFYVFDILSDSGNEKVYWDDYRVESFCTTLGLKLAPLLGRGSFAELSQYPNDFKSIVNRYNELVDTTGLEHANKHVFGPQASSETGVAEGYVLKPVYPIFFNTGTRVAIKCKNSKFSEKAKLDKPIKAKVELTENDKRLLEIFSEYVTWNRVSNVLSHIGSVTAKDFGRVMGLTMKDIINEAAREGHDLLFADNPSAVKKELTILIQNTIRSKWHEVLE

SEQ ID NO: 393 - DNA, 1038 bp, synthetic construct
  misc_feature 1..1038: note = variant of RNA ligase 2 from Klebsiella phage KP179
  source 1..1038: mol_type = other DNA
atgcatcaccatcaccatcacggtggcagcaacccgtttgcgtattattcaagtctggaaaaccattacaataataagttcattgagaagatccgtggtgcaggcttcctgatgcacaccgtggaatgggtagctcgcgagaagattcatggaacgaactttagcgttatcattactccgaccgaaatcgtcccagccaaacgcacagggccgatcttggaaggcgagtcgttctttggtcacgaaattatcatgaaaaaatataaagactccttcgtgaaggtgcagaacatgctgaatgccatggatcttgttagcgtgcaaatctttggcgaatttgcgggtggtggcattcagaaaggcgtcgattacggagacaaagatttctatgtgtttgacatcctgtctgatagcgggaacgagaaagtttactgggatgactatcgcgtcgaatcgttttgcaccacgctcggtctgaaattagcgcctctgctgggacgtggtagtttcgctgaactgtcccagtacccaaacgatttcaaaagcattgtgaaccgttataatgaattggttgatacgacgggcctggaacatgccaataaacacgtctttggtccgcaagcgtcttctgaaactggcgtagcagaaggctacgttcttaaacccgtctatccgatcttctttaataccggtacgcgcgtggcgattaaatgcaagaactccaaattttcggagaaagccaagctggacaaaccaattaaagcgaaagtggaactgacggagaacgataaacgtctgctcgaaatctttagcgagtatgttacctggaatcgcgtcagtaacgtactgtcacatattggctcagtgaccgcaaaagattttgggcgtgttatgggtctgacgatgaaagacatcattaatgaagcagcacgcgaaggccatgatctgttgttcgctgataacccgtcggcggtgaagaaagagctgaccattctcatccagaacacgattcgttccaaatggcacgaagttctggag

SEQ ID NO: 394 - protein, 346 aa, synthetic construct
  REGION 1..346: note = variant of RNA ligase 2 from Klebsiella phage KP179
MHHHHHHGGSNPFAYYSSLENHYNNKFIEKIRGAGFLMHTVEWVAREKIHGTNFSVIITPTEIVPAKRTGPILEGESFFGHEIIMKKYKDSFVKVQNMLNAMDLVSVQIFGEFAGGGIQKGVDYGDKDFYVFDILSDSGNEKVYWDDYRVESFCTTLGLKLAPLLGRGSFAELSQYPNDFKSIVNRYNELVDTTGLEHANKHVFGPQASSETGVAEGYVLKPVYPIFFNTGTRVAIKCKNSKFSEKAKLDKPIKAKVELTENDKRLLEIFSEYVTWNRVSNVLSHIGSVTAKDFGRVMGLTMKDIINEAAREGHDLLFADNPSAVKKELTILIQNTIRSKWHEVLE

SEQ ID NO: 395 - DNA, 1038 bp, synthetic construct
  misc_feature 1..1038: note = variant of RNA ligase 2 from Klebsiella phage KP179
  source 1..1038: mol_type = other DNA
atgcatcaccatcaccatcacggtggcagcaacacgtttgcgtattattcaagtctggaaaaccattacaataataagttcattgagaagatccgtggtgcaggcttcctgcgtcacaccgtggaatgggtagctcgcgagaagattcatggaacgaactttagcgttatcattactccgaccgaaatcgtcccagccaaacgcacagggccgatcttggaaggcgagtcgttctttggtcacgaaattatcatgaaaaaatataaagactccttcgtgaaggtgcagaacatgctgaatgccatggatcttgttagcgtgcaaatctttggcgaatttgcgggtggtggcattcagaaaggcgtcgattacggagacaaagatttctatgtgtttgacatcctgtctgatagcgggaacgagaaagtttactgggatgactatcgcgtcgaatcgttttgcaccacgctcggtctgaaattagcgcctctgctgggacgtggtagtttcgctgaactgtcccagtacccaaacgatttcaaaagcattgtgaaccgttataatgaattggttgatacgacgggcctggaacatgccaataaacacgtctttggtccgcaagcgtcttctgaaactggcgtagcagaaggctacgttcttaaacccgtctatccgatcttctttaataacggtacgcgcgtggcgattaaatgcaagaactccaaattttcggagaaagccaagctggacacgccaattaaggcgaaggtggaactgacggagaacgataaacgtctgctcgaaatctttagcgagtatgttacctggaatcgcgtcagtaacgtactgtcacatattggctcagtgaccgcaaaagattttgggcgtgttatgggtctgacgatgaaagacatcattaatgaagcagcacgcgaaggccatgatctgttgttcgctgataacccgtcggcggtgaagaaagagctgaccattctcatccagaacacgattcgttccaaatggcacgaagttctggag

SEQ ID NO: 396 - protein, 346 aa, synthetic construct
  REGION 1..346: note = variant of RNA ligase 2 from Klebsiella phage KP179
MHHHHHHGGSNTFAYYSSLENHYNNKFIEKIRGAGFLRHTVEWVAREKIHGTNFSVIITPTEIVPAKRTGPILEGESFFGHEIIMKKYKDSFVKVQNMLNAMDLVSVQIFGEFAGGGIQKGVDYGDKDFYVFDILSDSGNEKVYWDDYRVESFCTTLGLKLAPLLGRGSFAELSQYPNDFKSIVNRYNELVDTTGLEHANKHVFGPQASSETGVAEGYVLKPVYPIFFNNGTRVAIKCKNSKFSEKAKLDTPIKAKVELTENDKRLLEIFSEYVTWNRVSNVLSHIGSVTAKDFGRVMGLTMKDIINEAAREGHDLLFADNPSAVKKELTILIQNTIRSKWHEVLE

SEQ ID NO: 397 - DNA, 1038 bp, synthetic construct
  misc_feature 1..1038: note = variant of RNA ligase 2 from Klebsiella phage KP179
  source 1..1038: mol_type = other DNA
atgcatcaccatcaccatcacggtggcagcaacatgtttgcgtattattcaagtctggaaaaccattacaataataagttcattgagaagatccgtggtgcaggcttcctgatgcacaccgtggaatgggtagctcgcgagaagattcatggaacgaactttagcgttatcattactccgaccgaaatcgtcccagccaaacgcacagggccgatcttggaaggcgagtcgttctttggtcacgaaattatcatgaaaaaatataaagactccttcgtgaaggtgcagaacatgctgaatgccatggatcttgttagcgtgcaaatctttggcgaatttgcgggtggtggcattcagaaaggcgtcgattacggagacaaagatttctatgtgtttgacatcctgtctgatagcgggaacgagaaagtttactgggatgactatcgcgtcgaatcgttttgcaccaccctcggtctgaaattagcgcctctgctgggacgtggtagtttcgctgaactgtcccagtacccaaacgatttcaaaagcattgtgaaccgttataatgaattggttgatacgacgggcctggaacatgccaataaacacgtctttggtccgcaagcgtcttctgaaactggcgtagcagaaggctacgttcttaaacccgtctatccgatcttctttaataatggtacgcgcgtggcgattaaatgcaagaactccaaattttcggagaaagccaagctggacaaaccaattaaagcgaaaggcccactgacggagaacgataaacgtctgctcgaaatctttagcgagtatgttacctggaatcgcgtcagtaacgtactgtcacatattggctcagtgaccgcaaaagattttgggcgtgttatgggtctgacgatgaaagacatcattaatgaagcagcacgcgaaggccatgatctgttgttcgctgataacccgtcggcggtgaagaaagagctgaccattctcatccgcaacacgattcgttccaaatggcacgaagttctggag

SEQ ID NO: 398 - protein, 346 aa, synthetic construct
  REGION 1..346: note = variant of RNA ligase 2 from Klebsiella phage KP179
MHHHHHHGGSNMFAYYSSLENHYNNKFIEKIRGAGFLMHTVEWVAREKIHGTNFSVIITPTEIVPAKRTGPILEGESFFGHEIIMKKYKDSFVKVQNMLNAMDLVSVQIFGEFAGGGIQKGVDYGDKDFYVFDILSDSGNEKVYWDDYRVESFCTTLGLKLAPLLGRGSFAELSQYPNDFKSIVNRYNELVDTTGLEHANKHVFGPQASSETGVAEGYVLKPVYPIFFNNGTRVAIKCKNSKFSEKAKLDKPIKAKGPLTENDKRLLEIFSEYVTWNRVSNVLSHIGSVTAKDFGRVMGLTMKDIINEAAREGHDLLFADNPSAVKKELTILIRNTIRSKWHEVLE

SEQ ID NO: 399 - DNA, 1038 bp, synthetic construct
  misc_feature 1..1038: note = variant of RNA ligase 2 from Klebsiella phage KP179
  source 1..1038: mol_type = other DNA
atgcatcaccatcaccatcacggtggcagcaacctgtttgcgtattattcaagtctggaaaaccattacaatctgaagttcattgagaagatccgtggtgcaggcttcctgcgtcacaccgtggaatgggtagctcgcgagaagattcatggaacgaactttagcgttatcattactccgaccgaaatcgtcccagccaaacgcacagggccgatcttggaaggcgagtcgttctttggtcacgaaattatcatgaaaaaatataaagactccttcgtgaaggtgcagaacatgctgaatgccatggatcttgttagcgtgcaaatctttggcgaatttgcgggtggtggcattcagaaaggcgtcgattacggagacaaagatttctatgtgtttgacatcctgtctgatagcgggaacgagaaagtttactgggatgactatcgcgtcgaatcgttttgcaccacgctcggtctgaaattagcgcctctgctgggacgtggtagtttcgctgaactgtcccagtacccaaacgatttcaaaagcattgtgaaccgttataatgaattggttgatacgacgggcctggaacatgccaataaacacgtctttggtccgcaagcgtcttctgaaactggcgtagcagaaggctacgttcttaaacccgtctatccgatcttctttaataacggtacgcgcgtggcgattaaatgcaagaactccaaattttcggagaaagccaagctggacacgccaattaaggcggcggtggaactgacggagaacgataaacgtctgctcgaaatctttagcgagtatgttacctggaatcgcgtcagtaacgtactgtcacatattggctcagtgaccgcaaaagattttgggcgtgttatgggtctgacgatgaaagacatcattaatgaagcagcacgcgaaggccatgatctgttgttcgctgataacccgtcggcggtgaagaaagagctgaccattctcatccagaacacgattcgttccaaatggcacgaagttctggag

SEQ ID NO: 400 - protein, 346 aa, synthetic construct
  REGION 1..346: note = variant of RNA ligase 2 from Klebsiella phage KP179
MHHHHHHGGSNLFAYYSSLENHYNLKFIEKIRGAGFLRHTVEWVAREKIHGTNFSVIITPTEIVPAKRTGPILEGESFFGHEIIMKKYKDSFVKVQNMLNAMDLVSVQIFGEFAGGGIQKGVDYGDKDFYVFDILSDSGNEKVYWDDYRVESFCTTLGLKLAPLLGRGSFAELSQYPNDFKSIVNRYNELVDTTGLEHANKHVFGPQASSETGVAEGYVLKPVYPIFFNNGTRVAIKCKNSKFSEKAKLDTPIKAAVELTENDKRLLEIFSEYVTWNRVSNVLSHIGSVTAKDFGRVMGLTMKDIINEAAREGHDLLFADNPSAVKKELTILIQNTIRSKWHEVLE

SEQ ID NO: 401 - DNA, 1038 bp, synthetic construct
  misc_feature 1..1038: note = variant of RNA ligase 2 from Klebsiella phage KP179
  source 1..1038: mol_type = other DNA
atgcatcaccatcaccatcacggtggcagcaacatgtttgcgtattattcaagtctggaaaaccattacaataataagttcattgagaagatccgtggtgcaggcttcctgatgcacaccgtggaatgggtagctcgcgagaagattcatggaacgaactttagcgttatcattactccgaccgaaatcgtcccagccaaacgcacagggccgatcttggaaggcgagtcgttctttggtcacgaaattatcatgaaaaaatataaagactccttcgtgaaggtgcagaacatgctgaatgccatggatcttgttagcgtgcaaatctttggcgaatttgcgggtggtggcattcagaaaggcgtcgattacggagacaaagatttctatgtgtttgacatcctgtctgatagcgggaacgagaaagtttactgggatgactatcgcgtcgaatcgttttgcaccacgctcggtctgaaattagcgcctctgctgggacgtggtagtttcgctgaactgtcccagtacccaaacgatttcaaaagcattgtgaaccgttataatgaattggttgatacgacgggcctggaacatgccaataaacacgtctttggtccgcaagcgtcttctgaaactggcgtagcagaaggctacgttcttaaacccgtctatccgatcttctttaataatggtacgcgcgtggcgattaaatgcaagaactccaaattttcggagaaagccaagctggacaaaccaattaaagcgaaagtggaactgacggagaacgataaacgtctgctcgaaatctttagcgagtatgttacctggaatcgcgtcagtaacgtactgtcacatattggctcagtgaccgcaaaagattttgggcgtgttatgggtctgacgatgaaagacatcattaatgaagcagcacgcgaaggccatgatctgttgttcgctgataacccgtcggcggtgaagaaagagctgaccattctcatccgcaacacgattcgttccaaatggcacgaagttctggag

SEQ ID NO: 402 - protein, 346 aa, synthetic construct
  REGION 1..346: note = variant of RNA ligase 2 from Klebsiella phage KP179
MHHHHHHGGSNMFAYYSSLENHYNNKFIEKIRGAGFLMHTVEWVAREKIHGTNFSVIITPTEIVPAKRTGPILEGESFFGHEIIMKKYKDSFVKVQNMLNAMDLVSVQIFGEFAGGGIQKGVDYGDKDFYVFDILSDSGNEKVYWDDYRVESFCTTLGLKLAPLLGRGSFAELSQYPNDFKSIVNRYNELVDTTGLEHANKHVFGPQASSETGVAEGYVLKPVYPIFFNNGTRVAIKCKNSKFSEKAKLDKPIKAKVELTENDKRLLEIFSEYVTWNRVSNVLSHIGSVTAKDFGRVMGLTMKDIINEAAREGHDLLFADNPSAVKKELTILIRNTIRSKWHEVLE

SEQ ID NO: 403 - DNA, 1038 bp, synthetic construct
  misc_feature 1..1038: note = variant of RNA ligase 2 from Klebsiella phage KP179
  source 1..1038: mol_type = other DNA
atgcatcaccatcaccatcacggtggcagcaacacgtttgcgtattattcaagtctggaaaaccattacaatctgaagttcattgagaagatccgtggtgcaggcttcctgatgcacaccgtggaatgggtagctcgcgagaagattcatggaacgaactttagcgttatcattactccgaccgaaatcgtcccagccaaacgcacagggccgatcttggaaggcgagtcgttctttggtcacgaaattatcatgaaaaaatataaagactccttcgtgaaggtgcagaacatgctgaatgccatggatcttgttagcgtgcaaatctttggcgaatttgcgggtggtggcattcagaaaggcgtcgattacggagacaaagatttctatgtgtttgacatcctgtctgatagcgggaacgagaaagtttactgggatgactatcgcgtcgaatcgttttgcaccacgctcggtctgaaattagcgcctctgctgggacgtggtagtttcgctgaactgtcccagtacccaaacgatttcaaaagcattgtgaaccgttataatgaattggttgatacgacgggcctggaacatgccaataaacacgtctttggtccgcaagcgtcttctgaaactggcgtagcagaaggctacgttcttaaacccgtctatccgatcttctttaataccggtacgcgcgtggcgattaaatgcaagaactccaaattttcggagaaagccaagctggacaagccaattgtggcggcggtggaactgacggagaacgataaacgtctgctcgaaatctttagcgagtatgttacctggaatcgcgtcagtaacgtactgtcacatattggctcagtgaccgcaaaagattttgggcgtgttatgggtctgacgatgaaagacatcattaatgaagcagcacgcgaaggccatgatctgttgttcgctgataacccgtcggcggtgaagaaagagctgaccattctcatccagaacacgattcgttccaaatggcacgaagttctggag

SEQ ID NO: 404 - protein, 346 aa, synthetic construct
  REGION 1..346: note = variant of RNA ligase 2 from Klebsiella phage KP179
MHHHHHHGGSNTFAYYSSLENHYNLKFIEKIRGAGFLMHTVEWVAREKIHGTNFSVIITPTEIVPAKRTGPILEGESFFGHEIIMKKYKDSFVKVQNMLNAMDLVSVQIFGEFAGGGIQKGVDYGDKDFYVFDILSDSGNEKVYWDDYRVESFCTTLGLKLAPLLGRGSFAELSQYPNDFKSIVNRYNELVDTTGLEHANKHVFGPQASSETGVAEGYVLKPVYPIFFNTGTRVAIKCKNSKFSEKAKLDKPIVAAVELTENDKRLLEIFSEYVTWNRVSNVLSHIGSVTAKDFGRVMGLTMKDIINEAAREGHDLLFADNPSAVKKELTILIQNTIRSKWHEVLE

SEQ ID NO: 405 - DNA, 1038 bp, synthetic construct
  misc_feature 1..1038: note = variant of RNA ligase 2 from Klebsiella phage KP179
  source 1..1038: mol_type = other DNA
atgcatcaccatcaccatcacggtggcagcaacacgtttgcgtattattcaagtctggaaaaccattacaataataagttcattgagaagatccgtggtgcaggcttcctgatgcacaccgtggaatgggtagctcgcgagaagattcatggaacgaactttagcgttatcattactccgaccgaaatcgtcccagccaaacgcacagggccgatcttggaaggcgagtcgttctttggtcacgaaattatcatgaaaaaatataaagactccttcgtgaaggtgcagaacatgctgaatgccatggatcttgttagcgtgcaaatctttggcgaatttgcgggtggtggcattcagaaaggcgtcgattacggagacaaagatttctatgtgtttgacatcctgtctgatagcgggaacgagaaagtttactgggatgactatcgcgtcgaatcgttttgcaccacgctcggtctgaaattagcgcctctgctgggacgtggtagtttcgctgaactgtcccagtacccaaacgatttcaaaagcattgtgaaccgttataatgaattggttgatacgacgggcctggaacatgccaataaacacgtctttggtccgcaagcgtcttctgaaactggcgtagcagaaggctacgttcttaaacccgtctatccgatcttctttaataacggtacgcgcgtggcgattaaatgcaagaactccaaattttcggagaaagccaagctggactcgccaattaaggcggcggtggaactgacggagaacgataaacgtctgctcgaaatctttagcgagtatgttacctggaatcgcgtcagtaacgtactgtcacatattggctcagtgaccgcaaaagattttgggcgtgttatgggtctgacgatgaaagacatcattaatgaagcagcacgcgaaggccatgatctgttgttcgctgataacccgtcggcggtgaagaaagagctgaccattctcatccagaacacgattcgttccaaatggcacgaagttctggag

SEQ ID NO: 406 - protein, 346 aa, synthetic construct
  REGION 1..346: note = variant of RNA ligase 2 from Klebsiella phage KP179
MHHHHHHGGSNTFAYYSSLENHYNNKFIEKIRGAGFLMHTVEWVAREKIHGTNFSVIITPTEIVPAKRTGPILEGESFFGHEIIMKKYKDSFVKVQNMLNAMDLVSVQIFGEFAGGGIQKGVDYGDKDFYVFDILSDSGNEKVYWDDYRVESFCTTLGLKLAPLLGRGSFAELSQYPNDFKSIVNRYNELVDTTGLEHANKHVFGPQASSETGVAEGYVLKPVYPIFFNNGTRVAIKCKNSKFSEKAKLDSPIKAAVELTENDKRLLEIFSEYVTWNRVSNVLSHIGSVTAKDFGRVMGLTMKDIINEAAREGHDLLFADNPSAVKKELTILIQNTIRSKWHEVLE

SEQ ID NO: 407 - DNA, 1038 bp, synthetic construct
  misc_feature 1..1038: note = variant of RNA ligase 2 from Klebsiella phage KP179
  source 1..1038: mol_type = other DNA
atgcatcaccatcaccatcacggtggcagcaacatgtttgcgtattattcaagtctggaaaaccattacaataataagttcattgagaagatccgtggtgcaggcttcctgcgtcacaccgtggaatgggtagctcgcgagaagattcatggaacgaactttagcgttatcattactccgaccgaaatcgtcccagccaaacgcacagggccgatcttggaaggcgagtcgttctttggtcacgaaattatcatgaaaaaatataaagactccttcgtgaaggtgcagaacatgctgaatgccatggatcttgttagcgtgcaaatctttggcgaatttgcgggtggtggcattcagaaaggcgtcgattacggagacaaagatttctatgtgtttgacatcctgtctgatagcgggaacgagaaagtttactgggatgactatcgcgtcgaatcgttttgcaccacgctcggtctgaaattagcgcctctgctgggacgtggtagtttcgctgaactgtcccagtacccaaacgatttcaaaagcattgtgaaccgttataatgaattggttgatacgacgggcctggaacatgccaataaacacgtctttggtccgcaagcgtcttctgaaactggcgtagcagaaggctacgttcttaaacccgtctatccgatcttctttaataacggtacgcgcgtggcgattaaatgcaagaactccaaattttcggagaaagccaagctggacacgccaattaaggcggcggtggaactgacggagaacgataaacgtctgctcgaaatctttagcgagtatgttacctggaatcgcgtcagtaacgtactgtcacatattggctcagtgaccgcaaaagattttgggcgtgttatgggtctgacgatgaaagacatcattaatgaagcagcacgcgaaggccatgatctgttgttcgctgataacccgtcggcggtgaagaaagagctgaccattctcatccagaacacgattcgttccaaatggcacgaagttctggag

SEQ ID NO: 408 - protein, 346 aa, synthetic construct
  REGION 1..346: note = variant of RNA ligase 2 from Klebsiella phage KP179
MHHHHHHGGSNMFAYYSSLENHYNNKFIEKIRGAGFLRHTVEWVAREKIHGTNFSVIITPTEIVPAKRTGPILEGESFFGHEIIMKKYKDSFVKVQNMLNAMDLVSVQIFGEFAGGGIQKGVDYGDKDFYVFDILSDSGNEKVYWDDYRVESFCTTLGLKLAPLLGRGSFAELSQYPNDFKSIVNRYNELVDTTGLEHANKHVFGPQASSETGVAEGYVLKPVYPIFFNNGTRVAIKCKNSKFSEKAKLDTPIKAAVELTENDKRLLEIFSEYVTWNRVSNVLSHIGSVTAKDFGRVMGLTMKDIINEAAREGHDLLFADNPSAVKKELTILIQNTIRSKWHEVLE

SEQ ID NO: 409 - DNA, 1038 bp, synthetic construct
  misc_feature 1..1038: note = variant of RNA ligase 2 from Klebsiella phage KP179
  source 1..1038: mol_type = other DNA
atgcatcaccatcaccatcacggtggcagcaacgtgtttgcgtattattcaagtctggaaaaccattacaataataagttcattgagaagatccgtggtgcaggcttcctgatgcacaccgtggaatgggtagctcgcgagaagattcatggaacgaactttagcgttatcattactccgaccgaaatcgtcccagccaaacgcacagggccgatcttggaaggcgagtcgttctttggtcacgaaattatcatgaaaaaatataaagactccttcgtgaaggtgcagaacatgctgaatgccatggatcttgttagcgtgcaaatctttggcgaatttgcgggtggtggcattcagaaaggcgtcgattacggagacaaagatttctatgtgtttgacatcctgtctgatagcgggaacgagaaagtttactgggatgactatcgcgtcgaatcgttttgcaccacgctcggtctgaaattagcgcctctgctgggacgtggtagtttcgctgaactgtcccagtacccaaacgatttcaaaagcattgtgaaccgttataatgaattggttgatacgacgggcctggaacatgccaataaacacgtctttggtccgcaagcgtcttctgaaactggcgtagcagaaggctacgttcttaaacccgtctatccgatcttctttaataacggtacgcgcgtggcgattaaatgcaagaactccaaattttcggagaaagccaagctggactcgccaattaaggcgaaggtggaactgacggagaacgataaacgtctgctcgaaatctttagcgagtatgttacctggaatcgcgtcagtaacgtactgtcacatattggctcagtgaccgcaaaagattttgggcgtgttatgggtctgacgatgaaagacatcattaatgaagcagcacgcgaaggccatgatctgttgttcgctgataacccgtcggcggtgaagaaagagctgaccattctcatccagaacacgattcgttccaaatggcacgaagttctggag

SEQ ID NO: 410 - protein, 346 aa, synthetic construct
  REGION 1..346: note = variant of RNA ligase 2 from Klebsiella phage KP179
MHHHHHHGGSNVFAYYSSLENHYNNKFIEKIRGAGFLMHTVEWVAREKIHGTNFSVIITPTEIVPAKRTGPILEGESFFGHEIIMKKYKDSFVKVQNMLNAMDLVSVQIFGEFAGGGIQKGVDYGDKDFYVFDILSDSGNEKVYWDDYRVESFCTTLGLKLAPLLGRGSFAELSQYPNDFKSIVNRYNELVDTTGLEHANKHVFGPQASSETGVAEGYVLKPVYPIFFNNGTRVAIKCKNSKFSEKAKLDSPIKAKVELTENDKRLLEIFSEYVTWNRVSNVLSHIGSVTAKDFGRVMGLTMKDIINEAAREGHDLLFADNPSAVKKELTILIQNTIRSKWHEVLE

SEQ ID NO: 411 - DNA, 1038 bp, synthetic construct
  misc_feature 1..1038: note = variant of RNA ligase 2 from Klebsiella phage KP179
  source 1..1038: mol_type = other DNA
atgcatcaccatcaccatcacggtggcagcaacgtgtttgcgtattattcaagtctggaaaaccattacaataataagttcattgagaagatccgtggtgcaggcttcctgatgcacaccgtggaatgggtagctcgcgagaagattcatggaacgaactttagcgttatcattactccgaccgaaatcgtcccagccaaacgcacagggccgatcttggaaggcgagtcgttctttggtcacgaaattatcatgaaaaaatataaagactccttcgtgaaggtgcagaacatgctgaatgccatggatcttgttagcgtgcaaatctttggcgaatttgcgggtggtggcattcagaaaggcgtcgattacggagacaaagatttctatgtgtttgacatcctgtctgatagcgggaacgagaaagtttactgggatgactatcgcgtcgaatcgttttgcaccacgctcggtctgaaattagcgcctctgctgggacgtggtagtttcgctgaactgtcccagtacccaaacgatttcaaaagcattgtgaaccgttataatgaattggttgatacgacgggcctggaacatgccaataaacacgtctttggtccgcaagcgtcttctgaaactggcgtagcagaaggctacgttcttaaacccgtctatccgatcttctttaataacggtacgcgcgtggcgattaaatgcaagaactccaaattttcggagaaagccaagctggacacgccaattctggcgaaggtggaactgacggagaacgataaacgtctgctcgaaatctttagcgagtatgttacctggaatcgcgtcagtaacgtactgtcacatattggctcagtgaccgcaaaagattttgggcgtgttatgggtctgacgatgaaagacatcattaatgaagcagcacgcgaaggccatgatctgttgttcgctgataacccgtcggcggtgaagaaagagctgaccattctcatccagaacacgattcgttccaaatggcacgaagttctggag

SEQ ID NO: 412 - protein, 346 aa, synthetic construct
  REGION 1..346: note = variant of RNA ligase 2 from Klebsiella phage KP179
MHHHHHHGGSNVFAYYSSLENHYNNKFIEKIRGAGFLMHTVEWVAREKIHGTNFSVIITPTEIVPAKRTGPILEGESFFGHEIIMKKYKDSFVKVQNMLNAMDLVSVQIFGEFAGGGIQKGVDYGDKDFYVFDILSDSGNEKVYWDDYRVESFCTTLGLKLAPLLGRGSFAELSQYPNDFKSIVNRYNELVDTTGLEHANKHVFGPQASSETGVAEGYVLKPVYPIFFNNGTRVAIKCKNSKFSEKAKLDTPILAKVELTENDKRLLEIFSEYVTWNRVSNVLSHIGSVTAKDFGRVMGLTMKDIINEAAREGHDLLFADNPSAVKKELTILIQNTIRSKWHEVLE

SEQ ID NO: 413 - DNA, 1038 bp, synthetic construct
  misc_feature 1..1038: note = variant of RNA ligase 2 from Klebsiella phage KP179
  source 1..1038: mol_type = other DNA
atgcatcaccatcaccatcacggtggcagcaacgtgtttgcgtattattcaagtctggaaaaccattacaataataagttcattgagaagatccgtggtgcaggcttcctgcgtcacaccgtggaatgggtagctcgcgagaagattcatggaacgaactttagcgttatcattactccgaccgaaatcgtcccagccaaacgcacagggccgatcttggaaggcgagtcgttctttggtcacgaaattatcatgaaaaaatataaagactccttcgtgaaggtgcagaacatgctgaatgccatggatcttgttagcgtgcaaatctttggcgaatttgcgggtggtggcattcagaaaggcgtcgattacggagacaaagatttctatgtgtttgacatcctgtctgatagcgggaacgagaaagtttactgggatgactatcgcgtcgaatcgttttgcaccacgctcggtctgaaattagcgcctctgctgggacgtggtagtttcgctgaactgtcccagtacccaaacgatttcaaaagcattgtgaaccgttataatgaattggttgatacgacgggcctggaacatgccaataaacacgtctttggtccgcaagcgtcttctgaaactggcgtagcagaaggctacgttcttaaacccgtctatccgatcttctttaataccggtacgcgcgtggcgattaaatgcaagaactccaaattttcggagaaagccaagctggacacgccaattgtggcgaaggtggaactgacggagaacgataaacgtctgctcgaaatctttagcgagtatgttacctggaatcgcgtcagtaacgtactgtcacatattggctcagtgaccgcaaaagattttgggcgtgttatgggtctgacgatgaaagacatcattaatgaagcagcacgcgaaggccatgatctgttgttcgctgataacccgtcggcggtgaagaaagagctgaccattctcatccagaacacgattcgttccaaatggcacgaagttctggag

SEQ ID NO: 414 - protein, 346 aa, synthetic construct
  REGION 1..346: note = variant of RNA ligase 2 from Klebsiella phage KP179
MHHHHHHGGSNVFAYYSSLENHYNNKFIEKIRGAGFLRHTVEWVAREKIHGTNFSVIITPTEIVPAKRTGPILEGESFFGHEIIMKKYKDSFVKVQNMLNAMDLVSVQIFGEFAGGGIQKGVDYGDKDFYVFDILSDSGNEKVYWDDYRVESFCTTLGLKLAPLLGRGSFAELSQYPNDFKSIVNRYNELVDTTGLEHANKHVFGPQASSETGVAEGYVLKPVYPIFFNTGTRVAIKCKNSKFSEKAKLDTPIVAKVELTENDKRLLEIFSEYVTWNRVSNVLSHIGSVTAKDFGRVMGLTMKDIINEAAREGHDLLFADNPSAVKKELTILIQNTIRSKWHEVLE

SEQ ID NO: 415 - DNA, 1038 bp, synthetic construct
  misc_feature 1..1038: note = variant of RNA ligase 2 from Klebsiella phage KP179
  source 1..1038: mol_type = other DNA
atgcatcaccatcaccatcacggtggcagcaacctgtttgcgtattattcaagtctggaaaaccattacaataataagttcattgagaagatccgtggtgcaggcttcctgcgtcacaccgtggaatgggtagctcgcgagaagattcatggaacgaactttagcgttatcattactccgaccgaaatcgtcccagccaaacgcacagggccgatcttggaaggcgagtcgttctttggtcacgaaattatcatgaaaaaatataaagactccttcgtgaaggtgcagaacatgctgaatgccatggatcttgttagcgtgcaaatctttggcgaatttgcgggtggtggcattcagaaaggcgtcgattacggagacaaagatttctatgtgtttgacatcctgtctgatagcgggaacgagaaagtttactgggatgactatcgcgtcgaatcgttttgcaccacgctcggtctgaaattagcgcctctgctgggacgtggtagtttcgctgaactgtcccagtacccaaacgatttcaaaagcattgtgaaccgttataatgaattggttgatacgacgggcctggaacatgccaataaacacgtctttggtccgcaagcgtcttctgaaactggcgtagcagaaggctacgttcttaaacccgtctatccgatcttctttaataatggtacgcgcgtggcgattaaatgcaagaactccaaattttcggagaaagccaagctggacaaaccaattaaagcgaaagtggaactgacggagaacgataaacgtctgctcgaaatctttagcgagtatgttacctggaatcgcgtcagtaacgtactgtcacatattggctcagtgaccgcaaaagattttgggcgtgttatgggtctgacgatgaaagacatcattaatgaagcagcacgcgaaggccatgatctgttgttcgctgataacccgtcggcggtgaagaaagagctgaccattctcatccagaacacgattcgttccaaatggcacgaagttctggag

SEQ ID NO: 416 - protein, 346 aa, synthetic construct
  REGION 1..346: note = variant of RNA ligase 2 from Klebsiella phage KP179
MHHHHHHGGSNLFAYYSSLENHYNNKFIEKIRGAGFLRHTVEWVAREKIHGTNFSVIITPTEIVPAKRTGPILEGESFFGHEIIMKKYKDSFVKVQNMLNAMDLVSVQIFGEFAGGGIQKGVDYGDKDFYVFDILSDSGNEKVYWDDYRVESFCTTLGLKLAPLLGRGSFAELSQYPNDFKSIVNRYNELVDTTGLEHANKHVFGPQASSETGVAEGYVLKPVYPIFFNNGTRVAIKCKNSKFSEKAKLDKPIKAKVELTENDKRLLEIFSEYVTWNRVSNVLSHIGSVTAKDFGRVMGLTMKDIINEAAREGHDLLFADNPSAVKKELTILIQNTIRSKWHEVLE

SEQ ID NO: 417 - DNA, 1038 bp, synthetic construct
  misc_feature 1..1038: note = variant of RNA ligase 2 from Klebsiella phage KP179
  source 1..1038: mol_type = other DNA
atgcatcaccatcaccatcacggtggcagcaacctgtttgcgtattattcaagtctggaaaaccattacaataataagttcattgagaagatccgtggtgcaggcttcctgatgcacaccgtggaatgggtagctcgcgagaagattcatggaacgaactttagcgttatcattactccgaccgaaatcgtcccagccaaacgcacagggccgatcttggaaggcgagtcgttctttggtcacgaaattatcatgaaaaaatataaagactccttcgtgaaggtgcagaacatgctgaatgccatggatcttgttagcgtgcaaatctttggcgaatttgcgggtggtggcattcagaaaggcgtcgattacggagacaaagatttctatgtgtttgacatcctgtctgatagcgggaacgagaaagtttactgggatgactatcgcgtcgaatcgttttgcaccacgctcggtctgaaattagcgcctctgctgggacgtggtagtttcgctgaactgtcccagtacccaaacgatttcaaaagcattgtgaaccgttataatgaattggttgatacgacgggcctggaacatgccaataaacacgtctttggtccgcaagcgtcttctgaaactggcgtagcagaaggctacgttcttaaacccgtctatccgatcttctttaataacggtacgcgcgtggcgattaaatgcaagaactccaaattttcggagaaagccaagctggactcgccaattctggcggcggtggaactgacggagaacgataaacgtctgctcgaaatctttagcgagtatgttacctggaatcgcgtcagtaacgtactgtcacatattggctcagtgaccgcaaaagattttgggcgtgttatgggtctgacgatgaaagacatcattaatgaagcagcacgcgaaggccatgatctgttgttcgctgataacccgtcggcggtgaagaaagagctgaccattctcatccagaacacgattcgttccaaatggcacgaagttctggag

SEQ ID NO: 418 - protein, 346 aa, synthetic construct
  REGION 1..346: note = variant of RNA ligase 2 from Klebsiella phage KP179
MHHHHHHGGSNLFAYYSSLENHYNNKFIEKIRGAGFLMHTVEWVAREKIHGTNFSVIITPTEIVPAKRTGPILEGESFFGHEIIMKKYKDSFVKVQNMLNAMDLVSVQIFGEFAGGGIQKGVDYGDKDFYVFDILSDSGNEKVYWDDYRVESFCTTLGLKLAPLLGRGSFAELSQYPNDFKSIVNRYNELVDTTGLEHANKHVFGPQASSETGVAEGYVLKPVYPIFFNNGTRVAIKCKNSKFSEKAKLDSPILAAVELTENDKRLLEIFSEYVTWNRVSNVLSHIGSVTAKDFGRVMGLTMKDIINEAAREGHDLLFADNPSAVKKELTILIQNTIRSKWHEVLE

SEQ ID NO: 419 - DNA, 1038 bp, synthetic construct
  misc_feature 1..1038: note = variant of RNA ligase 2 from Klebsiella phage KP179
  source 1..1038: mol_type = other DNA
atgcatcaccatcaccatcacggtggcagcaacatgtttgcgtattattcaagtctggaaaaccattacaataataagttcattgagaagatccgtggtgcaggcttcctgatgcacaccgtggaatgggtagctcgcgagaagattcatggaacgaactttagcgttatcattactccgaccgaaatcgtcccagccaaacgcacagggccgatcttggaaggcgagtcgttctttggtcacgaaattatcatgaaaaaatataaagactccttcgtgaaggtgcagaacatgctgaatgccatggatcttgttagcgtgcaaatctttggcgaatttgcgggtggtggcattcagaaaggcgtcgattacggagacaaagatttctatgtgtttgacatcctgtctgatagcgggaacgagaaagtttactgggatgactatcgcgtcgaatcgttttgcaccaccctcggtctgaaattagcgcctctgctgggacgtggtagtttcgctgaactgtcccagtacccaaacgatttcaaaagcattgtgaaccgttataatgaattggttgatacgacgggcctggaacatgccaataaacacgtctttggtccgcaagcgtcttctgaaactggcgtagcagaaggctacgttcttaaacccgtctatccgatcttctttaataatggtacgcgcgtggcgattaaatgcaagaactccaaattttcggagaaagccaagctggacaaaccaattaaagcgaaaggcccactgacggagaacgataaacgtctgctcgaaatctttagcgagtatgttacctggaatcgcgtcagtaacgtactgtcacatattggctcagtgaccgcaaaagattttgggcgtgttatgggtctgacgatgaaagacatcattaatgaagcagcacgcgaaggccatgatctgttgttcgctgataacccgtcggcggtgaagaaagagctgaccattctcatccgccacacgattcgttccaaatggcacgaagttctggag

SEQ ID NO: 420 - protein, 346 aa, synthetic construct
  REGION 1..346: note = variant of RNA ligase 2 from Klebsiella phage KP179
MHHHHHHGGSNMFAYYSSLENHYNNKFIEKIRGAGFLMHTVEWVAREKIHGTNFSVIITPTEIVPAKRTGPILEGESFFGHEIIMKKYKDSFVKVQNMLNAMDLVSVQIFGEFAGGGIQKGVDYGDKDFYVFDILSDSGNEKVYWDDYRVESFCTTLGLKLAPLLGRGSFAELSQYPNDFKSIVNRYNELVDTTGLEHANKHVFGPQASSETGVAEGYVLKPVYPIFFNNGTRVAIKCKNSKFSEKAKLDKPIKAKGPLTENDKRLLEIFSEYVTWNRVSNVLSHIGSVTAKDFGRVMGLTMKDIINEAAREGHDLLFADNPSAVKKELTILIRHTIRSKWHEVLE

SEQ ID NO: 421 - DNA, 1038 bp, synthetic construct
  misc_feature 1..1038: note = variant of RNA ligase 2 from Klebsiella phage KP179
  source 1..1038: mol_type = other DNA
atgcatcaccatcaccatcacggtggcagcaacctgtttgcgtattattcaagtctggaaaaccattacaataataagttcattgagaagatccgtggtgcaggcttcctgcgtcacaccgtggaatgggtagctcgcgagaagattcatggaacgaactttagcgttatcattactccgaccgaaatcgtcccagccaaacgcacagggccgatcttggaaggcgagtcgttctttggtcacgaaattatcatgaaaaaatataaagactccttcgtgaaggtgcagaacatgctgaatgccatggatcttgttagcgtgcaaatctttggcgaatttgcgggtggtggcattcagaaaggcgtcgattacggagacaaagatttctatgtgtttgacatcctgtctgatagcgggaacgagaaagtttactgggatgactatcgcgtcgaatcgttttgcaccacgctcggtctgaaattagcgcctctgctgggacgtggtagtttcgctgaactgtcccagtacccaaacgatttcaaaagcattgtgaaccgttataatgaattggttgatacgacgggcctggaacatgccaataaacacgtctttggtccgcaagcgtcttctgaaactggcgtagcagaaggctacgttcttaaacccgtctatccgatcttctttaataacggtacgcgcgtggcgattaaatgcaagaactccaaattttcggagaaagccaagctggacaagccaattctggcggcggtggaactgacggagaacgataaacgtctgctcgaaatctttagcgagtatgttacctggaatcgcgtcagtaacgtactgtcacatattggctcagtgaccgcaaaagattttgggcgtgttatgggtctgacgatgaaagacatcattaatgaagcagcacgcgaaggccatgatctgttgttcgctgataacccgtcggcggtgaagaaagagctgaccattctcatccagaacacgattcgttccaaatggcacgaagttctggag

SEQ ID NO: 422 - protein, 346 aa, synthetic construct
  REGION 1..346: note = variant of RNA ligase 2 from Klebsiella phage KP179
MHHHHHHGGSNLFAYYSSLENHYNNKFIEKIRGAGFLRHTVEWVAREKIHGTNFSVIITPTEIVPAKRTGPILEGESFFGHEIIMKKYKDSFVKVQNMLNAMDLVSVQIFGEFAGGGIQKGVDYGDKDFYVFDILSDSGNEKVYWDDYRVESFCTTLGLKLAPLLGRGSFAELSQYPNDFKSIVNRYNELVDTTGLEHANKHVFGPQASSETGVAEGYVLKPVYPIFFNNGTRVAIKCKNSKFSEKAKLDKPILAAVELTENDKRLLEIFSEYVTWNRVSNVLSHIGSVTAKDFGRVMGLTMKDIINEAAREGHDLLFADNPSAVKKELTILIQNTIRSKWHEVLE

SEQ ID NO: 423 - DNA, 1038 bp, synthetic construct
  misc_feature 1..1038: note = variant of RNA ligase 2 from Klebsiella phage KP179
  source 1..1038: mol_type = other DNA
atgcatcaccatcaccatcacggtggcagcaacgtgtttgcgtattattcaagtctggaaaaccattacaataataagttcattgagaagatccgtggtgcaggcttcctgatgcacaccgtggaatgggtagctcgcgagaagattcatggaacgaactttagcgttatcattactccgaccgaaatcgtcccagccaaacgcacagggccgatcttggaaggcgagtcgttctttggtcacgaaattatcatgaaaaaatataaagactccttcgtgaaggtgcagaacatgctgaatgccatggatcttgttagcgtgcaaatctttggcgaatttgcgggtggtggcattcagaaaggcgtcgattacggagacaaagatttctatgtgtttgacatcctgtctgatagcgggaacgagaaagtttactgggatgactatcgcgtcgaatcgttttgcaccacgctcggtctgaaattagcgcctctgctgggacgtggtagtttcgctgaactgtcccagtacccaaacgatttcaaaagcattgtgaaccgttataatgaattggttgatacgacgggcctggaacatgccaataaacacgtctttggtccgcaagcgtcttctgaaactggcgtagcagaaggctacgttcttaaacccgtctatccgatcttctttaataacggtacgcgcgtggcgattaaatgcaagaactccaaattttcggagaaagccaagctggacaagccaattctggcgaaggtggaactgacggagaacgataaacgtctgctcgaaatctttagcgagtatgttacctggaatcgcgtcagtaacgtactgtcacatattggctcagtgaccgcaaaagattttgggcgtgttatgggtctgacgatgaaagacatcattaatgaagcagcacgcgaaggccatgatctgttgttcgctgataacccgtcggcggtgaagaaagagctgaccattctcatccagaacacgattcgttccaaatggcacgaagttctggag

SEQ ID NO: 424 - protein, 346 aa, synthetic construct
  REGION 1..346: note = variant of RNA ligase 2 from Klebsiella phage KP179
MHHHHHHGGSNVFAYYSSLENHYNNKFIEKIRGAGFLMHTVEWVAREKIHGTNFSVIITPTEIVPAKRTGPILEGESFFGHEIIMKKYKDSFVKVQNMLNAMDLVSVQIFGEFAGGGIQKGVDYGDKDFYVFDILSDSGNEKVYWDDYRVESFCTTLGLKLAPLLGRGSFAELSQYPNDFKSIVNRYNELVDTTGLEHANKHVFGPQASSETGVAEGYVLKPVYPIFFNNGTRVAIKCKNSKFSEKAKLDKPILAKVELTENDKRLLEIFSEYVTWNRVSNVLSHIGSVTAKDFGRVMGLTMKDIINEAAREGHDLLFADNPSAVKKELTILIQNTIRSKWHEVLE

SEQ ID NO: 425 - DNA, 1038 bp, synthetic construct
  misc_feature 1..1038: note = variant of RNA ligase 2 from Klebsiella phage KP179
  source 1..1038: mol_type = other DNA
atgcatcaccatcaccatcacggtggcagcaacacgtttgcgtattattcaagtctggaaaaccattacaataacaagttcattgagaagatccgtggtgcaggcttcctgatgcacaccgtggaatgggtagctcgcgagaagattcatggaacgaactttagcgttatcattactccgaccgaaatcgtcccagccaaacgcacagggccgatcttggaaggcgagtcgttctttggtcacgaaattatcatgaaaaaatataaagactccttcgtgaaggtgcagaacatgctgaatgccatggatcttgttagcgtgcaaatctttggcgaatttgcgggtggtggcattcagaaaggcgtcgattacggagacaaagatttctatgtgtttgacatcctgtctgatagcgggaacgagaaagtttactgggatgactatcgcgtcgaatcgttttgcaccacgctcggtctgaaattagcgcctctgctgggacgtggtagtttcgctgaactgtcccagtacccaaacgatttcaaaagcattgtgaaccgttataatgaattggttgatacgacgggcctggaacatgccaataaacacgtctttggtccgcaagcgtcttctgaaactggcgtagcagaaggctacgttcttaaacccgtctatccgatcttctttaataacggtacgcgcgtggcgattaaatgcaagaactccaaattttcggagaaagccaagctggacaagccaattctggcgaaggtggaactgacggagaacgataaacgtctgctcgaaatctttagcgagtatgttacctggaatcgcgtcagtaacgtactgtcacatattggctcagtgaccgcaaaagattttgggcgtgttatgggtctgacgatgaaagacatcattaatgaagcagcacgcgaaggccatgatctgttgttcgctgataacccgtcggcggtgaagaaagagctgaccattctcatccagaacacgattcgttccaaatggcacgaagttctggag

SEQ ID NO: 426 - protein, 346 aa, synthetic construct
  REGION 1..346: note = variant of RNA ligase 2 from Klebsiella phage KP179
MHHHHHHGGSNTFAYYSSLENHYNNKFIEKIRGAGFLMHTVEWVAREKIHGTNFSVIITPTEIVPAKRTGPILEGESFFGHEIIMKKYKDSFVKVQNMLNAMDLVSVQIFGEFAGGGIQKGVDYGDKDFYVFDILSDSGNEKVYWDDYRVESFCTTLGLKLAPLLGRGSFAELSQYPNDFKSIVNRYNELVDTTGLEHANKHVFGPQASSETGVAEGYVLKPVYPIFFNNGTRVAIKCKNSKFSEKAKLDKPILAKVELTENDKRLLEIFSEYVTWNRVSNVLSHIGSVTAKDFGRVMGLTMKDIINEAAREGHDLLFADNPSAVKKELTILIQNTIRSKWHEVLE

SEQ ID NO: 427 - DNA, 1038 bp, synthetic construct
  misc_feature 1..1038: note = variant of RNA ligase 2 from Klebsiella phage KP179
  source 1..1038: mol_type = other DNA
atgcatcaccatcaccatcacggtggcagcaacacgtttgcgtattattcaagtctggaaaaccattacaataataagttcattgagaagatccgtggtgcaggcttcctgcgtcacaccgtggaatgggtagctcgcgagaagattcatggaacgaactttagcgttatcattactccgaccgaaatcgtcccagccaaacgcacagggccgatcttggaaggcgagtcgttctttggtcacgaaattatcatgaaaaaatataaagactccttcgtgaaggtgcagaacatgctgaatgccatggatcttgttagcgtgcaaatctttggcgaatttgcgggtggtggcattcagaaaggcgtcgattacggagacaaagatttctatgtgtttgacatcctgtctgatagcgggaacgagaaagtttactgggatgactatcgcgtcgaatcgttttgcaccacgctcggtctgaaattagcgcctctgctgggacgtggtagtttcgctgaactgtcccagtacccaaacgatttcaaaagcattgtgaaccgttataatgaattggttgatacgacgggcctggaacatgccaataaacacgtctttggtccgcaagcgtcttctgaaactggcgtagcagaaggctacgttcttaaacccgtctatccgatcttctttaataacggtacgcgcgtggcgattaaatgcaagaactccaaattttcggagaaagccaagctggacaagccaattaaggcgaaggtggaactgacggagaacgataaacgtctgctcgaaatctttagcgagtatgttacctggaatcgcgtcagtaacgtactgtcacatattggctcagtgaccgcaaaagattttgggcgtgttatgggtctgacgatgaaagacatcattaatgaagcagcacgcgaaggccatgatctgttgttcgctgataacccgtcggcggtgaagaaagagctgaccattctcatccagaacacgattcgttccaaatggcacgaagttctggag

SEQ ID NO: 428 - protein, 346 aa, synthetic construct
  REGION 1..346: note = variant of RNA ligase 2 from Klebsiella phage KP179
MHHHHHHGGSNTFAYYSSLENHYNNKFIEKIRGAGFLRHTVEWVAREKIHGTNFSVIITPTEIVPAKRTGPILEGESFFGHEIIMKKYKDSFVKVQNMLNAMDLVSVQIFGEFAGGGIQKGVDYGDKDFYVFDILSDSGNEKVYWDDYRVESFCTTLGLKLAPLLGRGSFAELSQYPNDFKSIVNRYNELVDTTGLEHANKHVFGPQASSETGVAEGYVLKPVYPIFFNNGTRVAIKCKNSKFSEKAKLDKPIKAKVELTENDKRLLEIFSEYVTWNRVSNVLSHIGSVTAKDFGRVMGLTMKDIINEAAREGHDLLFADNPSAVKKELTILIQNTIRSKWHEVLE

SEQ ID NO: 429 - DNA, 1038 bp, synthetic construct
  misc_feature 1..1038: note = variant of RNA ligase 2 from Klebsiella phage KP179
  source 1..1038: mol_type = other DNA
atgcatcaccatcaccatcacggtggcagcaacatgtttgcgtattattcaagtctggaaaaccattacaataataagttcattgagaagatccgtggtgcaggcttcctgatgcacaccgtggaatgggtagctcgcgagaagattcatggaacgaactttagcgttatcattactccgaccgaaatcgtcccagccaaacgcacagggccgatcttggaaggcgagtcgttctttggtcacgaaattatcatgaaaaaatataaagactccttcgtgaaggtgcagaacatgctgaatgccatggatcttgttagcgtgcaaatctttggcgaatttgcgggtggtggcattcagaaaggcgtcgattacggagacaaagatttctatgtgtttgacatcctgtctgatagcgggaacgagaaagtttactgggatgactatcgcgtcgaatcgttttgcaccaccctcggtctgaaattagcgcctctgctgggacgtggtagtttcgctgaactgtcccagtacccaaacgatttcaaaagcattgtgaaccgttataatgaattggttgatacgacgggcctggaacatgccaataaacacgtctttggtccgcaagcgtcttctgaaactggcgtagcagaaggctacgttcttaaacccgtctatccgatcttctttaataatggtgggcgcgtggcgattaaatgcaagaactccaaattttcggagaaagccacgctggacaaaccaattaaagcgaaaggcccactgacggagaacgataaacgtctgctcgaaatctttagcgagtatgttacctggaatcgcgtcagtaacgtactgtcacatattggctcagtgaccgcaaaagattttgggcgtgttatgggtctgacgatgaaagacatcattaatgaagcagcacgcgaaggccatgatctgttgttcgctgataacccgtcggcggtgaagaaagagctgaccattctcatccgccacacgattcgttccaaatggcacgaagttctggag

SEQ ID NO: 430 - protein, 346 aa, synthetic construct
  REGION 1..346: note = variant of RNA ligase 2 from Klebsiella phage KP179
MHHHHHHGGSNMFAYYSSLENHYNNKFIEKIRGAGFLMHTVEWVAREKIHGTNFSVIITPTEIVPAKRTGPILEGESFFGHEIIMKKYKDSFVKVQNMLNAMDLVSVQIFGEFAGGGIQKGVDYGDKDFYVFDILSDSGNEKVYWDDYRVESFCTTLGLKLAPLLGRGSFAELSQYPNDFKSIVNRYNELVDTTGLEHANKHVFGPQASSETGVAEGYVLKPVYPIFFNNGGRVAIKCKNSKFSEKATLDKPIKAKGPLTENDKRLLEIFSEYVTWNRVSNVLSHIGSVTAKDFGRVMGLTMKDIINEAAREGHDLLFADNPSAVKKELTILIRHTIRSKWHEVLE

SEQ ID NO: 431 - DNA, 1038 bp, synthetic construct
  misc_feature 1..1038: note = variant of RNA ligase 2 from Klebsiella phage KP179
  source 1..1038: mol_type = other DNA
atgcatcaccatcaccatcacggtggcagcaacctgtttgcgtattattcaagtctggaaaaccattacaataataagttcattgagaagatccgtggtgcaggcttcctgatgcacaccgtggaatgggtagctcgcgagaagattcatggaacgaactttagcgttatcattactccgaccgaaatcgtcccagccaaacgcacagggccgatcttggaaggcgagtcgttctttggtcacgaaattatcatgaaaaaatataaagactccttcgtgaaggtgcagaacatgctgaatgccacggatcttgttagcgtgcaaatctttggcgaatttgcgggtggtggcattcagaaaggcgtcgattacggagacaaagatttctatgtgtttgacatcctgtctgatagcgggaacgagaaagtttactgggatgactatcgcgtcgaatcgttttgcaccacgctcggtctgaaattagcgcctctgctgggacgtggtagtttcgctgaactgtcccagtacccaaacgatttcaaaagcattgtgaaccgttataatgaattggttgatacgacgggcctggaacatgccaataaacacgtctttggtccgcaagcgtcttctgaaactggcgtagcagaaggctacgttcttaaacccgtctatccgatcttctttaataacggtacgcgcgtggcgattaaatgcaagaactccaaattttcggagaaagccaagctggacaaaccaattaaagcgaaagtggaactgacggagaacgataaacgtctgctcgaaatctttagcgagtatgttacctggaatcgcgtcagtaacgtactgtcacatattggctcagtgaccgcaaaagattttgggcgtgttatgggtctgacgatgaaagacatcattaatgaagcagcacgcgaaggccatgatctgttgttcgctgataacccgtcggcggtgaagaaagagctgaccattctcatccagaacacgattcgttccaaatggcacgaagttctggag

SEQ ID NO: 432 - protein, 346 aa, synthetic construct
  REGION 1..346: note = variant of RNA ligase 2 from Klebsiella phage KP179
MHHHHHHGGSNLFAYYSSLENHYNNKFIEKIRGAGFLMHTVEWVAREKIHGTNFSVIITPTEIVPAKRTGPILEGESFFGHEIIMKKYKDSFVKVQNMLNATDLVSVQIFGEFAGGGIQKGVDYGDKDFYVFDILSDSGNEKVYWDDYRVESFCTTLGLKLAPLLGRGSFAELSQYPNDFKSIVNRYNELVDTTGLEHANKHVFGPQASSETGVAEGYVLKPVYPIFFNNGTRVAIKCKNSKFSEKAKLDKPIKAKVELTENDKRLLEIFSEYVTWNRVSNVLSHIGSVTAKDFGRVMGLTMKDIINEAAREGHDLLFADNPSAVKKELTILIQNTIRSKWHEVLE

SEQ ID NO: 433 - DNA, 1038 bp, synthetic construct
  misc_feature 1..1038: note = variant of RNA ligase 2 from Klebsiella phage KP179
  source 1..1038: mol_type = other DNA
atgcatcaccatcaccatcacggtggcagcaacatgtttgcgtattattcaagtctggaaaaccattacaataataagttcattgagaagatccgtggtgcaggcttcctgatgcacaccgtggaatgggtagctcgcgagaagattcatggaacgaactttagcgttatcattactccgaccgaaatcgtcccagccaaacgcacagggccgatcttggaaggcgagtcgttctttggtcacgaaattatcatgaaaaaatataaagactccttcgtgaaggtgcagaacatgctgaatgccatggatcttgttagcgtgcaaatctttggcgaatttgcgggtggtggcattcagaaaggcgtcgattacggagacaaagatttctatgtgtttgacatcctgtctgatagcgggaacgagaaagtttactgggatgactatcgcgtcgaatcgttttgcacccagctcggtctgaaattagcgcctctgctgggacgtggtagtttcgctgaactgtcccagtacccaaacgatttcaaaagcattgtgaaccgttataatgaattggttgatacgacgggcctggaacatgccaataaacacgtctttggtccgcaagcgtcttctgaaactggcgtagcagaaggctacgttcttaaacccgtctatccgatcttctttaataatggtacgcgcgtggcgattaaatgcaagaactccaaattttcggagaaagccaagctggacaaaccaattaaagcgaaagtcccactgacggagaacgataaacgtctgctcgaaatctttagcgagtatgttacctggaatcgcgtcagtaacgtactgtcacatattggctcagtgaccgcaaaagattttgggcgtgttatgggtctgacgatgaaagacatcattaatgaagcagcacgcgaaggccatgatctgttgttcgctgataacccgtcggcggtgaagaaagagctgaccattctcatccgccacacgattcgttccaaatggcacgaagttctggag

SEQ ID NO: 434 - protein, 346 aa, synthetic construct
  REGION 1..346: note = variant of RNA ligase 2 from Klebsiella phage KP179
MHHHHHHGGSNMFAYYSSLENHYNNKFIEKIRGAGFLMHTVEWVAREKIHGTNFSVIITPTEIVPAKRTGPILEGESFFGHEIIMKKYKDSFVKVQNMLNAMDLVSVQIFGEFAGGGIQKGVDYGDKDFYVFDILSDSGNEKVYWDDYRVESFCTQLGLKLAPLLGRGSFAELSQYPNDFKSIVNRYNELVDTTGLEHANKHVFGPQASSETGVAEGYVLKPVYPIFFNNGTRVAIKCKNSKFSEKAKLDKPIKAKVPLTENDKRLLEIFSEYVTWNRVSNVLSHIGSVTAKDFGRVMGLTMKDIINEAAREGHDLLFADNPSAVKKELTILIRHTIRSKWHEVLE

SEQ ID NO: 435 - DNA, 1038 bp, synthetic construct
  misc_feature 1..1038: note = variant of RNA ligase 2 from Klebsiella phage KP179
  source 1..1038: mol_type = other DNA
atgcatcaccatcaccatcacggtggcagcaacatgtttgcgtattattcaagtctggaaaaccattacaataataagttcattgagaagatccgtggtgcaggcttcctgatgcacaccgtggaatgggtagctcgcgagaagattcatggaacgaactttagcgttatcattactccgaccgaaatcgtcccagccaaacgcacagggccgatcttggaaggcgagtcgttctttggtcacgaaattatcatgaaaaaatataaagactccttcgtgaaggtgcagaacatgctgaatgccatggatcttgttagcgtgcaaatctttggcgaatttgcgggtggtggcattcagaaaggcgtcgattacggagacaaagatttctatgtgtttgacatcctgtctgatagcgggaacgagaaagtttactgggatgactatcgcgtcgaatcgttttgcacccagctcggtctgaaattagcgcctctgctgggacgtggtagtttcgctgaactgtcccagtacccaaacgatttcaaaagcattgtgaaccgttataatgaattggttgatacgacgggcctggaacatgccaataaacacgtctttggtccgcaagcgtcttctgaaactggcgtagcagaaggctacgttcttaaacccgtctatccgatcttctttaataatggtacgcgcgtggcgattaaatgcaagaactccaaattttcggagaaagccaagcgcgacaaaccaattaaagcgaaagtggaactgacggagaacgataaacgtctgctcgaaatctttagcgagtatgttacctggaatcgcgtcagtaacgtactgtcacatattggctcagtgaccgcaaaagattttgggcgtgttatgggtctgacgatgaaagacatcattaatgaagcagcacgcgaaggccatgatctgttgttcgctgataacccgtcggcggtgaagaaagagctgaccattctcatccgccacacgattcgttccaaatggcacgaagttctggag

SEQ ID NO: 436 - protein, 346 aa, synthetic construct
  REGION 1..346: note = variant of RNA ligase 2 from Klebsiella phage KP179
MHHHHHHGGSNMFAYYSSLENHYNNKFIEKIRGAGFLMHTVEWVAREKIHGTNFSVIITPTEIVPAKRTGPILEGESFFGHEIIMKKYKDSFVKVQNMLNAMDLVSVQIFGEFAGGGIQKGVDYGDKDFYVFDILSDSGNEKVYWDDYRVESFCTQLGLKLAPLLGRGSFAELSQYPNDFKSIVNRYNELVDTTGLEHANKHVFGPQASSETGVAEGYVLKPVYPIFFNNGTRVAIKCKNSKFSEKAKRDKPIKAKVELTENDKRLLEIFSEYVTWNRVSNVLSHIGSVTAKDFGRVMGLTMKDIINEAAREGHDLLFADNPSAVKKELTILIRHTIRSKWHEVLE

SEQ ID NO: 437 - DNA, 1038 bp, synthetic construct
  misc_feature 1..1038: note = variant of RNA ligase 2 from Klebsiella phage KP179
  source 1..1038: mol_type = other DNA
atgcatcaccatcaccatcacggtggcagcaacacgtttgcgtattattcaagtctggaaaaccattacaataacaagttcattgagaagatccgtggtgcaggcttcctgatgcacaccgtggaatgggtagctcgcgagaagattcatggaacgaactttagcgttatcattactccgaccgaaatcgtcccagccaaacgcacagggccgatcttggaaggcgagtcgttctttggtcacgaaattatcatgaaaaaatataaagactccttcgtgaaggtgcagaacatgctgaatgccacggatcttgttagcgtgcaaatctttggcgaatttgcgggtggtggcattcagaaaggcgtcgattacggagacaaagatttctatgtgtttgacatcctgtctgatagcgggaacgagaaagtttactgggatgactatcgcgtcgaatcgttttgcaccacgctcggtctgaaattagcgcctctgctgggacgtggtagtttcgctgaactgtcccagtacccaaacgatttcaaaagcattgtgaaccgttataatgaattggttgatacgacgggcctggaacatgccaataaacacgtctttggtccgcaagcgtcttctgaaactggcgtagcagaaggctacgttcttaaacccgtctatccgatcttctttaataccggtacgcgcgtggcgattaaatgcaagaactccaaattttcggagaaagccaagctggacaagccaattctggcgaaggtggaactgacggagaacgataaacgtctgctcgaaatctttagcgagtatgttacctggaatcgcgtcagtaacgtactgtcacatattggctcagtgaccgcaaaagattttgggcgtgttatgggtctgacgatgaaagacatcattaatgaagcagcacgcgaaggccatgatctgttgttcgctgataacccgtcggcggtgaagaaagagctgaccattctcatccagaacacgattcgttccaaatggcacgaagttctggag

SEQ ID NO: 438 - protein, 346 aa, synthetic construct
  REGION 1..346: note = variant of RNA ligase 2 from Klebsiella phage KP179
MHHHHHHGGSNTFAYYSSLENHYNNKFIEKIRGAGFLMHTVEWVAREKIHGTNFSVIITPTEIVPAKRTGPILEGESFFGHEIIMKKYKDSFVKVQNMLNATDLVSVQIFGEFAGGGIQKGVDYGDKDFYVFDILSDSGNEKVYWDDYRVESFCTTLGLKLAPLLGRGSFAELSQYPNDFKSIVNRYNELVDTTGLEHANKHVFGPQASSETGVAEGYVLKPVYPIFFNTGTRVAIKCKNSKFSEKAKLDKPILAKVELTENDKRLLEIFSEYVTWNRVSNVLSHIGSVTAKDFGRVMGLTMKDIINEAAREGHDLLFADNPSAVKKELTILIQNTIRSKWHEVLE

SEQ ID NO: 439 - DNA, 1038 bp, synthetic construct
  misc_feature 1..1038: note = variant of RNA ligase 2 from Klebsiella phage KP179
  source 1..1038: mol_type = other DNA
atgcatcaccatcaccatcacggtggcagcaacatgtttgcgtattattcaagtctggaaaaccattacaatatgaagttcattgagaagatccgtggtgcaggcttcctgatgcacaccgtggaatgggtagctcgcgagaagattcatggaacgaactttagcgttatcattactccgaccgaaatcgtcccagccaaacgcacagggccgatcttggaaggcgagtcgttctttggtcacgaaattatcatgaaaaaatataaagactccttcgtgaaggtgcagaacatgctgaatgccatggatcttgttagcgtgcaaatctttggcgaatttgcgggtggtggcattcagaaaggcgtcgattacggagacaaagatttctatgtgtttgacatcctgtctgatagcgggaacgagaaagtttactgggatgactatcgcgtcgaatcgttttgcaccacgctcggtctgaaattagcgcctctgctgggacgtggtagtttcgctgaactgtcccagtacccaaacgatttcaaaagcattgtgaaccgttataatgaattggttgatacgacgggcctggaacatgccaataaacacgtctttggtccgcaagcgtcttctgaaactggcgtagcagaaggctacgttcttaaacccgtctatccgatcttctttaataacggtacgcgcgtggcgattaaatgcaagaactccaaattttcggagaaagccaagctggacaagccaattaaggcgaaggtggaactgacggagaacgataaacgtctgctcgaaatctttagcgagtatgttacctggaatcgcgtcagtaacgtactgtcacatattggctcagtgaccgcaaaagattttgggcgtgttatgggtctgacgatgaaagacatcattaatgaagcagcacgcgaaggccatgatctgttgttcgctgataacccgtcggcggtgaagaaagagctgaccattctcatccagaacacgattcgttccaaatggcacgaagttctggag

SEQ ID NO: 440 - protein, 346 aa, synthetic construct
  REGION 1..346: note = variant of RNA ligase 2 from Klebsiella phage KP179
MHHHHHHGGSNMFAYYSSLENHYNMKFIEKIRGAGFLMHTVEWVAREKIHGTNFSVIITPTEIVPAKRTGPILEGESFFGHEIIMKKYKDSFVKVQNMLNAMDLVSVQIFGEFAGGGIQKGVDYGDKDFYVFDILSDSGNEKVYWDDYRVESFCTTLGLKLAPLLGRGSFAELSQYPNDFKSIVNRYNELVDTTGLEHANKHVFGPQASSETGVAEGYVLKPVYPIFFNNGTRVAIKCKNSKFSEKAKLDKPIKAKVELTENDKRLLEIFSEYVTWNRVSNVLSHIGSVTAKDFGRVMGLTMKDIINEAAREGHDLLFADNPSAVKKELTILIQNTIRSKWHEVLE

SEQ ID NO: 441 - DNA, 1038 bp, synthetic construct
  misc_feature 1..1038: note = variant of RNA ligase 2 from Klebsiella phage KP179
  source 1..1038: mol_type = other DNA
atgcatcaccatcaccatcacggtggcagcaacgtgtttgcgtattattcaagtctggaaaaccattacaataataagttcattgagaagatccgtggtgcaggcttcctgatgcacaccgtggaatgggtagctcgcgagaagattcatggaacgaactttagcgttatcattactccgaccgaaatcgtcccagccaaacgcacagggccgatcttggaaggcgagtcgttctttggtcacgaaattatcatgaaaaaatataaagactccttcgtgaaggtgcagaacatgctgaatgccatggatcttgttagcgtgcaaatctttggcgaatttgcgggtggtggcattcagaaaggcgtcgattacggagacaaagatttctatgtgtttgacatcctgtctgatagcgggaacgagaaagtttactgggatgactatcgcgtcgaatcgttttgcaccacgctcggtctgaaattagcgcctctgctgggacgtggtagtttcgctgaactgtcccagtacccaaacgatttcaaaagcattgtgaaccgttataatgaattggttgatacgacgggcctggaacatgccaataaacacgtctttggtccgcaagcgtcttctgaaactggcgtagcagaaggctacgttcttaaacccgtctatccgatcttctttaataacggtacgcgcgtggcgattaaatgcaagaactccaaattttcggagaaagccaagctggacaagccaattctggcggcggtggaactgacggagaacgataaacgtctgctcgaaatctttagcgagtatgttacctggaatcgcgtcagtaacgtactgtcacatattggctcagtgaccgcaaaagattttgggcgtgttatgggtctgacgatgaaagacatcattaatgaagcagcacgcgaaggccatgatctgttgttcgctgataacccgtcggcggtgaagaaagagctgaccattctcatccagaacacgattcgttccaaatggcacgaagttctggag

SEQ ID NO: 442 - protein, 346 aa, synthetic construct
  REGION 1..346: note = variant of RNA ligase 2 from Klebsiella phage KP179
MHHHHHHGGSNVFAYYSSLENHYNNKFIEKIRGAGFLMHTVEWVAREKIHGTNFSVIITPTEIVPAKRTGPILEGESFFGHEIIMKKYKDSFVKVQNMLNAMDLVSVQIFGEFAGGGIQKGVDYGDKDFYVFDILSDSGNEKVYWDDYRVESFCTTLGLKLAPLLGRGSFAELSQYPNDFKSIVNRYNELVDTTGLEHANKHVFGPQASSETGVAEGYVLKPVYPIFFNNGTRVAIKCKNSKFSEKAKLDKPILAAVELTENDKRLLEIFSEYVTWNRVSNVLSHIGSVTAKDFGRVMGLTMKDIINEAAREGHDLLFADNPSAVKKELTILIQNTIRSKWHEVLE

SEQ ID NO: 443 - DNA, 1038 bp, synthetic construct
  misc_feature 1..1038: note = variant of RNA ligase 2 from Klebsiella phage KP179
  source 1..1038: mol_type = other DNA
atgcatcaccatcaccatcacggtggcagcaacatgtttgcgtattattcaagtctggaaaaccattacaataataagttcattgagaagatccgtggtgcaggcttcctgatgcacaccgtggaatgggtagctcgcgagaagattcatggaacgaactttagcgttatcattactccgaccgaaatcgtcccagccaaacgcacagggccgatcttggaaggcgagtcgttctttggtcacgaaattatcatgaaaaaatataaagactccttcgtgaaggtgcagaacatgctgaatgccatggatcttgttagcgtgcaaatctttggcgaatttgcgggtggtggcattcagaaaggcgtcgattacggagacaaagatttctatgtgtttgacatcctgtctgatagcgggaacgagaaagtttactgggatgactatcgcgtcgaatcgttttgcacccacctcggtctgaaattagctcctctgctgggacgtggtagtttcgctgaactgtcccagtacccaaacgatttcaaaagcattgtgaaccgttataatgaattggttgatacgacgggcctggaacatgccaataaacacgtctttggtccgcaagcgtcttctgaaactggcgtagcagaaggctacgttcttaaacccgtctatccgatcttctttaataatggtacgcgcgtggcgattaaatgcaagaactccaaattttcggagaaagccaagctggacaaaccaattaaagcgaaagtggaactgacggagaacgataaacgtctgctcgaaatctttagcgagtatgttacctggaatcgcgtcagtaacgtactgtcacatattggctcagtgaccgcaaaagattttgggcgtgttatgggtctgacgatgaaagacatcattaatgaagcagcacgcgaaggccatgatctgttgttcgctgataacccgtcggcggtgaagaaagagctgaccattctcatccgccacacgattcgttccaaatggcacgaagttctggag

SEQ ID NO: 444 - protein, 346 aa, synthetic construct
  REGION 1..346: note = variant of RNA ligase 2 from Klebsiella phage KP179
MHHHHHHGGSNMFAYYSSLENHYNNKFIEKIRGAGFLMHTVEWVAREKIHGTNFSVIITPTEIVPAKRTGPILEGESFFGHEIIMKKYKDSFVKVQNMLNAMDLVSVQIFGEFAGGGIQKGVDYGDKDFYVFDILSDSGNEKVYWDDYRVESFCTHLGLKLAPLLGRGSFAELSQYPNDFKSIVNRYNELVDTTGLEHANKHVFGPQASSETGVAEGYVLKPVYPIFFNNGTRVAIKCKNSKFSEKAKLDKPIKAKVELTENDKRLLEIFSEYVTWNRVSNVLSHIGSVTAKDFGRVMGLTMKDIINEAAREGHDLLFADNPSAVKKELTILIRHTIRSKWHEVLE

SEQ ID NO: 445 - DNA, 1038 bp, synthetic construct
  misc_feature 1..1038: note = variant of RNA ligase 2 from Klebsiella phage KP179
  source 1..1038: mol_type = other DNA
atgcatcaccatcaccatcacggtggcagcaacatgtttgcgtattattcaagtctggaaaaccattacaataataagttcattgagaagatccgtggtgcaggcttcctgatgcacaccgtggaatgggtagctcgcgagaagattcatggaacgaactttagcgttatcattactccgaccgaaatcgtcccagccaaacgcacagggccgatcttggaaggcgagtcgttctttggtcacgaaattatcatgaaaaaatataaagactccttcgtgaaggtgcagaacatgctgaatgccatggatcttgttagcgtgcaaatctttggcgaatttgcgggtggtggcattcagaaaggcgtcgattacggagacaaagatttctatgtgtttgacatcctgtctgatagcgggaacgagaaagtttactgggatgactatcgcgtcgaatcgttttgcacccagctcggtctgaaattagcgcctctgctgggacgtggtagtttcgctgaactgtcccagtacccaaacgatttcaaaagcattgtgaaccgttataatgaattggttgatacgacgggcctggaacatgccaataaacacgtctttggtccgcaagcgtcttctgaaactggcgtagcagaaggctacgttcttaaacccgtctatccgatcttctttaataatggtacgcgcgtggcgattaaatgcaagaactccaaattttcggagaaagccaagctggacaaaccaattaaagcgaaaggcccactgacggagaacgataaacgtctgctcgaaatctttagcgagtatgttacctggaatcgcgtcagtaacgtactgtcacatattggctcagtgaccgcaaaagattttgggcgtgttatgggtctgacgatgaaagacatcattaatgaagcagcacgcgaaggccatgatctgttgttcgctgataacccgtcggcggtgaagaaagagctgaccattctcatccgccacacgattcgttccaaatggcacgaagttctggag

SEQ ID NO: 446 - protein, 346 aa, synthetic construct
  REGION 1..346: note = variant of RNA ligase 2 from Klebsiella phage KP179
MHHHHHHGGSNMFAYYSSLENHYNNKFIEKIRGAGFLMHTVEWVAREKIHGTNFSVIITPTEIVPAKRTGPILEGESFFGHEIIMKKYKDSFVKVQNMLNAMDLVSVQIFGEFAGGGIQKGVDYGDKDFYVFDILSDSGNEKVYWDDYRVESFCTQLGLKLAPLLGRGSFAELSQYPNDFKSIVNRYNELVDTTGLEHANKHVFGPQASSETGVAEGYVLKPVYPIFFNNGTRVAIKCKNSKFSEKAKLDKPIKAKGPLTENDKRLLEIFSEYVTWNRVSNVLSHIGSVTAKDFGRVMGLTMKDIINEAAREGHDLLFADNPSAVKKELTILIRHTIRSKWHEVLE

SEQ ID NO: 447 - DNA, 1038 bp, synthetic construct
  misc_feature 1..1038: note = variant of RNA ligase 2 from Klebsiella phage KP179
  source 1..1038: mol_type = other DNA
atgcatcaccatcaccatcacggtggcagcaacacgtttgcgtattattcaagtctggaaaaccattacaataataagttcattgagaagatccgtggtgcaggcttcctgatgcacaccgtggaatgggtagctcgcgagaagattcatggaacgaactttagcgttatcattactccgaccgaaatcgtcccagccaaacgcacagggccgatcttggaaggcgagtcgttctttggtcacgaaattatcatgaaaaaatataaagactccttcgtgaaggtgcagaacatgctgaatgccacggatcttgttagcgtgcaaatctttggcgaatttgcgggtggtggcattcagaaaggcgtcgattacggagacaaagatttctatgtgtttgacatcctgtctgatagcgggaacgagaaagtttactgggatgactatcgcgtcgaatcgttttgcaccacgctcggtctgaaattagcgcctctgctgggacgtggtagtttcgctgaactgtcccagtacccaaacgatttcaaaagcattgtgaaccgttataatgaattggttgatacgacgggcctggaacatgccaataaacacgtctttggtccgcaagcgtcttctgaaactggcgtagcagaaggctacgttcttaaacccgtctatccgatcttctttaataccggtacgcgcgtggcgattaaatgcaagaactccaaattttcggagaaagccaagctggacaaaccaattaaagcgaaagtggaactgacggagaacgataaacgtctgctcgaaatctttagcgagtatgttacctggaatcgcgtcagtaacgtactgtcacatattggctcagtgaccgcaaaagattttgggcgtgttatgggtctgacgatgaaagacatcattaatgaagcagcacgcgaaggccatgatctgttgttcgctgataacccgtcggcggtgaagaaagagctgaccattctcatccagaacacgattcgttccaaatggcacgaagttctggag

SEQ ID NO: 448 - protein, 346 aa, synthetic construct
  REGION 1..346: note = variant of RNA ligase 2 from Klebsiella phage KP179
MHHHHHHGGSNTFAYYSSLENHYNNKFIEKIRGAGFLMHTVEWVAREKIHGTNFSVIITPTEIVPAKRTGPILEGESFFGHEIIMKKYKDSFVKVQNMLNATDLVSVQIFGEFAGGGIQKGVDYGDKDFYVFDILSDSGNEKVYWDDYRVESFCTTLGLKLAPLLGRGSFAELSQYPNDFKSIVNRYNELVDTTGLEHANKHVFGPQASSETGVAEGYVLKPVYPIFFNTGTRVAIKCKNSKFSEKAKLDKPIKAKVELTENDKRLLEIFSEYVTWNRVSNVLSHIGSVTAKDFGRVMGLTMKDIINEAAREGHDLLFADNPSAVKKELTILIQNTIRSKWHEVLE

SEQ ID NO: 449 - DNA, 1038 bp, synthetic construct
  misc_feature 1..1038: note = variant of RNA ligase 2 from Klebsiella phage KP179
  source 1..1038: mol_type = other DNA
atgcatcaccatcaccatcacggtggcagcaacatgtttgcgtattattcaagtctggaaaaccattacaataataagttcattgagaagatccgtggtgcaggcttcctgatgcacaccgtggaatgggtagctcgcgagaagattcatggaacgaactttagcgttatcattactccgaccgaaatcgtcccagccaaacgcacagggccgatcttggaaggcgagtcgttctttggtcacgaaattatcatgaaaaaatataaagactccttcgtgaaggtgcagaacatgctgaatgccatggatcttgttagcgtgcaaatctttggcgaatttgcgggtggtggcattcagaaaggcgtcgattacggagacaaagatttctatgtgtttgacatcctgtctgatagcgggaacgagaaagtttactgggatgactatcgcgtcgaatcgttttgcacccagctcggtctgaaattagcgcctctgctgggacgtggtagtttcgctgaactgtcccagtacccaaacgatttcaaaagcattgtgaaccgttataatgaattggttgatacgacgggcctggaacatgccaataaacacgtctttggtccgcaagcgtcttctgaaactggcgtagcagaaggctacgttcttaaacccgtctatccgatcttctttaataatggtacgcgcgtggcgattaaatgcaagaactccaaattttcggagaaagccacgctggacaaaccaattaaagcgaaaggcccactgacggagaacgataaacgtctgctcgaaatctttagcgagtatgttacctggaatcgcgtcagtaacgtactgtcacatattggctcagtgaccgcaaaagattttgggcgtgttatgggtctgacgatgaaagacatcattaatgaagcagcacgcgaaggccatgatctgttgttcgctgataacccgtcggcggtgaagaaagagctgaccattctcatccgcaacacgattcgttccaaatggcacgaagttctggag

SEQ ID NO: 450 - protein, 346 aa, synthetic construct
  REGION 1..346: note = variant of RNA ligase 2 from Klebsiella phage KP179
MHHHHHHGGSNMFAYYSSLENHYNNKFIEKIRGAGFLMHTVEWVAREKIHGTNFSVIITPTEIVPAKRTGPILEGESFFGHEIIMKKYKDSFVKVQNMLNAMDLVSVQIFGEFAGGGIQKGVDYGDKDFYVFDILSDSGNEKVYWDDYRVESFCTQLGLKLAPLLGRGSFAELSQYPNDFKSIVNRYNELVDTTGLEHANKHVFGPQASSETGVAEGYVLKPVYPIFFNNGTRVAIKCKNSKFSEKATLDKPIKAKGPLTENDKRLLEIFSEYVTWNRVSNVLSHIGSVTAKDFGRVMGLTMKDIINEAAREGHDLLFADNPSAVKKELTILIRNTIRSKWHEVLE

SEQ ID NO: 451 - DNA, 1038 bp, synthetic construct
  misc_feature 1..1038: note = variant of RNA ligase 2 from Klebsiella phage KP179
  source 1..1038: mol_type = other DNA
atgcatcaccatcaccatcacggtggcagcaacacgtttgcgtattattcaagtctggaaaaccattacaataataagttcattgagaagatccgtggtgcaggcttcctgatgcacaccgtggaatgggtagctcgcgagaagattcatggaacgaactttagcgttatcattactccgaccgaaatcgtcccagccaaacgcacagggccgatcttggaaggcgagtcgttctttggtcacgaaattatcatgaaaaaatataaagactccttcgtgaaggtgcagaacatgctgaatgccatggatcttgttagcgtgcaaatctttggcgaatttgcgggtggtggcattcagaaaggcgtcgattacggagacaaagatttctatgtgtttgacatcctgtctgatagcgggaacgagaaagtttactgggatgactatcgcgtcgaatcgttttgcaccacgctcggtctgaaattagcgcctctgctgggacgtggtagtttcgctgaactgtcccagtacccaaacgatttcaaaagcattgtgaaccgttataatgaattggttgatacgacgggcctggaacatgccaataaacacgtctttggtccgcaagcgtcttctgaaactggcgtagcagaaggctacgttcttaaacccgtctatccgatcttctttaataacggtacgcgcgtggcgattaaatgcaagaactccaaattttcggagaaagccaagctggacaagccaattaaggcggcggtggaactgacggagaacgataaacgtctgctcgaaatctttagcgagtatgttacctggaatcgcgtcagtaacgtactgtcacatattggctcagtgaccgcaaaagattttgggcgtgttatgggtctgacgatgaaagacatcattaatgaagcagcacgcgaaggccatgatctgttgttcgctgataacccgtcggcggtgaagaaagagctgaccattctcatccagaacacgattcgttccaaatggcacgaagttctggag

SEQ ID NO: 452 - protein, 346 aa, synthetic construct
  REGION 1..346: note = variant of RNA ligase 2 from Klebsiella phage KP179
MHHHHHHGGSNTFAYYSSLENHYNNKFIEKIRGAGFLMHTVEWVAREKIHGTNFSVIITPTEIVPAKRTGPILEGESFFGHEIIMKKYKDSFVKVQNMLNAMDLVSVQIFGEFAGGGIQKGVDYGDKDFYVFDILSDSGNEKVYWDDYRVESFCTTLGLKLAPLLGRGSFAELSQYPNDFKSIVNRYNELVDTTGLEHANKHVFGPQASSETGVAEGYVLKPVYPIFFNNGTRVAIKCKNSKFSEKAKLDKPIKAAVELTENDKRLLEIFSEYVTWNRVSNVLSHIGSVTAKDFGRVMGLTMKDIINEAAREGHDLLFADNPSAVKKELTILIQNTIRSKWHEVLE

SEQ ID NO: 453 - DNA, 1038 bp, synthetic construct
  misc_feature 1..1038: note = variant of RNA ligase 2 from Klebsiella phage KP179
  source 1..1038: mol_type = other DNA
atgcatcaccatcaccatcacggtggcagcaacatgtttgcgtattattcaagtctggaaaaccattacaataataagttcattgagaagatccgtggtgcaggcttcctgatgcacaccgtggaatgggtagctcgcgagaagattcatggaacgaactttagcgttatcattactccgaccgaaatcgtcccagccaaacgcacagggccgatcttggaaggcgagtcgttctttggtcacgaaattatcatgaaaaaatataaagactccttcgtgaaggtgcagaacatgctgaatgccatggatcttgttagcgtgcaaatctttggcgaatttgcgggtggtggcattcagaaaggcgtcgattacggagacaaagatttctatgtgtttgacatcctgtctgatagcgggaacgagaaagtttactgggatgactatcgcgtcgaatcgttttgcaccaccctcggtctgaaattagcgcctctgctgggacgtggtagtttcgctgaactgtcccagtacccaaacgatttcaaaagcattgtgaaccgttataatgaattggttgatacgacgggcctggaacatgccaataaacacgtctttggtccgcaagcgtcttctgaaactggcgtagcagaaggctacgttcttaaacccgtctatccgatcttctttaataatggtacgcgcgtggcgattaaatgcaagaactccaaattttcggagaaagccacgcgcgacaaaccaattaaagcgaaagtggaactgacggagaacgataaacgtctgctcgaaatctttagcgagtatgttacctggaatcgcgtcagtaacgtactgtcacatattggctcagtgaccgcaaaagattttgggcgtgttatgggtctgacgatgaaagacatcattaatgaagcagcacgcgaaggccatgatctgttgttcgctgataacccgtcggcggtgaagaaagagctgaccattctcatccgccacacgattcgttccaaatggcacgaagttctggag

SEQ ID NO: 454 - protein, 346 aa, synthetic construct
  REGION 1..346: note = variant of RNA ligase 2 from Klebsiella phage KP179
MHHHHHHGGSNMFAYYSSLENHYNNKFIEKIRGAGFLMHTVEWVAREKIHGTNFSVIITPTEIVPAKRTGPILEGESFFGHEIIMKKYKDSFVKVQNMLNAMDLVSVQIFGEFAGGGIQKGVDYGDKDFYVFDILSDSGNEKVYWDDYRVESFCTTLGLKLAPLLGRGSFAELSQYPNDFKSIVNRYNELVDTTGLEHANKHVFGPQASSETGVAEGYVLKPVYPIFFNNGTRVAIKCKNSKFSEKATRDKPIKAKVELTENDKRLLEIFSEYVTWNRVSNVLSHIGSVTAKDFGRVMGLTMKDIINEAAREGHDLLFADNPSAVKKELTILIRHTIRSKWHEVLE

SEQ ID NO: 455 - DNA, 1038 bp, synthetic construct
  misc_feature 1..1038: note = variant of RNA ligase 2 from Klebsiella phage KP179
  source 1..1038: mol_type = other DNA
atgcatcaccatcaccatcacggtggcagcaacatgtttgcgtattattcaagtctggaaaaccattacaataataagttcattgagaagatccgtggtgcaggcttcctgatgcacaccgtggaatgggtagctcgcgagaagattcatggaacgaactttagcgttatcattactccgaccgaaatcgtcccagccaaacgcacagggccgatcttggaaggcgagtcgttctttggtcacgaaattatcatgaaaaaatataaagactccttcgtgaaggtgcagaacatgctgaatgccatggatcttgttagcgtgcaaatctttggcgaatttgcgggtggtggcattcagaaaggcgtcgattacggagacaaagatttctatgtgtttgacatcctgtctgatagcgggaacgagaaagtttactgggatgactatcgcgtcgaatcgttttgcaccaccctcggtctgaaattagcgcctctgctgggacgtggtagtttcgctgaactgtcccagtacccaaacgatttcaaaagcattgtgaaccgttataatgaattggttgatacgacgggcctggaacatgccaataaacacgtctttggtccgcaagcgtcttctgaaactggcgtagcagaaggctacgttcttaaacccgtctatccgatcttctttaataatggtgggcgcgtggcgattaaatgcaagaactccaaattttcggagaaagccaagctggacaaaccaattaaagcgaaaggcccactgacggagaacgataaacgtctgctcgaaatctttagcgagtatgttacctggaatcgcgtcagtaacgtactgtcacatattggctcagtgaccgcaaaagattttgggcgtgttatgggtctgacgatgaaagacatcattaatgaagcagcacgcgaaggccatgatctgttgttcgctgataacccgtcggcggtgaagaaagagctgaccattctcatccgccacacgattcgttccaaatggcacgaagttctggag

SEQ ID NO: 456 - protein, 346 aa, synthetic construct
  REGION 1..346: note = variant of RNA ligase 2 from Klebsiella phage KP179
MHHHHHHGGSNMFAYYSSLENHYNNKFIEKIRGAGFLMHTVEWVAREKIHGTNFSVIITPTEIVPAKRTGPILEGESFFGHEIIMKKYKDSFVKVQNMLNAMDLVSVQIFGEFAGGGIQKGVDYGDKDFYVFDILSDSGNEKVYWDDYRVESFCTTLGLKLAPLLGRGSFAELSQYPNDFKSIVNRYNELVDTTGLEHANKHVFGPQASSETGVAEGYVLKPVYPIFFNNGGRVAIKCKNSKFSEKAKLDKPIKAKGPLTENDKRLLEIFSEYVTWNRVSNVLSHIGSVTAKDFGRVMGLTMKDIINEAAREGHDLLFADNPSAVKKELTILIRHTIRSKWHEVLE

SEQ ID NO: 457 - DNA, 1038 bp, synthetic construct
  misc_feature 1..1038: note = variant of RNA ligase 2 from Klebsiella phage KP179
  source 1..1038: mol_type = other DNA
atgcatcaccatcaccatcacggtggcagcaacacgtttgcgtattattcaagtctggaaaaccattacaataataagttcattgagaagatccgtggtgcaggcttcctgcgtcacaccgtggaatgggtagctcgcgagaagattcatggaacgaactttagcgttatcattactccgaccgaaatcgtcccagccaaacgcacagggccgatcttggaaggcgagtcgttctttggtcacgaaattatcatgaaaaaatataaagactccttcgtgaaggtgcagaacatgctgaatgccatggatcttgttagcgtgcaaatctttggcgaatttgcgggtggtggcattcagaaaggcgtcgattacggagacaaagatttctatgtgtttgacatcctgtctgatagcgggaacgagaaagtttactgggatgactatcgcgtcgaatcgttttgcaccacgctcggtctgaaattagcgcctctgctgggacgtggtagtttcgctgaactgtcccagtacccaaacgatttcaaaagcattgtgaaccgttataatgaattggttgatacgacgggcctggaacatgccaataaacacgtctttggtccgcaagcgtcttctgaaactggcgtagcagaaggctacgttcttaaacccgtctatccgatcttctttaataatggtacgcgcgtggcgattaaatgcaagaactccaaattttcggagaaagccaagctggacacgccaattgtggcgaaggtggaactgacggagaacgataaacgtctgctcgaaatctttagcgagtatgttacctggaatcgcgtcagtaacgtactgtcacatattggctcagtgaccgcaaaagattttgggcgtgttatgggtctgacgatgaaagacatcattaatgaagcagcacgcgaaggccatgatctgttgttcgctgataacccgtcggcggtgaagaaagagctgaccattctcatccagaacacgattcgttccaaatggcacgaagttctggag

SEQ ID NO: 458 - protein, 346 aa, synthetic construct
  REGION 1..346: note = variant of RNA ligase 2 from Klebsiella phage KP179
MHHHHHHGGSNTFAYYSSLENHYNNKFIEKIRGAGFLRHTVEWVAREKIHGTNFSVIITPTEIVPAKRTGPILEGESFFGHEIIMKKYKDSFVKVQNMLNAMDLVSVQIFGEFAGGGIQKGVDYGDKDFYVFDILSDSGNEKVYWDDYRVESFCTTLGLKLAPLLGRGSFAELSQYPNDFKSIVNRYNELVDTTGLEHANKHVFGPQASSETGVAEGYVLKPVYPIFFNNGTRVAIKCKNSKFSEKAKLDTPIVAKVELTENDKRLLEIFSEYVTWNRVSNVLSHIGSVTAKDFGRVMGLTMKDIINEAAREGHDLLFADNPSAVKKELTILIQNTIRSKWHEVLE

SEQ ID NO: 459 - DNA, 1038 bp, synthetic construct
  misc_feature 1..1038: note = variant of RNA ligase 2 from Klebsiella phage KP179
  source 1..1038: mol_type = other DNA
atgcatcaccatcaccatcacggtggcagcaacatgtttgcgtattattcaagtctggaaaaccattacaataataagttcattgagaagatccgtggtgcaggcttcctgatgcacaccgtggaatgggtagctcgcgagaagattcatggaacgaactttagcgttatcattactccgaccgaaatcgtcccagccaaacgcacagggccgatcttggaaggcgagtcgttctttggtcacgaaattatcatgaaaaaatataaagactccttcgtgaaggtgcagaacatgctgaatgccatggatcttgttagcgtgcaaatctttggcgaatttgcgggtggtggcattcagaaaggcgtcgattacggagacaaagatttctatgtgtttgacatcctgtctgatagcgggaacgagaaagtttactgggatgactatcgcgtcgaatcgttttgcaccaccctcggtctgaaattagcgcctctgctgggacgtggtagtttcgctgaactgtcccagtacccaaacgatttcaaaagcattgtgaaccgttataatgaattggttgatacgacgggcctggaacatgccaataaacacgtctttggtccgcaagcgtcttctgaaactggcgtagcagaaggctacgttcttaaacccgtctatccgatcttctttaataatggtacgcgcgtggcgattaaatgcaagaactccaaattttcggagaaagccaagctggacaaaccaattaaagcgaaagtggaactgacggagaacgataaacgtctgctcgaaatctttagcgagtatgttacctggaatcgcgtcagtaacgtactgtcacatattggctcagtgaccgcaaaagattttgggcgtgttatgggtctgacgatgaaagacatcattaatgaagcagcacgcgaaggccatgatctgttgttcgctgataacccgtcggcggtgaagaaagagctgaccattctcatccgccacacgattcgttccaaatggcacgaagttctggag

SEQ ID NO: 460 - protein, 346 aa, synthetic construct
  REGION 1..346: note = variant of RNA ligase 2 from Klebsiella phage KP179
MHHHHHHGGSNMFAYYSSLENHYNNKFIEKIRGAGFLMHTVEWVAREKIHGTNFSVIITPTEIVPAKRTGPILEGESFFGHEIIMKKYKDSFVKVQNMLNAMDLVSVQIFGEFAGGGIQKGVDYGDKDFYVFDILSDSGNEKVYWDDYRVESFCTTLGLKLAPLLGRGSFAELSQYPNDFKSIVNRYNELVDTTGLEHANKHVFGPQASSETGVAEGYVLKPVYPIFFNNGTRVAIKCKNSKFSEKAKLDKPIKAKVELTENDKRLLEIFSEYVTWNRVSNVLSHIGSVTAKDFGRVMGLTMKDIINEAAREGHDLLFADNPSAVKKELTILIRHTIRSKWHEVLE

SEQ ID NO: 461 - DNA, 1038 bp, synthetic construct
  misc_feature 1..1038: note = variant of RNA ligase 2 from Klebsiella phage KP179
  source 1..1038: mol_type = other DNA
atgcatcaccatcaccatcacggtggcagcaacatgtttgcgtattattcaagtctggaaaaccattacaataataagttcattgagaagatccgtggtgcaggcttcctgatgcacaccgtggaatgggtagctcgcgagaagattcatggaacgaactttagcgttatcattactccgaccgaaatcgtcccagccaaacgcacagggccgatcttggaaggcgagtcgttctttggtcacgaaattatcatgaaaaaatataaagactccttcgtgaaggtgcagaacatgctgaatgccatggatcttgttagcgtgcaaatctttggcgaatttgcgggtggtggcattcagaaaggcgtcgattacggagacaaagatttctatgtgtttgacatcctgtctgatagcgggaacgagaaagtttactgggatgactatcgcgtcgaatcgttttgcacccagctcggtctgaaattagcgcctctgctgggacgtggtagtttcgctgaactgtcccagtacccaaacgatttcaaaagcattgtgaaccgttataatgaattggttgatacgacgggcctggaacatgccaataaacacgtctttggtccgcaagcgtcttctgaaactggcgtagcagaaggctacgttcttaaacccgtctatccgatcttctttaataatggtacgcgcgtggcgattaaatgcaagaactccaaattttcggagaaagccaagctggacaaaccaattaaagcgaaagtggaactgacggagaacgataaacgtctgctcgaaatctttagcgagtatgttacctggaatcgcgtcagtaacgtactgtcacatattggctcagtgaccgcaaaagattttgggcgtgttatgggtctgacgatgaaagacatcattaatgaagcagcacgcgaaggccatgatctgttgttcgctgataacccgtcggcggtgaagaaagagctgaccattctcatccgcaacacgattcgttccaaatggcacgaagttctggag

SEQ ID NO: 462 - protein, 346 aa, synthetic construct
  REGION 1..346: note = variant of RNA ligase 2 from Klebsiella phage KP179
MHHHHHHGGSNMFAYYSSLENHYNNKFIEKIRGAGFLMHTVEWVAREKIHGTNFSVIITPTEIVPAKRTGPILEGESFFGHEIIMKKYKDSFVKVQNMLNAMDLVSVQIFGEFAGGGIQKGVDYGDKDFYVFDILSDSGNEKVYWDDYRVESFCTQLGLKLAPLLGRGSFAELSQYPNDFKSIVNRYNELVDTTGLEHANKHVFGPQASSETGVAEGYVLKPVYPIFFNNGTRVAIKCKNSKFSEKAKLDKPIKAKVELTENDKRLLEIFSEYVTWNRVSNVLSHIGSVTAKDFGRVMGLTMKDIINEAAREGHDLLFADNPSAVKKELTILIRNTIRSKWHEVLE

SEQ ID NO: 463 - DNA, 1038 bp, synthetic construct
  misc_feature 1..1038: note = variant of RNA ligase 2 from Klebsiella phage KP179
  source 1..1038: mol_type = other DNA
atgcatcaccatcaccatcacggtggcagcaacgtgtttgcgtattattcaagtctggaaaaccattacaataataagttcattgagaagatccgtggtgcaggcttcctgcgtcacaccgtggaatgggtagctcgcgagaagattcatggaacgaactttagcgttatcattactccgaccgaaatcgtcccagccaaacgcacagggccgatcttggaaggcgagtcgttctttggtcacgaaattatcatgaaaaaatataaagactccttcgtgaaggtgcagaacatgctgaatgccatggatcttgttagcgtgcaaatctttggcgaatttgcgggtggtggcattcagaaaggcgtcgattacggagacaaagatttctatgtgtttgacatcctgtctgatagcgggaacgagaaagtttactgggatgactatcgcgtcgaatcgttttgcaccacgctcggtctgaaattagcgcctctgctgggacgtggtagtttcgctgaactgtcccagtacccaaacgatttcaaaagcattgtgaaccgttataatgaattggttgatacgacgggcctggaacatgccaataaacacgtctttggtccgcaagcgtcttctgaaactggcgtagcagaaggctacgttcttaaacccgtctatccgatcttctttaataacggtacgcgcgtggcgattaaatgcaagaactccaaattttcggagaaagccaagctggacaagccaattgtggcgaaggtggaactgacggagaacgataaacgtctgctcgaaatctttagcgagtatgttacctggaatcgcgtcagtaacgtactgtcacatattggctcagtgaccgcaaaagattttgggcgtgttatgggtctgacgatgaaagacatcattaatgaagcagcacgcgaaggccatgatctgttgttcgctgataacccgtcggcggtgaagaaagagctgaccattctcatccagaacacgattcgttccaaatggcacgaagttctggag

SEQ ID NO: 464 - protein, 346 aa, synthetic construct
  REGION 1..346: note = variant of RNA ligase 2 from Klebsiella phage KP179
MHHHHHHGGSNVFAYYSSLENHYNNKFIEKIRGAGFLRHTVEWVAREKIHGTNFSVIITPTEIVPAKRTGPILEGESFFGHEIIMKKYKDSFVKVQNMLNAMDLVSVQIFGEFAGGGIQKGVDYGDKDFYVFDILSDSGNEKVYWDDYRVESFCTTLGLKLAPLLGRGSFAELSQYPNDFKSIVNRYNELVDTTGLEHANKHVFGPQASSETGVAEGYVLKPVYPIFFNNGTRVAIKCKNSKFSEKAKLDKPIVAKVELTENDKRLLEIFSEYVTWNRVSNVLSHIGSVTAKDFGRVMGLTMKDIINEAAREGHDLLFADNPSAVKKELTILIQNTIRSKWHEVLE

SEQ ID NO: 465 - DNA, 1038 bp, synthetic construct
  misc_feature 1..1038: note = variant of RNA ligase 2 from Klebsiella phage KP179
  source 1..1038: mol_type = other DNA
atgcatcaccatcaccatcacggtggcagcaacatgtttgcgtattattcaagtctggaaaaccattacaataataagttcattgagaagatccgtggtgcaggcttcctgatgcacaccgtggaatgggtagctcgcgagaagattcatggaacgaactttagcgttatcattactccgaccgaaatcgtcccagccaaacgcacagggccgatcttggaaggcgagtcgttctttggtcacgaaattatcatgaaaaaatataaagactccttcgtgaaggtgcagaacatgctgaatgccatggatcttgttagcgtgcaaatctttggcgaatttgcgggtggtggcattcagaaaggcgtcgattacggagacaaagatttctatgtgtttgacatcctgtctgatagcgggaacgagaaagtttactgggatgactatcgcgtcgaatcgttttgcaccacgctcggtctgaaattagcgcctctgctgggacgtggtagtttcgctgaactgtcccagtacccaaacgatttcaaaagcattgtgaaccgttataatgaattggttgatacgacgggcctggaacatgccaataaacacgtctttggtccgcaagcgtcttctgaaactggcgtagcagaaggctacgttcttaaacccgtctatccgatcttctttaataatggtacgcgcgtggcgattaaatgcaagaactccaaattttcggagaaagccaagctggacacgccaattgtggcgaaggtggaactgacggagaacgataaacgtctgctcgaaatctttagcgagtatgttacctggaatcgcgtcagtaacgtactgtcacatattggctcagtgaccgcaaaagattttgggcgtgttatgggtctgacgatgaaagacatcattaatgaagcagcacgcgaaggccatgatctgttgttcgctgataacccgtcggcggtgaagaaagagctgaccattctcatccagaacacgattcgttccaaatggcacgaagttctggag

SEQ ID NO: 466 - protein, 346 aa, synthetic construct
  REGION 1..346: note = variant of RNA ligase 2 from Klebsiella phage KP179
MHHHHHHGGSNMFAYYSSLENHYNNKFIEKIRGAGFLMHTVEWVAREKIHGTNFSVIITPTEIVPAKRTGPILEGESFFGHEIIMKKYKDSFVKVQNMLNAMDLVSVQIFGEFAGGGIQKGVDYGDKDFYVFDILSDSGNEKVYWDDYRVESFCTTLGLKLAPLLGRGSFAELSQYPNDFKSIVNRYNELVDTTGLEHANKHVFGPQASSETGVAEGYVLKPVYPIFFNNGTRVAIKCKNSKFSEKAKLDTPIVAKVELTENDKRLLEIFSEYVTWNRVSNVLSHIGSVTAKDFGRVMGLTMKDIINEAAREGHDLLFADNPSAVKKELTILIQNTIRSKWHEVLE

SEQ ID NO: 467 - DNA, 1038 bp, synthetic construct
  misc_feature 1..1038: note = variant of RNA ligase 2 from Klebsiella phage KP179
  source 1..1038: mol_type = other DNA
atgcatcaccatcaccatcacggtggcagcaacacgtttgcgtattattcaagtctggaaaaccattacaataataagttcattgagaagatccgtggtgcaggcttcctgcgtcacaccgtggaatgggtagctcgcgagaagattcatggaacgaactttagcgttatcattactccgaccgaaatcgtcccagccaaacgcacagggccgatcttggaaggcgagtcgttctttggtcacgaaattatcatgaaaaaatataaagactccttcgtgaaggtgcagaacatgctgaatgccacggatcttgttagcgtgcaaatctttggcgaatttgcgggtggtggcattcagaaaggcgtcgattacggagacaaagatttctatgtgtttgacatcctgtctgatagcgggaacgagaaagtttactgggatgactatcgcgtcgaatcgttttgcaccacgctcggtctgaaattagcgcctctgctgggacgtggtagtttcgctgaactgtcccagtacccaaacgatttcaaaagcattgtgaaccgttataatgaattggttgatacgacgggcctggaacatgccaataaacacgtctttggtccgcaagcgtcttctgaaactggcgtagcagaaggctacgttcttaaacccgtctatccgatcttctttaataacggtacgcgcgtggcgattaaatgcaagaactccaaattttcggagaaagccaagctggacaagccaattaaggcggcggtggaactgacggagaacgataaacgtctgctcgaaatctttagcgagtatgttacctggaatcgcgtcagtaacgtactgtcacatattggctcagtgaccgcaaaagattttgggcgtgttatgggtctgacgatgaaagacatcattaatgaagcagcacgcgaaggccatgatctgttgttcgctgataacccgtcggcggtgaagaaagagctgaccattctcatccagaacacgattcgttccaaatggcacgaagttctggag

SEQ ID NO: 468 - protein, 346 aa, synthetic construct
  REGION 1..346: note = variant of RNA ligase 2 from Klebsiella phage KP179
MHHHHHHGGSNTFAYYSSLENHYNNKFIEKIRGAGFLRHTVEWVAREKIHGTNFSVIITPTEIVPAKRTGPILEGESFFGHEIIMKKYKDSFVKVQNMLNATDLVSVQIFGEFAGGGIQKGVDYGDKDFYVFDILSDSGNEKVYWDDYRVESFCTTLGLKLAPLLGRGSFAELSQYPNDFKSIVNRYNELVDTTGLEHANKHVFGPQASSETGVAEGYVLKPVYPIFFNNGTRVAIKCKNSKFSEKAKLDKPIKAAVELTENDKRLLEIFSEYVTWNRVSNVLSHIGSVTAKDFGRVMGLTMKDIINEAAREGHDLLFADNPSAVKKELTILIQNTIRSKWHEVLE

SEQ ID NO: 469 - DNA, 1038 bp, synthetic construct
  misc_feature 1..1038: note = variant of RNA ligase 2 from Klebsiella phage KP179
  source 1..1038: mol_type = other DNA
atgcatcaccatcaccatcacggtggcagcaacatgtttgcgtattattcaagtctggaaaaccattacaataataagttcattgagaagatccgtggtgcaggcttcctgatgcacaccgtggaatgggtagctcgcgagaagattcatggaacgaactttagcgttatcattactccgaccgaaatcgtcccagccaaacgcacagggccgatcttggaaggcgagtcgttctttggtcacgaaattatcatgaaaaaatataaagactccttcgtgaaggtgcagaacatgctgaatgccatggatcttgttagcgtgcaaatctttggcgaatttgcgggtggtggcattcagaaaggcgtcgattacggagacaaagatttctatgtgtttgacatcctgtctgatagcgggaacgagaaagtttactgggatgactatcgcgtcgaatcgttttgcacccagctcggtctgaaattagcgcctctgctgggacgtggtagtttcgctgaactgtcccagtacccaaacgatttcaaaagcattgtgaaccgttataatgaattggttgatacgacgggcctggaacatgccaataaacacgtctttggtccgcaagcgtcttctgaaactggcgtagcagaaggctacgttcttaaacccgtctatccgatcttctttaataatggtacgcgcgtggcgattaaatgcaagaactccaaattttcggagaaagccaagctggacaaaccaattaaagcgaaaggcgaactgacggagaacgataaacgtctgctcgaaatctttagcgagtatgttacctggaatcgcgtcagtaacgtactgtcacatattggctcagtgaccgcaaaagattttgggcgtgttatgggtctgacgatgaaagacatcattaatgaagcagcacgcgaaggccatgatctgttgttcgctgataacccgtcggcggtgaagaaagagctgaccattctcatccgccacacgattcgttccaaatggcacgaagttctggag

SEQ ID NO: 470 - protein, 346 aa, synthetic construct
  REGION 1..346: note = variant of RNA ligase 2 from Klebsiella phage KP179
MHHHHHHGGSNMFAYYSSLENHYNNKFIEKIRGAGFLMHTVEWVAREKIHGTNFSVIITPTEIVPAKRTGPILEGESFFGHEIIMKKYKDSFVKVQNMLNAMDLVSVQIFGEFAGGGIQKGVDYGDKDFYVFDILSDSGNEKVYWDDYRVESFCTQLGLKLAPLLGRGSFAELSQYPNDFKSIVNRYNELVDTTGLEHANKHVFGPQASSETGVAEGYVLKPVYPIFFNNGTRVAIKCKNSKFSEKAKLDKPIKAKGELTENDKRLLEIFSEYVTWNRVSNVLSHIGSVTAKDFGRVMGLTMKDIINEAAREGHDLLFADNPSAVKKELTILIRHTIRSKWHEVLE

SEQ ID NO: 471 - DNA, 1038 bp, synthetic construct
  misc_feature 1..1038: note = variant of RNA ligase 2 from Klebsiella phage KP179
  source 1..1038: mol_type = other DNA
atgcatcaccatcaccatcacggtggcagcaacatgtttgcgtattattcaagtctggaaaaccattacaataataagttcattgagaagatccgtggtgcaggcttcctgcgtcacaccgtggaatgggtagctcgcgagaagattcatggaacgaactttagcgttatcattactccgaccgaaatcgtcccagccaaacgcacagggccgatcttggaaggcgagtcgttctttggtcacgaaattatcatgaaaaaatataaagactccttcgtgaaggtgcagaacatgctgaatgccatggatcttgttagcgtgcaaatctttggcgaatttgcgggtggtggcattcagaaaggcgtcgattacggagacaaagatttctatgtgtttgacatcctgtctgatagcgggaacgagaaagtttactgggatgactatcgcgtcgaatcgttttgcaccacgctcggtctgaaattagcgcctctgctgggacgtggtagtttcgctgaactgtcccagtacccaaacgatttcaaaagcattgtgaaccgttataatgaattggttgatacgacgggcctggaacatgccaataaacacgtctttggtccgcaagcgtcttctgaaactggcgtagcagaaggctacgttcttaaacccgtctatccgatcttctttaataacggtacgcgcgtggcgattaaatgcaagaactccaaattttcggagaaagccaagctggactcgccaattaaggcggcggtggaactgacggagaacgataaacgtctgctcgaaatctttagcgagtatgttacctggaatcgcgtcagtaacgtactgtcacatattggctcagtgaccgcaaaagattttgggcgtgttatgggtctgacgatgaaagacatcattaatgaagcagcacgcgaaggccatgatctgttgttcgctgataacccgtcggcggtgaagaaagagctgaccattctcatccagaacacgattcgttccaaatggcacgaagttctggag

SEQ ID NO: 472 - protein, 346 aa, synthetic construct
  REGION 1..346: note = variant of RNA ligase 2 from Klebsiella phage KP179
MHHHHHHGGSNMFAYYSSLENHYNNKFIEKIRGAGFLRHTVEWVAREKIHGTNFSVIITPTEIVPAKRTGPILEGESFFGHEIIMKKYKDSFVKVQNMLNAMDLVSVQIFGEFAGGGIQKGVDYGDKDFYVFDILSDSGNEKVYWDDYRVESFCTTLGLKLAPLLGRGSFAELSQYPNDFKSIVNRYNELVDTTGLEHANKHVFGPQASSETGVAEGYVLKPVYPIFFNNGTRVAIKCKNSKFSEKAKLDSPIKAAVELTENDKRLLEIFSEYVTWNRVSNVLSHIGSVTAKDFGRVMGLTMKDIINEAAREGHDLLFADNPSAVKKELTILIQNTIRSKWHEVLE

SEQ ID NO: 473 - DNA, 1038 bp, synthetic construct
  misc_feature 1..1038: note = variant of RNA ligase 2 from Klebsiella phage KP179
  source 1..1038: mol_type = other DNA
atgcatcaccatcaccatcacggtggcagcaacacgtttgcgtattattcaagtctggaaaaccattacaataataagttcattgagaagatccgtggtgcaggcttcctgatgcacaccgtggaatgggtagctcgcgagaagattcatggaacgaactttagcgttatcattactccgaccgaaatcgtcccagccaaacgcacagggccgatcttggaaggcgagtcgttctttggtcacgaaattatcatgaaaaaatataaagactccttcgtgaaggtgcagaacatgctgaatgccatggatcttgttagcgtgcaaatctttggcgaatttgcgggtggtggcattcagaaaggcgtcgattacggagacaaagatttctatgtgtttgacatcctgtctgatagcgggatcgagaaagtttactgggatgactatcgcgtcgaatcgttttgcaccacgctcggtctgaaattagcgcctctgctgggacgtggtagtttcgctgaactgtcccagtacccaaacgatttcaaaagcattgtgaaccgttataatgaattggttgatacgacgggcctggaacatgccaataaacacgtctttggtccgcaagcgtcttctgaaactggcgtagcagaaggctacgttcttaaacccgtctatccgatcttctttaataacggtacgcgcgtggcgattaaatgcaagaactccaaattttcggagaaagccaagctggactcgccaattctggcgaaggtggaactgacggagaacgataaacgtctgctcgaaatctttagcgagtatgttacctggaatcgcgtcagtaacgtactgtcacatattggctcagtgaccgcaaaagattttgggcgtgttatgggtctgacgatgaaagacatcattaatgaagcagcacgcgaaggccatgatctgttgttcgctgataacccgtcggcggtgaagaaagagctgaccattctcatccagaacacgattcgttccaaatggcacgaagttctggag

SEQ ID NO: 474 - protein, 346 aa, synthetic construct
  REGION 1..346: note = variant of RNA ligase 2 from Klebsiella phage KP179
MHHHHHHGGSNTFAYYSSLENHYNNKFIEKIRGAGFLMHTVEWVAREKIHGTNFSVIITPTEIVPAKRTGPILEGESFFGHEIIMKKYKDSFVKVQNMLNAMDLVSVQIFGEFAGGGIQKGVDYGDKDFYVFDILSDSGIEKVYWDDYRVESFCTTLGLKLAPLLGRGSFAELSQYPNDFKSIVNRYNELVDTTGLEHANKHVFGPQASSETGVAEGYVLKPVYPIFFNNGTRVAIKCKNSKFSEKAKLDSPILAKVELTENDKRLLEIFSEYVTWNRVSNVLSHIGSVTAKDFGRVMGLTMKDIINEAAREGHDLLFADNPSAVKKELTILIQNTIRSKWHEVLE

SEQ ID NO: 475 - DNA, 1038 bp, synthetic construct
  misc_feature 1..1038: note = variant of RNA ligase 2 from Klebsiella phage KP179
  source 1..1038: mol_type = other DNA
atgcatcaccatcaccatcacggtggcagcaacatgtttgcgtattattcaagtctggaaaaccattacaataataagttcattgagaagatccgtggtgcaggcttcctgatgcacaccgtggaatgggtagctcgcgagaagattcatggaacgaactttagcgttatcattactccgaccgaaatcgtcccagccaaacgcacagggccgatcttggaaggcgagtcgttctttggtcacgaaattatcatgaaaaaatataaagactccttcgtgaaggtgcagaacatgctgaatgccatggatcttgttagcgtgcaaatctttggcgaatttgcgggtggtggcattcagaaaggcgtcgattacggagacaaagatttctatgtgtttgacatcctgtctgatagcgggaacgagaaagtttactgggatgactatcgcgtcgaatcgttttgcaccacgctcggtctgaaattagcgcctctgctgggacgtggtagtttcgctgaactgtcccagtacccaaacgatttcaaaagcattgtgaaccgttataatgaattggttgatacgacgggcctggaacatgccaataaacacgtctttggtccgcaagcgtcttctgaaactggcgtagcagaaggctacgttcttaaacccgtctatccgatcttctttaataacggtacgcgcgtggcgattaaatgcaagaactccaaattttcggagaaagccaagctggactcgccaattgtggcggcggtggaactgacggagaacgataaacgtctgctcgaaatctttagcgagtatgttacctggaatcgcgtcagtaacgtactgtcacatattggctcagtgaccgcaaaagattttgggcgtgttatgggtctgacgatgaaagacatcattaatgaagcagcacgcgaaggccatgatctgttgttcgctgataacccgtcggcggtgaagaaagagctgaccattctcatccagaacacgattcgttccaaatggcacgaagttctggag

SEQ ID NO: 476 - protein, 346 aa, synthetic construct
  REGION 1..346: note = variant of RNA ligase 2 from Klebsiella phage KP179
MHHHHHHGGSNMFAYYSSLENHYNNKFIEKIRGAGFLMHTVEWVAREKIHGTNFSVIITPTEIVPAKRTGPILEGESFFGHEIIMKKYKDSFVKVQNMLNAMDLVSVQIFGEFAGGGIQKGVDYGDKDFYVFDILSDSGNEKVYWDDYRVESFCTTLGLKLAPLLGRGSFAELSQYPNDFKSIVNRYNELVDTTGLEHANKHVFGPQASSETGVAEGYVLKPVYPIFFNNGTRVAIKCKNSKFSEKAKLDSPIVAAVELTENDKRLLEIFSEYVTWNRVSNVLSHIGSVTAKDFGRVMGLTMKDIINEAAREGHDLLFADNPSAVKKELTILIQNTIRSKWHEVLE

SEQ ID NO: 477 - DNA, 1038 bp, synthetic construct
  misc_feature 1..1038: note = variant of RNA ligase 2 from Klebsiella phage KP179
  source 1..1038: mol_type = other DNA
atgcatcaccatcaccatcacggtggcagcaacgtgtttgcgtattattcaagtctggaaaaccattacaataataagttcattgagaagatccgtggtgcaggcttcctgatgcacaccgtggaatgggtagctcgcgagaagattcatggaacgaactttagcgttatcattactccgaccgaaatcgtcccagccaaacgcacagggccgatcttggaaggcgagtcgttctttggtcacgaaattatcatgaaaaaatataaagactccttcgtgaaggtgcagaacatgctgaatgccatggatcttgttagcgtgcaaatctttggcgaatttgcgggtggtggcattcagaaaggcgtcgattacggagacaaagatttctatgtgtttgacatcctgtctgatagcgggaacgagaaagtttactgggatgactatcgcgtcgaatcgttttgcaccacgctcggtctgaaattagcgcctctgctgggacgtggtagtttcgctgaactgtcccagtacccaaacgatttcaaaagcattgtgaaccgttataatgaattggttgatacgacgggcctggaacatgccaataaacacgtctttggtccgcaagcgtcttctgaaactggcgtagcagaaggctacgttcttaaacccgtctatccgatcttctttaataacggtacgcgcgtggcgattaaatgcaagaactccaaattttcggagaaagccaagctggacacgccaattaaggcgaaggtggaactgacggagaacgataaacgtctgctcgaaatctttagcgagtatgttacctggaatcgcgtcagtaacgtactgtcacatattggctcagtgaccgcaaaagattttgggcgtgttatgggtctgacgatgaaagacatcattaatgaagcagcacgcgaaggccatgatctgttgttcgctgataacccgtcggcggtgaagaaagagctgaccattctcatccagaacacgattcgttccaaatggcacgaagttctggag

SEQ ID NO: 478 - protein, 346 aa, synthetic construct
  REGION 1..346: note = variant of RNA ligase 2 from Klebsiella phage KP179
MHHHHHHGGSNVFAYYSSLENHYNNKFIEKIRGAGFLMHTVEWVAREKIHGTNFSVIITPTEIVPAKRTGPILEGESFFGHEIIMKKYKDSFVKVQNMLNAMDLVSVQIFGEFAGGGIQKGVDYGDKDFYVFDILSDSGNEKVYWDDYRVESFCTTLGLKLAPLLGRGSFAELSQYPNDFKSIVNRYNELVDTTGLEHANKHVFGPQASSETGVAEGYVLKPVYPIFFNNGTRVAIKCKNSKFSEKAKLDTPIKAKVELTENDKRLLEIFSEYVTWNRVSNVLSHIGSVTAKDFGRVMGLTMKDIINEAAREGHDLLFADNPSAVKKELTILIQNTIRSKWHEVLE

SEQ ID NO: 479 - DNA, 1038 bp, synthetic construct
  misc_feature 1..1038: note = variant of RNA ligase 2 from Klebsiella phage KP179
  source 1..1038: mol_type = other DNA
atgcatcaccatcaccatcacggtggcagcaacatgtttgcgtattattcaagtctggaaaaccattacaataataagttcattgagaagatccgtggtgcaggcttcctgatgcacaccgtggaatgggtagctcgcgagaagattcatggaacgaactttagcgttatcattactccgaccgaaatcgtcccagccaaacgcacagggccgatcttggaaggcgagtcgttctttggtcacgaaattatcatgaaaaaatataaagactccttcgtgaaggtgcagaacatgctgaatgccatggatcttgttagcgtgcaaatctttggcgaatttgcgggtggtggcattcagaaaggcgtcgattacggagacaaagatttctatgtgtttgacatcctgtctgatagcgggaacgagaaagtttactgggatgactatcgcgtcgaatcgttttgcaccaccctcggtctgaaattagcgcctctgctgggacgtggtagtttcgctgaactgtcccagtacccaaacgatttcaaaagcattgtgaaccgttataatgaattggttgatacgacgggcctggaacatgccaataaacacgtctttggtccgcaagcgtcttctgaaactggcgtagcagaaggctacgttcttaaacccgtctatccgatcttctttaataatggtacgcgcgtggcgattaaatgcaagaactccaaattttcggagaaagccacgctggacaaaccaattaaagcgaaagtggaactgacggagaacgataaacgtctgctcgaaatctttagcgagtatgttacctggaatcgcgtcagtaacgtactgtcacatattggctcagtgaccgcaaaagattttgggcgtgttatgggtctgacgatgaaagacatcattaatgaagcagcacgcgaaggccatgatctgttgttcgctgataacccgtcggcggtgaagaaagagctgaccattctcatccgccacacgattcgttccaaatggcacgaagttctggag

SEQ ID NO: 480 - protein, 346 aa, synthetic construct
  REGION 1..346: note = variant of RNA ligase 2 from Klebsiella phage KP179
MHHHHHHGGSNMFAYYSSLENHYNNKFIEKIRGAGFLMHTVEWVAREKIHGTNFSVIITPTEIVPAKRTGPILEGESFFGHEIIMKKYKDSFVKVQNMLNAMDLVSVQIFGEFAGGGIQKGVDYGDKDFYVFDILSDSGNEKVYWDDYRVESFCTTLGLKLAPLLGRGSFAELSQYPNDFKSIVNRYNELVDTTGLEHANKHVFGPQASSETGVAEGYVLKPVYPIFFNNGTRVAIKCKNSKFSEKATLDKPIKAKVELTENDKRLLEIFSEYVTWNRVSNVLSHIGSVTAKDFGRVMGLTMKDIINEAAREGHDLLFADNPSAVKKELTILIRHTIRSKWHEVLE

SEQ ID NO: 481 - DNA, 1038 bp, synthetic construct
  misc_feature 1..1038: note = variant of RNA ligase 2 from Klebsiella phage KP179
  source 1..1038: mol_type = other DNA
atgcatcaccatcaccatcacggtggcagcaacacgtttgcgtattattcaagtctggaaaaccattacaataataagttcattgagaagatccgtggtgcaggcttcctgatgcacaccgtggaatgggtagctcgcgagaagattcatggaacgaactttagcgttatcattactccgaccgaaatcgtcccagccaaacgcacagggccgatcttggaaggcgagtcgttctttggtcacgaaattatcatgaaaaaatataaagactccttcgtgaaggtgcagaacatgctgaatgccatggatcttgttagcgtgcaaatctttggcgaatttgcgggtggtggcattcagaaaggcgtcgattacggagacaaagatttctatgtgtttgacatcctgtctgatagcgggaacgagaaagtttactgggatgactatcgcgtcgaatcgttttgcaccacgctcggtctgaaattagcgcctctgctgggacgtggtagtttcgctgaactgtcccagtacccaaacgatttcaaaagcattgtgaaccgttataatgaattggttgatacgacgggcctggaacatgccaataaacacgtctttggtccgcaagcgtcttctgaaactggcgtagcagaaggctacgttcttaaacccgtctatccgatcttctttaataacggtacgcgcgtggcgattaaatgcaagaactccaaattttcggagaaagccaagctggacaagccaattgtggcgaaggtggaactgacggagaacgataaacgtctgctcgaaatctttagcgagtatgttacctggaatcgcgtcagtaacgtactgtcacatattggctcagtgaccgcaaaagattttgggcgtgttatgggtctgacgatgaaagacatcattaatgaagcagcacgcgaaggccatgatctgttgttcgctgataacccgtcggcggtgaagaaagagctgaccattctcatccagaacacgattcgttccaaatggcacgaagttctggag

SEQ ID NO: 482 - protein, 346 aa, synthetic construct
  REGION 1..346: note = variant of RNA ligase 2 from Klebsiella phage KP179
MHHHHHHGGSNTFAYYSSLENHYNNKFIEKIRGAGFLMHTVEWVAREKIHGTNFSVIITPTEIVPAKRTGPILEGESFFGHEIIMKKYKDSFVKVQNMLNAMDLVSVQIFGEFAGGGIQKGVDYGDKDFYVFDILSDSGNEKVYWDDYRVESFCTTLGLKLAPLLGRGSFAELSQYPNDFKSIVNRYNELVDTTGLEHANKHVFGPQASSETGVAEGYVLKPVYPIFFNNGTRVAIKCKNSKFSEKAKLDKPIVAKVELTENDKRLLEIFSEYVTWNRVSNVLSHIGSVTAKDFGRVMGLTMKDIINEAAREGHDLLFADNPSAVKKELTILIQNTIRSKWHEVLE

SEQ ID NO: 483 - DNA, 1038 bp, synthetic construct
  misc_feature 1..1038: note = variant of RNA ligase 2 from Klebsiella phage KP179
  source 1..1038: mol_type = other DNA
atgcatcaccatcaccatcacggtggcagcaacgtgtttgcgtattattcaagtctggaaaaccattacaataataagttcattgagaagatccgtggtgcaggcttcctgcgtcacaccgtggaatgggtagctcgcgagaagattcatggaacgaactttagcgttatcattactccgaccgaaatcgtcccagccaaacgcacagggccgatcttggaaggcgagtcgttctttggtcacgaaattatcatgaaaaaatataaagactccttcgtgaaggtgcagaacatgctgaatgccatggatcttgttagcgtgcaaatctttggcgaatttgcgggtggtggcattcagaaaggcgtcgattacggagacaaagatttctatgtgtttgacatcctgtctgatagcgggaacgagaaagtttactgggatgactatcgcgtcgaatcgttttgcaccacgctcggtctgaaattagcgcctctgctgggacgtggtagtttcgctgaactgtcccagtacccaaacgatttcaaaagcattgtgaaccgttataatgaattggttgatacgacgggcctggaacatgccaataaacacgtctttggtccgcaagcgtcttctgaaactggcgtagcagaaggctacgttcttaaacccgtctatccgatcttctttaataacggtacgcgcgtggcgattaaatgcaagaactccaaattttcggagaaagccaagctggacaaaccaattaaagcgaaagtggaactgacggagaacgataaacgtctgctcgaaatctttagcgagtatgttacctggaatcgcgtcagtaacgtactgtcacatattggctcagtgaccgcaaaagattttgggcgtgttatgggtctgacgatgaaagacatcattaatgaagcagcacgcgaaggccatgatctgttgttcgctgataacccgtcggcggtgaagaaagagctgaccattctcatccagaacacgattcgttccaaatggcacgaagttctggag

SEQ ID NO: 484 - protein, 346 aa, synthetic construct
  REGION 1..346: note = variant of RNA ligase 2 from Klebsiella phage KP179
MHHHHHHGGSNVFAYYSSLENHYNNKFIEKIRGAGFLRHTVEWVAREKIHGTNFSVIITPTEIVPAKRTGPILEGESFFGHEIIMKKYKDSFVKVQNMLNAMDLVSVQIFGEFAGGGIQKGVDYGDKDFYVFDILSDSGNEKVYWDDYRVESFCTTLGLKLAPLLGRGSFAELSQYPNDFKSIVNRYNELVDTTGLEHANKHVFGPQASSETGVAEGYVLKPVYPIFFNNGTRVAIKCKNSKFSEKAKLDKPIKAKVELTENDKRLLEIFSEYVTWNRVSNVLSHIGSVTAKDFGRVMGLTMKDIINEAAREGHDLLFADNPSAVKKELTILIQNTIRSKWHEVLE

SEQ ID NO: 485 - DNA, 1038 bp, synthetic construct
  misc_feature 1..1038: note = variant of RNA ligase 2 from Klebsiella phage KP179
  source 1..1038: mol_type = other DNA
atgcatcaccatcaccatcacggtggcagcaacgtgtttgcgtattattcaagtctggaaaaccattacaataataagttcattgagaagatccgtggtgcaggcttcctgatgcacaccgtggaatgggtagctcgcgagaagattcatggaacgaactttagcgttatcattactccgaccgaaatcgtcccagccaaacgcacagggccgatcttggaaggcgagtcgttctttggtcacgaaattatcatgaaaaaatataaagactccttcgtgaaggtgcagaacatgctgaatgccatggatcttgttagcgtgcaaatctttggcgaatttgcgggtggtggcattcagaaaggcgtcgattacggagacaaagatttctatgtgtttgacatcctgtctgatagcgggaacgagaaagtttactgggatgactatcgcgtcgaatcgttttgcaccacgctcggtctgaaattagcgcctctgctgggacgtggtagtttcgctgaactgtcccagtacccaaacgatttcaaaagcattgtgaaccgttataatgaattggttgatacgacgggcctggaacatgccaataaacacgtctttggtccgcaagcgtcttctgaaactggcgtagcagaaggctacgttcttaaacccgtctatccgatcttctttaataacggtacgcgcgtggcgattaaatgcaagaactccaaattttcggagaaagccaagctggacacgccaattaaggcggcggtggaactgacggagaacgataaacgtctgctcgaaatctttagcgagtatgttacctggaatcgcgtcagtaacgtactgtcacatattggctcagtgaccgcaaaagattttgggcgtgttatgggtctgacgatgaaagacatcattaatgaagcagcacgcgaaggccatgatctgttgttcgctgataacccgtcggcggtgaagaaagagctgaccattctcatccagaacacgattcgttccaaatggcacgaagttctggag

SEQ ID NO: 486 - protein, 346 aa, synthetic construct
  REGION 1..346: note = variant of RNA ligase 2 from Klebsiella phage KP179
MHHHHHHGGSNVFAYYSSLENHYNNKFIEKIRGAGFLMHTVEWVAREKIHGTNFSVIITPTEIVPAKRTGPILEGESFFGHEIIMKKYKDSFVKVQNMLNAMDLVSVQIFGEFAGGGIQKGVDYGDKDFYVFDILSDSGNEKVYWDDYRVESFCTTLGLKLAPLLGRGSFAELSQYPNDFKSIVNRYNELVDTTGLEHANKHVFGPQASSETGVAEGYVLKPVYPIFFNNGTRVAIKCKNSKFSEKAKLDTPIKAAVELTENDKRLLEIFSEYVTWNRVSNVLSHIGSVTAKDFGRVMGLTMKDIINEAAREGHDLLFADNPSAVKKELTILIQNTIRSKWHEVLE

SEQ ID NO: 487 - DNA, 1038 bp, synthetic construct
  misc_feature 1..1038: note = variant of RNA ligase 2 from Klebsiella phage KP179
  source 1..1038: mol_type = other DNA
atgcatcaccatcaccatcacggtggcagcaacatgtttgcgtattattcaagtctggaaaaccattacaataataagttcattgagaagatccgtggtgcaggcttcctgatgcacaccgtggaatgggtagctcgcgagaagattcatggaacgaactttagcgttatcattactccgaccgaaatcgtcccagccaaacgcacagggccgatcttggaaggcgagtcgttctttggtcacgaaattatcatgaaaaaatataaagactccttcgtgaaggtgcagaacatgctgaatgccatggatcttgttagcgtgcaaatctttggcgaatttgcgggtggtggcattcagaaaggcgtcgattacggagacaaagatttctatgtgtttgacatcctgtctgatagcgggaacgagaaagtttactgggatgactatcgcgtcgaatcgttttgcacccagctcggtctgaaattagcgcctctgctgggacgtggtagtttcgctgaactgtcccagtacccaaacgatttcaaaagcattgtgaaccgttataatgaattggttgatacgacgggcctggaacatgccaataaacacgtctttggtccgcaagcgtcttctgaaactggcgtagcagaaggctacgttcttaaacccgtctatccgatcttctttaataatggtacgcgcgtggcgattaaatgcaagaactccaaattttcggagaaagccaagctggacaaaccaattaaagcgaaagtcccactgacggagaacgataaacgtctgctcgaaatctttagcgagtatgttacctggaatcgcgtcagtaacgtactgtcacatattggctcagtgaccgcaaaagattttgggcgtgttatgggtctgacgatgaaagacatcattaatgaagcagcacgcgaaggccatgatctgttgttcgctgataacccgtcggcggtgaagaaagagctgaccattctcatccgcaacacgattcgttccaaatggcacgaagttctggag

SEQ ID NO: 488 - protein, 346 aa, synthetic construct
  REGION 1..346: note = variant of RNA ligase 2 from Klebsiella phage KP179
MHHHHHHGGSNMFAYYSSLENHYNNKFIEKIRGAGFLMHTVEWVAREKIHGTNFSVIITPTEIVPAKRTGPILEGESFFGHEIIMKKYKDSFVKVQNMLNAMDLVSVQIFGEFAGGGIQKGVDYGDKDFYVFDILSDSGNEKVYWDDYRVESFCTQLGLKLAPLLGRGSFAELSQYPNDFKSIVNRYNELVDTTGLEHANKHVFGPQASSETGVAEGYVLKPVYPIFFNNGTRVAIKCKNSKFSEKAKLDKPIKAKVPLTENDKRLLEIFSEYVTWNRVSNVLSHIGSVTAKDFGRVMGLTMKDIINEAAREGHDLLFADNPSAVKKELTILIRNTIRSKWHEVLE

SEQ ID NO: 489 - DNA, 1038 bp, synthetic construct
  misc_feature 1..1038: note = variant of RNA ligase 2 from Klebsiella phage KP179
  source 1..1038: mol_type = other DNA
atgcatcaccatcaccatcacggtggcagcaacatgtttgcgtattattcaagtctggaaaaccattacaataataagttcattgagaagatccgtggtgcaggcttcctgatgcacaccgtggaatgggtagctcgcgagaagattcatggaacgaactttagcgttatcattactccgaccgaaatcgtcccagccaaacgcacagggccgatcttggaaggcgagtcgttctttggtcacgaaattatcatgaaaaaatataaagactccttcgtgaaggtgcagaacatgctgaatgccatggatcttgttagcgtgcaaatctttggcgaatttgcgggtggtggcattcagaaaggcgtcgattacggagacaaagatttctatgtgtttgacatcctgtctgatagcgggaacgagaaagtttactgggatgactatcgcgtcgaatcgttttgcacccagctcggtctgaaattagcgcctctgctgggacgtggtagtttcgctgaactgtcccagtacccaaacgatttcaaaagcattgtgaaccgttataatgaattggttgatacgacgggcctggaacatgccaataaacacgtctttggtccgcaagcgtcttctgaaactggcgtagcagaaggctacgttcttaaacccgtctatccgatcttctttaataatggtacgcgcgtggcgattaaatgcaagaactccaaattttcggagaaagccacgctggacaaaccaattaaagcgaaagtggaactgacggagaacgataaacgtctgctcgaaatctttagcgagtatgttacctggaatcgcgtcagtaacgtactgtcacatattggctcagtgaccgcaaaagattttgggcgtgttatgggtctgacgatgaaagacatcattaatgaagcagcacgcgaaggccatgatctgttgttcgctgataacccgtcggcggtgaagaaagagctgcgtattctcatccaacacacgattcgttccaaatggcacgaagttctggag

SEQ ID NO: 490 - protein, 346 aa, synthetic construct
  REGION 1..346: note = variant of RNA ligase 2 from Klebsiella phage KP179
MHHHHHHGGSNMFAYYSSLENHYNNKFIEKIRGAGFLMHTVEWVAREKIHGTNFSVIITPTEIVPAKRTGPILEGESFFGHEIIMKKYKDSFVKVQNMLNAMDLVSVQIFGEFAGGGIQKGVDYGDKDFYVFDILSDSGNEKVYWDDYRVESFCTQLGLKLAPLLGRGSFAELSQYPNDFKSIVNRYNELVDTTGLEHANKHVFGPQASSETGVAEGYVLKPVYPIFFNNGTRVAIKCKNSKFSEKATLDKPIKAKVELTENDKRLLEIFSEYVTWNRVSNVLSHIGSVTAKDFGRVMGLTMKDIINEAAREGHDLLFADNPSAVKKELRILIQHTIRSKWHEVLE

SEQ ID NO: 491 - DNA, 1038 bp, synthetic construct
  misc_feature 1..1038: note = variant of RNA ligase 2 from Klebsiella phage KP179
  source 1..1038: mol_type = other DNA
atgcatcaccatcaccatcacggtggcagcaacacgtttgcgtattattcaagtctggaaaaccattacaataataagttcattgagaagatccgtggtgcaggcttcctgcgtcacaccgtggaatgggtagctcgcgagaagattcatggaacgaactttagcgttatcattactccgaccgaaatcgtcccagccaaacgcacagggccgatcttggaaggcgagtcgttctttggtcacgaaattatcatgaaaaaatataaagactccttcgtgaaggtgcagaacatgctgaatgccatggatcttgttagcgtgcaaatctttggcgaatttgcgggtggtggcattcagaaaggcgtcgattacggagacaaagatttctatgtgtttgacatcctgtctgatagcgggaacgagaaagtttactgggatgactatcgcgtcgaatcgttttgcaccacgctcggtctgaaattagcgcctctgctgggacgtggtagtttcgctgaactgtcccagtacccaaacgatttcaaaagcattgtgaaccgttataatgaattggttgatacgacgggcctggaacatgccaataaacacgtctttggtccgcaagcgtcttctgaaactggcgtagcagaaggctacgttcttaaacccgtctatccgatcttctttaataatggtacgcgcgtggcgattaaatgcaagaactccaaattttcggagaaagccaagctggacaagccaattaaggcggcggtggaactgacggagaacgataaacgtctgctcgaaatctttagcgagtatgttacctggaatcgcgtcagtaacgtactgtcacatattggctcagtgaccgcaaaagattttgggcgtgttatgggtctgacgatgaaagacatcattaatgaagcagcacgcgaaggccatgatctgttgttcgctgataacccgtcggcggtgaagaaagagctgaccattctcatccagaacacgattcgttccaaatggcacgaagttctggag

SEQ ID NO: 492 - protein, 346 aa, synthetic construct
  REGION 1..346: note = variant of RNA ligase 2 from Klebsiella phage KP179
MHHHHHHGGSNTFAYYSSLENHYNNKFIEKIRGAGFLRHTVEWVAREKIHGTNFSVIITPTEIVPAKRTGPILEGESFFGHEIIMKKYKDSFVKVQNMLNAMDLVSVQIFGEFAGGGIQKGVDYGDKDFYVFDILSDSGNEKVYWDDYRVESFCTTLGLKLAPLLGRGSFAELSQYPNDFKSIVNRYNELVDTTGLEHANKHVFGPQASSETGVAEGYVLKPVYPIFFNNGTRVAIKCKNSKFSEKAKLDKPIKAAVELTENDKRLLEIFSEYVTWNRVSNVLSHIGSVTAKDFGRVMGLTMKDIINEAAREGHDLLFADNPSAVKKELTILIQNTIRSKWHEVLE

SEQ ID NO: 493 - DNA, 1038 bp, synthetic construct
  misc_feature 1..1038: note = variant of RNA ligase 2 from Klebsiella phage KP179
  source 1..1038: mol_type = other DNA
atgcatcaccatcaccatcacggtggcagcaacatgtttgcgtattattcaagtctggaaaaccattacaataataagttcattgagaagatccgtggtgcaggcttcctgatgcacaccgtggaatgggtagctcgcgagaagattcatggaacgaactttagcgttatcattactccgaccgaaatcgtcccagccaaacgcacagggccgatcttggaaggcgagtcgttctttggtcacgaaattatcatgaaaaaatataaagactccttcgtgaaggtgcagaacatgctgaatgccatggatcttgttagcgtgcaaatctttggcgaatttgcgggtggtggcattcagaaaggcgtcgattacggagacaaagatttctatgtgtttgacatcctgtctgatagcgggaacgagaaagtttactgggatgactatcgcgtcgaatcgttttgcaccaccctcggtctgaaattagcgcctctgctgggacgtggtagtttcgctgaactgtcccagtacccaaacgatttcaaaagcattgtgaaccgttataatgaattggttgatacgacgggcctggaacatgccaataaacacgtctttggtccgcaagcgtcttctgaaactggcgtagcagaaggctacgttcttaaacccgtctatccgatcttctttaataatggtgggcgcgtggcgattaaatgcaagaactccaaattttcggagaaagccaagctggacaaaccaattaaagcgaaagtggaactgacggagaacgataaacgtctgctcgaaatctttagcgagtatgttacctggaatcgcgtcagtaacgtactgtcacatattggctcagtgaccgcaaaagattttgggcgtgttatgggtctgacgatgaaagacatcattaatgaagcagcacgcgaaggccatgatctgttgttcgctgataacccgtcggcggtgaagaaagagctgaccattctcatccgccacacgattcgttccaaatggcacgaagttctggag

SEQ ID NO: 494 - protein, 346 aa, synthetic construct
  REGION 1..346: note = variant of RNA ligase 2 from Klebsiella phage KP179
MHHHHHHGGSNMFAYYSSLENHYNNKFIEKIRGAGFLMHTVEWVAREKIHGTNFSVIITPTEIVPAKRTGPILEGESFFGHEIIMKKYKDSFVKVQNMLNAMDLVSVQIFGEFAGGGIQKGVDYGDKDFYVFDILSDSGNEKVYWDDYRVESFCTTLGLKLAPLLGRGSFAELSQYPNDFKSIVNRYNELVDTTGLEHANKHVFGPQASSETGVAEGYVLKPVYPIFFNNGGRVAIKCKNSKFSEKAKLDKPIKAKVELTENDKRLLEIFSEYVTWNRVSNVLSHIGSVTAKDFGRVMGLTMKDIINEAAREGHDLLFADNPSAVKKELTILIRHTIRSKWHEVLE

SEQ ID NO: 495 - DNA, 1038 bp, synthetic construct
  misc_feature 1..1038: note = variant of RNA ligase 2 from Klebsiella phage KP179
  source 1..1038: mol_type = other DNA
atgcatcaccatcaccatcacggtggcagcaacatgtttgcgtattattcaagtctggaaaaccattacaataataagttcattgagaagatccgtggtgcaggcttcctgatgcacaccgtggaatgggtagctcgcgagaagattcatggaacgaactttagcgttatcattactccgaccgaaatcgtcccagccaaacgcacagggccgatcttggaaggcgagtcgttctttggtcacgaaattatcatgaaaaaatataaagactccttcgtgaaggtgcagaacatgctgaatgccatggatcttgttagcgtgcaaatctttggcgaatttgcgggtggtggcattcagaaaggcgtcgattacggagacaaagatttctatgtgtttgacatcctgtctgatagcgggaacgagaaagtttactgggatgactatcgcgtcgaatcgttttgcacccagctcggtctgaaattagcgcctctgctgggacgtggtagtttcgctgaactgtcccagtacccaaacgatttcaaaagcattgtgaaccgttataatgaattggttgatacgacgggcctggaacatgccaataaacacgtctttggtccgcaagcgtcttctgaaactggcgtagcagaaggctacgttcttaaacccgtctatccgatcttctttaataatggtacgcgcgtggcgattaaatgcaagaactccaaattttcggagaaagccaagcgcgacaaaccaattaaagcgaaagtggaactgacggagaacgataaacgtctgctcgaaatctttagcgagtatgttacctggaatcgcgtcagtaacgtactgtcacatattggctcagtgaccgcaaaagattttgggcgtgttatgggtctgacgatgaaagacatcattaatgaagcagcacgcgaaggccatgatctgttgttcgctgataacccgtcggcggtgaagaaagagctgaccattctcatccgcaacacgattcgttccaaatggcacgaagttctggag

SEQ ID NO: 496 - protein, 346 aa, synthetic construct
  REGION 1..346: note = variant of RNA ligase 2 from Klebsiella phage KP179
MHHHHHHGGSNMFAYYSSLENHYNNKFIEKIRGAGFLMHTVEWVAREKIHGTNFSVIITPTEIVPAKRTGPILEGESFFGHEIIMKKYKDSFVKVQNMLNAMDLVSVQIFGEFAGGGIQKGVDYGDKDFYVFDILSDSGNEKVYWDDYRVESFCTQLGLKLAPLLGRGSFAELSQYPNDFKSIVNRYNELVDTTGLEHANKHVFGPQASSETGVAEGYVLKPVYPIFFNNGTRVAIKCKNSKFSEKAKRDKPIKAKVELTENDKRLLEIFSEYVTWNRVSNVLSHIGSVTAKDFGRVMGLTMKDIINEAAREGHDLLFADNPSAVKKELTILIRNTIRSKWHEVLE

SEQ ID NO: 497 - DNA, 1038 bp, synthetic construct
  misc_feature 1..1038: note = variant of RNA ligase 2 from Klebsiella phage KP179
  source 1..1038: mol_type = other DNA
atgcatcaccatcaccatcacggtggcagcaacatgtttgcgtattattcaagtctggaaaaccattacaataataagttcattgagaagatccgtggtgcaggcttcctgatgcacaccgtggaatgggtagctcgcgagaagattcatggaacgaactttagcgttatcattactccgaccgaaatcgtcccagccaaacgcacagggccgatcttggaaggcgagtcgttctttggtcacgaaattatcatgaaaaaatataaagactccttcgtgaaggtgcagaacatgctgaatgccatggatcttgttagcgtgcaaatctttggcgaatttgcgggtggtggcattcagaaaggcgtcgattacggagacaaagatttctatgtgtttgacatcctgtctgatagcgggaacgagaaagtttactgggatgactatcgcgtcgaatcgttttgcaccaccctcggtctgaaattagcgcctctgctgggacgtggtagtttcgctgaactgtcccagtacccaaacgatttcaaaagcattgtgaaccgttataatgaattggttgatacgacgggcctggaacatgccaataaacacgtctttggtccgcaagcgtcttctgaaactggcgtagcagaaggctacgttcttaaacccgtctatccgatcttctttaataatggtacgcgcgtggcgattaaatgcaagaactccaaattttcggagaaagccaagctggacaaaccaattaaagcgaaagtggaactgacggagaacgataaacgtctgctcgaaatctttagcgagtatgttacctggaatcgcgtcagtaacgtactgtcacatattggctcagtgaccgcaaaagattttgggcgtgttatgggtctgacgatgaaagacatcattaatgaagcagcacgcgaaggccatgatctgttgttcgctgataacccgtcggcggtgaagaaagagctgcgtattctcatccgccacacgattcgttccaaatggcacgaagttctggag

SEQ ID NO: 498 - protein, 346 aa, synthetic construct
  REGION 1..346: note = variant of RNA ligase 2 from Klebsiella phage KP179
MHHHHHHGGSNMFAYYSSLENHYNNKFIEKIRGAGFLMHTVEWVAREKIHGTNFSVIITPTEIVPAKRTGPILEGESFFGHEIIMKKYKDSFVKVQNMLNAMDLVSVQIFGEFAGGGIQKGVDYGDKDFYVFDILSDSGNEKVYWDDYRVESFCTTLGLKLAPLLGRGSFAELSQYPNDFKSIVNRYNELVDTTGLEHANKHVFGPQASSETGVAEGYVLKPVYPIFFNNGTRVAIKCKNSKFSEKAKLDKPIKAKVELTENDKRLLEIFSEYVTWNRVSNVLSHIGSVTAKDFGRVMGLTMKDIINEAAREGHDLLFADNPSAVKKELRILIRHTIRSKWHEVLE

SEQ ID NO: 499 - DNA, 1038 bp, synthetic construct
  misc_feature 1..1038: note = variant of RNA ligase 2 from Klebsiella phage KP179
  source 1..1038: mol_type = other DNA
atgcatcaccatcaccatcacggtggcagcaacatgtttgcgtattattcaagtctggaaaaccattacaataataagttcattgagaagatccgtggtgcaggcttcctgatgcacaccgtggaatgggtagctcgcgagaagattcatggaacgaactttagcgttatcattactccgaccgaaatcgtcccagccaaacgcacagggccgatcttggaaggcgagtcgttctttggtcacgaaattatcatgaaaaaatataaagactccttcgtgaaggtgcagaacatgctgaatgccatggatcttgttagcgtgcaaatctttggcgaatttgcgggtggtggcattcagaaaggcgtcgattacggagacaaagatttctatgtgtttgacatcctgtctgatagcgggaacgagaaagtttactgggatgactatcgcgtcgaatcgttttgcacccagctcggtctgaaattagcgcctctgctgggacgtggtagtttcgctgaactgtcccagtacccaaacgatttcaaaagcattgtgaaccgttataatgaattggttgatacgacgggcctggaacatgccaataaacacgtctttggtccgcaagcgtcttctgaaactggcgtagcagaaggctacgttcttaaacccgtctatccgatcttctttaataatggtacgcgcgtggcgattaaatgcaagaactccaaattttcggagaaagccacgctggacaaaccaattaaagcgaaagtggaactgacggagaacgataaacgtctgctcgaaatctttagcgagtatgttacctggaatcgcgtcagtaacgtactgtcacatattggctcagtgaccgcaaaagattttgggcgtgttatgggtctgacgatgaaagacatcattaatgaagcagcacgcgaaggccatgatctgttgttcgctgataacccgtcggcggtgaagaaagagctgaccattctcatccgcaacacgattcgttccaaatggcacgaagttctggag

SEQ ID NO: 500 - protein, 346 aa, synthetic construct
  REGION 1..346: note = variant of RNA ligase 2 from Klebsiella phage KP179
MHHHHHHGGSNMFAYYSSLENHYNNKFIEKIRGAGFLMHTVEWVAREKIHGTNFSVIITPTEIVPAKRTGPILEGESFFGHEIIMKKYKDSFVKVQNMLNAMDLVSVQIFGEFAGGGIQKGVDYGDKDFYVFDILSDSGNEKVYWDDYRVESFCTQLGLKLAPLLGRGSFAELSQYPNDFKSIVNRYNELVDTTGLEHANKHVFGPQASSETGVAEGYVLKPVYPIFFNNGTRVAIKCKNSKFSEKATLDKPIKAKVELTENDKRLLEIFSEYVTWNRVSNVLSHIGSVTAKDFGRVMGLTMKDIINEAAREGHDLLFADNPSAVKKELTILIRNTIRSKWHEVLE

SEQ ID NO: 501 - DNA, 1038 bp, synthetic construct
  misc_feature 1..1038: note = variant of RNA ligase 2 from Klebsiella phage KP179
  source 1..1038: mol_type = other DNA
atgcatcaccatcaccatcacggtggcagcaacatgtttgcgtattattcaagtctggaaaaccattacaataataagttcattgagaagatccgtggtgcaggcttcctgatgcacaccgtggaatgggtagctcgcgagaagattcatggaacgaactttagcgttatcattactccgaccgaaatcgtcccagccaaacgcacagggccgatcttggaaggcgagtcgttctttggtcacgaaattatcatgaaaaaatataaagactccttcgtgaaggtgcagaacatgctgaatgccatggatcttgttagcgtgcaaatctttggcgaatttgcgggtggtggcattcagaaaggcgtcgattacggagacaaagatttctatgtgtttgacatcctgtctgatagcgggaacgagaaagtttactgggatgactatcgcgtcgaatcgttttgcacccagctcggtctgaaattagcgcctctgctgggacgtggtagtttcgctgaactgtcccagtacccaaacgatttcaaaagcattgtgaaccgttataatgaattggttgatacgacgggcctggaacatgccaataaacacgtctttggtccgcaagcgtcttctgaaactggcgtagcagaaggctacgttcttaaacccgtctatccgatcttctttaataatggtacgcgcgtggcgattaaatgcaagaactccaaattttcggagaaagccaagctggacaaaccaattaaagcgaaagtggaactgacggagaacgataaacgtctgctcgaaatctttagcgagtatgttacctggaatcgcgtcagtaacgtactgtcacatattggctcagtgaccgcaaaagattttgggcgtgttatgggtctgacgatgaaagacatcattaatgaagcagcacgcgaaggccatgatctgttgttcgctgataacccgtcggcggtgaagaaagagctgaccattctcatccaacacacgattcgttccaaatggcacgaagttctggag

SEQ ID NO: 502 - protein, 346 aa, synthetic construct
  REGION 1..346: note = variant of RNA ligase 2 from Klebsiella phage KP179
MHHHHHHGGSNMFAYYSSLENHYNNKFIEKIRGAGFLMHTVEWVAREKIHGTNFSVIITPTEIVPAKRTGPILEGESFFGHEIIMKKYKDSFVKVQNMLNAMDLVSVQIFGEFAGGGIQKGVDYGDKDFYVFDILSDSGNEKVYWDDYRVESFCTQLGLKLAPLLGRGSFAELSQYPNDFKSIVNRYNELVDTTGLEHANKHVFGPQASSETGVAEGYVLKPVYPIFFNNGTRVAIKCKNSKFSEKAKLDKPIKAKVELTENDKRLLEIFSEYVTWNRVSNVLSHIGSVTAKDFGRVMGLTMKDIINEAAREGHDLLFADNPSAVKKELTILIQHTIRSKWHEVLE

SEQ ID NO: 503 - DNA, 1038 bp, synthetic construct
  misc_feature 1..1038: note = variant of RNA ligase 2 from Klebsiella phage KP179
  source 1..1038: mol_type = other DNA
atgcatcaccatcaccatcacggtggcagcaacatgtttgcgtattattcaagtctggaaaaccattacaataataagttcattgagaagatccgtggtgcaggcttcctgatgcacaccgtggaatgggtagctcgcgagaagattcatggaacgaactttagcgttatcattactccgaccgaaatcgtcccagccaaacgcacagggccgatcttggaaggcgagtcgttctttggtcacgaaattatcatgaaaaaatataaagactccttcgtgaaggtgcagaacatgctgaatgccatggatcttgttagcgtgcaaatctttggcgaatttgcgggtggtggcattcagaaaggcgtcgattacggagacaaagatttctatgtgtttgacatcctgtctgatagcgggaacgagaaagtttactgggatgactatcgcgtcgaatcgttttgcaccaccctcggtctgaaattagcgcctctgctgggacgtggtagtttcgctgaactgtcccagtacccaaacgatttcaaaagcattgtgaaccgttataatgaattggttgatacgacgggcctggaacatgccaataaacacgtctttggtccgcaagcgtcttctgaaactggcgtagcagaaggctacgttcttaaacccgtctatccgatcttctttaataatggtacgcgcgtggcgattaaatgcaagaactccaaattttcggagaaagccaagctggacaaaccaattaaagcgaaaggcgaactgacggagaacgataaacgtctgctcgaaatctttagcgagtatgttacctggaatcgcgtcagtaacgtactgtcacatattggctcagtgaccgcaaaagattttgggcgtgttatgggtctgacgatgaaagacatcattaatgaagcagcacgcgaaggccatgatctgttgttcgctgataacccgtcggcggtgaagaaagagctgaccattctcatccgcaacacgattcgttccaaatggcacgaagttctggag

SEQ ID NO: 504 - protein, 346 aa, synthetic construct
  REGION 1..346: note = variant of RNA ligase 2 from Klebsiella phage KP179
MHHHHHHGGSNMFAYYSSLENHYNNKFIEKIRGAGFLMHTVEWVAREKIHGTNFSVIITPTEIVPAKRTGPILEGESFFGHEIIMKKYKDSFVKVQNMLNAMDLVSVQIFGEFAGGGIQKGVDYGDKDFYVFDILSDSGNEKVYWDDYRVESFCTTLGLKLAPLLGRGSFAELSQYPNDFKSIVNRYNELVDTTGLEHANKHVFGPQASSETGVAEGYVLKPVYPIFFNNGTRVAIKCKNSKFSEKAKLDKPIKAKGELTENDKRLLEIFSEYVTWNRVSNVLSHIGSVTAKDFGRVMGLTMKDIINEAAREGHDLLFADNPSAVKKELTILIRNTIRSKWHEVLE

SEQ ID NO: 505 - DNA, 1038 bp, synthetic construct
  misc_feature 1..1038: note = variant of RNA ligase 2 from Klebsiella phage KP179
  source 1..1038: mol_type = other DNA
atgcatcaccatcaccatcacggtggcagcaacatgtttgcgtattattcaagtctggaaaaccattacaataataagttcattgagaagatccgtggtgcaggcttcctgatgcacaccgtggaatgggtagctcgcgagaagattcatggaacgaactttagcgttatcattactccgaccgaaatcgtcccagccaaacgcacagggccgatcttggaaggcgagtcgttctttggtcacgaaattatcatgaaaaaatataaagactccttcgtgaaggtgcagaacatgctgaatgccatggatcttgttagcgtgcaaatctttggcgaatttgcgggtggtggcattcagaaaggcgtcgattacggagacaaagatttctatgtgtttgacatcctgtctgatagcgggaacgagaaagtttactgggatgactatcgcgtcgaatcgttttgcacccacctcggtctgaaattagcgcctctgctgggacgtggtagtttcgctgaactgtcccagtacccaaacgatttcaaaagcattgtgaaccgttataatgaattggttgatacgacgggcctggaacatgccaataaacacgtctttggtccgcaagcgtcttctgaaactggcgtagcagaaggctacgttcttaaacccgtctatccgatcttctttaataatggtacgcgcgtggcgattaaatgcaagaactccaaattttcggagaaagccacgctggacaaaccaattaaagcgaaagtggaactgacggagaacgataaacgtctgctcgaaatctttagcgagtatgttacctggaatcgcgtcagtaacgtactgtcacatattggctcagtgaccgcaaaagattttgggcgtgttatgggtctgacgatgaaagacatcattaatgaagcagcacgcgaaggccatgatctgttgttcgctgataacccgtcggcggtgaagaaagagctgaccattctcatccgccacacgattcgttccaaatggcacgaagttctggag

SEQ ID NO: 506 - protein, 346 aa, synthetic construct
  REGION 1..346: note = variant of RNA ligase 2 from Klebsiella phage KP179
MHHHHHHGGSNMFAYYSSLENHYNNKFIEKIRGAGFLMHTVEWVAREKIHGTNFSVIITPTEIVPAKRTGPILEGESFFGHEIIMKKYKDSFVKVQNMLNAMDLVSVQIFGEFAGGGIQKGVDYGDKDFYVFDILSDSGNEKVYWDDYRVESFCTHLGLKLAPLLGRGSFAELSQYPNDFKSIVNRYNELVDTTGLEHANKHVFGPQASSETGVAEGYVLKPVYPIFFNNGTRVAIKCKNSKFSEKATLDKPIKAKVELTENDKRLLEIFSEYVTWNRVSNVLSHIGSVTAKDFGRVMGLTMKDIINEAAREGHDLLFADNPSAVKKELTILIRHTIRSKWHEVLE

SEQ ID NO: 507 - DNA, 1038 bp, synthetic construct
  misc_feature 1..1038: note = variant of RNA ligase 2 from Klebsiella phage KP179
  source 1..1038: mol_type = other DNA
atgcatcaccatcaccatcacggtggcagcaacatgtttgcgtattattcaagtctggaaaaccattacaataataagttcattgagaagatccgtggtgcaggcttcctgatgcacaccgtggaatgggtagctcgcgagaagattcatggaacgaactttagcgttatcattactccgaccgaaatcgtcccagccaaacgcacagggccgatcttggaaggcgagtcgttctttggtcacgaaattatcatgaaaaaatataaagactccttcgtgaaggtgcagaacatgctgaatgccatggatcttgttagcgtgcaaatctttggcgaatttgcgggtggtggcattcagaaaggcgtcgattacggagacaaagatttctatgtgtttgacatcctgtctgatagcgggaacgagaaagtttactgggatgactatcgcgtcgaatcgttttgcaccaccctcggtctgaaattagcgcctctgctgggacgtggtagtttcgctgaactgtcccagtacccaaacgatttcaaaagcattgtgaaccgttataatgaattggttgatacgacgggcctggaacatgccaataaacacgtctttggtccgcaagcgtcttctgaaactggcgtagcagaaggctacgttcttaaacccgtctatccgatcttctttaataatggtacgcgcgtggcgattaaatgcaagaactccaaattttcggagaaagccacgctggacaaaccaattaaagcgaaagtggaactgacggagaacgataaacgtctgctcgaaatctttagcgagtatgttacctggaatcgcgtcagtaacgtactgtcacatattggctcagtgaccgcaaaagattttgggcgtgttatgggtctgacgatgaaagacatcattaatgaagcagcacgcgaaggccatgatctgttgttcgctgataacccgtcggcggtgaagaaagagctgaccattctcatccgcaacacgattcgttccaaatggcacgaagttctggag

SEQ ID NO: 508 - protein, 346 aa, synthetic construct
  REGION 1..346: note = variant of RNA ligase 2 from Klebsiella phage KP179
MHHHHHHGGSNMFAYYSSLENHYNNKFIEKIRGAGFLMHTVEWVAREKIHGTNFSVIITPTEIVPAKRTGPILEGESFFGHEIIMKKYKDSFVKVQNMLNAMDLVSVQIFGEFAGGGIQKGVDYGDKDFYVFDILSDSGNEKVYWDDYRVESFCTTLGLKLAPLLGRGSFAELSQYPNDFKSIVNRYNELVDTTGLEHANKHVFGPQASSETGVAEGYVLKPVYPIFFNNGTRVAIKCKNSKFSEKATLDKPIKAKVELTENDKRLLEIFSEYVTWNRVSNVLSHIGSVTAKDFGRVMGLTMKDIINEAAREGHDLLFADNPSAVKKELTILIRNTIRSKWHEVLE

SEQ ID NO: 509 - DNA, 1038 bp, synthetic construct
  misc_feature 1..1038: note = variant of RNA ligase 2 from Klebsiella phage KP179
  source 1..1038: mol_type = other DNA
atgcatcaccatcaccatcacggtggcagcaacatgtttgcgtattattcaagtctggaaaaccattacaataataagttcattgagaagatccgtggtgcaggcttcctgatgcacaccgtggaatgggtagctcgcgagaagattcatggaacgaactttagcgttatcattactccgaccgaaatcgtcccagccaaacgcacagggccgatcttggaaggcgagtcgttctttggtcacgaaattatcatgaaaaaatataaagactccttcgtgaaggtgcagaacatgctgaatgccatggatcttgttagcgtgcaaatctttggcgaatttgcgggtggtggcattcagaaaggcgtcgattacggagacaaagatttctatgtgtttgacatcctgtctgatagcgggaacgagaaagtttactgggatgactatcgcgtcgaatcgttttgcaccaccctcggtctgaaattagcgcctctgctgggacgtggtagtttcgctgaactgtcccagtacccaaacgatttcaaaagcattgtgaaccgttataatgaattggttgatacgacgggcctggaacatgccaataaacacgtctttggtccgcaagcgtcttctgaaactggcgtagcagaaggctacgttcttaaacccgtctatccgatcttctttaataatggtgggcgcgtggcgattaaatgcaagaactccaaattttcggagaaagccacgctggacaaaccaattaaagcgaaagtggaactgacggagaacgataaacgtctgctcgaaatctttagcgagtatgttacctggaatcgcgtcagtaacgtactgtcacatattggctcagtgaccgcaaaagattttgggcgtgttatgggtctgacgatgaaagacatcattaatgaagcagcacgcgaaggccatgatctgttgttcgctgataacccgtcggcggtgaagaaagagctgaccattctcatccgccacacgattcgttccaaatggcacgaagttctggag

SEQ ID NO: 510 - protein, 346 aa, synthetic construct
  REGION 1..346: note = variant of RNA ligase 2 from Klebsiella phage KP179
MHHHHHHGGSNMFAYYSSLENHYNNKFIEKIRGAGFLMHTVEWVAREKIHGTNFSVIITPTEIVPAKRTGPILEGESFFGHEIIMKKYKDSFVKVQNMLNAMDLVSVQIFGEFAGGGIQKGVDYGDKDFYVFDILSDSGNEKVYWDDYRVESFCTTLGLKLAPLLGRGSFAELSQYPNDFKSIVNRYNELVDTTGLEHANKHVFGPQASSETGVAEGYVLKPVYPIFFNNGGRVAIKCKNSKFSEKATLDKPIKAKVELTENDKRLLEIFSEYVTWNRVSNVLSHIGSVTAKDFGRVMGLTMKDIINEAAREGHDLLFADNPSAVKKELTILIRHTIRSKWHEVLE

SEQ ID NO: 511 - DNA, 1038 bp, synthetic construct
  misc_feature 1..1038: note = variant of RNA ligase 2 from Klebsiella phage KP179
  source 1..1038: mol_type = other DNA
atgcatcaccatcaccatcacggtggcagcaacatgtttgcgtattattcaagtctggaaaaccattacaataataagttcattgagaagatccgtggtgcaggcttcctgatgcacaccgtggaatgggtagctcgcgagaagattcatggaacgaactttagcgttatcattactccgaccgaaatcgtcccagccaaacgcacagggccgatcttggaaggcgagtcgttctttggtcacgaaattatcatgaaaaaatataaagactccttcgtgaaggtgcagaacatgctgaatgccatggatcttgttagcgtgcaaatctttggcgaatttgcgggtggtggcattcagaaaggcgtcgattacggagacaaagatttctatgtgtttgacatcctgtctgatagcgggaacgagaaagtttactgggatgactatcgcgtcgaatcgttttgcacccacctcggtctgaaattagcgcctctgctgggacgtggtagtttcgctgaactgtcccagtacccaaacgatttcaaaagcattgtgaaccgttataatgaattggttgatacgacgggcctggaacatgccaataaacacgtctttggtccgcaagcgtcttctgaaactggcgtagcagaaggctacgttcttaaacccgtctatccgatcttctttaataatggtacgcgcgtggcgattaaatgcaagaactccaaattttcggagaaagccacgctggacaaaccaattaaagcgaaagtggaactgacggagaacgataaacgtctgctcgaaatctttagcgagtatgttacctggaatcgcgtcagtaacgtactgtcacatattggctcagtgaccgcaaaagattttgggcgtgttatgggtctgacgatgaaagacatcattaatgaagcagcacgcgaaggccatgatctgttgttcgctgataacccgtcggcggtgaagaaagagctgaccattctcatccgcaacacgattcgttccaaatggcacgaagttctggag

SEQ ID NO: 512 - protein, 346 aa, synthetic construct
  REGION 1..346: note = variant of RNA ligase 2 from Klebsiella phage KP179
MHHHHHHGGSNMFAYYSSLENHYNNKFIEKIRGAGFLMHTVEWVAREKIHGTNFSVIITPTEIVPAKRTGPILEGESFFGHEIIMKKYKDSFVKVQNMLNAMDLVSVQIFGEFAGGGIQKGVDYGDKDFYVFDILSDSGNEKVYWDDYRVESFCTHLGLKLAPLLGRGSFAELSQYPNDFKSIVNRYNELVDTTGLEHANKHVFGPQASSETGVAEGYVLKPVYPIFFNNGTRVAIKCKNSKFSEKATLDKPIKAKVELTENDKRLLEIFSEYVTWNRVSNVLSHIGSVTAKDFGRVMGLTMKDIINEAAREGHDLLFADNPSAVKKELTILIRNTIRSKWHEVLE

SEQ ID NO: 513 - DNA, 1038 bp, synthetic construct
  misc_feature 1..1038: note = variant of RNA ligase 2 from Klebsiella phage KP179
  source 1..1038: mol_type = other DNA
atgcatcaccatcaccatcacggtggcagcaacatgtttgcgtattattcaagtctggaaaaccattacaataataagttcattgagaagatccgtggtgcaggcttcctgatgcacaccgtggaatgggtagctcgcgagaagattcatggaacgaactttagcgttatcattactccgaccgaaatcgtcccagccaaacgcacagggccgatcttggaaggcgagtcgttctttggtcacgaaattatcatgaaaaaatataaagactccttcgtgaaggtgcagaacatgctgaatgccatggatcttgttagcgtgcaaatctttggcgaatttgcgggtggtggcattcagaaaggcgtcgattacggagacaaagatttctatgtgtttgacatcctgtctgatagcgggaacgagaaagtttactgggatgactatcgcgtcgaatcgttttgcacccacctcggtctgaaattagcgcctctgctgggacgtggtagtttcgctgaactgtcccagtacccaaacgatttcaaaagcattgtgaaccgttataatgaattggttgatacgacgggcctggaacatgccaataaacacgtctttggtccgcaagcgtcttctgaaactggcgtagcagaaggctacgttcttaaacccgtctatccgatcttctttaataatggtacgcgcgtggcgattaaatgcaagaactccaaattttcggagaaagccaagctggacaaaccaattaaagcgaaagtggaactgacggagaacgataaacgtctgctcgaaatctttagcgagtatgttacctggaatcgcgtcagtaacgtactgtcacatattggctcagtgaccgcaaaagattttgggcgtgttatgggtctgacgatgaaagacatcattaatgaagcagcacgcgaaggccatgatctgttgttcgctgataacccgtcggcggtgaagaaagagctgaccattctcatccgcaacacgattcgttccaaatggcacgaagttctggag

SEQ ID NO: 514 - protein, 346 aa, synthetic construct
  REGION 1..346: note = variant of RNA ligase 2 from Klebsiella phage KP179
MHHHHHHGGSNMFAYYSSLENHYNNKFIEKIRGAGFLMHTVEWVAREKIHGTNFSVIITPTEIVPAKRTGPILEGESFFGHEIIMKKYKDSFVKVQNMLNAMDLVSVQIFGEFAGGGIQKGVDYGDKDFYVFDILSDSGNEKVYWDDYRVESFCTHLGLKLAPLLGRGSFAELSQYPNDFKSIVNRYNELVDTTGLEHANKHVFGPQASSETGVAEGYVLKPVYPIFFNNGTRVAIKCKNSKFSEKAKLDKPIKAKVELTENDKRLLEIFSEYVTWNRVSNVLSHIGSVTAKDFGRVMGLTMKDIINEAAREGHDLLFADNPSAVKKELTILIRNTIRSKWHEVLE

SEQ ID NO: 515 - DNA, 1038 bp, synthetic construct
  misc_feature 1..1038: note = variant of RNA ligase 2 from Klebsiella phage KP179
  source 1..1038: mol_type = other DNA
atgcatcaccatcaccatcacggtggcagcaacacgtttgcgtattattcaagtctggaaaaccattacaatatgaagttcattgagaagatccgtggtgcaggcttcctgcgtcacaccgtggaatgggtagctcgcgagaagattcatggaacgaactttagcgttatcattactccgaccgaaatcgtcccagccaaacgcacagggccgatcttggaaggcgagtcgttctttggtcacgaaattatcatgaaaaaatataaagactccttcgtgaaggtgcagaacatgctgaatgccatggatcttgttagcgtgcaaatctttggcgaatttgcgggtggtggcattcagaaaggcgtcgattacggagacaaagatttctatgtgtttgacatcctgtctgatagcgggaacgagaaagtttactgggatgactatcgcgtcgaatcgttttgcaccacgctcggtctgaaattagcgcctctgctgggacgtggtagtttcgctgaactgtcccagtacccaaacgatttcaaaagcattgtgaaccgttataatgaattggttgatacgacgggcctggaacatgccaataaacacgtctttggtccgcaagcgtcttctgaaactggcgtagcagaaggctacgttcttaaacccgtctatccgatcttctttaataccggtacgcgcgtggcgattaaatgcaagaactccaaattttcggagaaagccaagctggactcgccaattaaggcggcggtggaactgacggagaacgataaacgtctgctcgaaatctttagcgagtatgttacctggaatcgcgtcagtaacgtactgtcacatattggctcagtgaccgcaaaagattttgggcgtgttatgggtctgacgatgaaagacatcattaatgaagcagcacgcgaaggccatgatctgttgttcgctgataacccgtcggcggtgaagaaagagctgaccattctcatccagaacacgattcgttccaaatggcacgaagttctggag

SEQ ID NO: 516 - protein, 346 aa, synthetic construct
  REGION 1..346: note = variant of RNA ligase 2 from Klebsiella phage KP179
MHHHHHHGGSNTFAYYSSLENHYNMKFIEKIRGAGFLRHTVEWVAREKIHGTNFSVIITPTEIVPAKRTGPILEGESFFGHEIIMKKYKDSFVKVQNMLNAMDLVSVQIFGEFAGGGIQKGVDYGDKDFYVFDILSDSGNEKVYWDDYRVESFCTTLGLKLAPLLGRGSFAELSQYPNDFKSIVNRYNELVDTTGLEHANKHVFGPQASSETGVAEGYVLKPVYPIFFNTGTRVAIKCKNSKFSEKAKLDSPIKAAVELTENDKRLLEIFSEYVTWNRVSNVLSHIGSVTAKDFGRVMGLTMKDIINEAAREGHDLLFADNPSAVKKELTILIQNTIRSKWHEVLE

SEQ ID NO: 517 - DNA, 1038 bp, synthetic construct
  misc_feature 1..1038: note = variant of RNA ligase 2 from Klebsiella phage KP179
  source 1..1038: mol_type = other DNA
atgcatcaccatcaccatcacggtggcagcaacgtgtttgcgtattattcaagtctggaaaaccattacaataataagttcattgagaagatccgtggtgcaggcttcctgatgcacaccgtggaatgggtagctcgcgagaagattcatggaacgaactttagcgttatcattactccgaccgaaatcgtcccagccaaacgcacagggccgatcttggaaggcgagtcgttctttggtcacgaaattatcatgaaaaaatataaagactccttcgtgaaggtgcagaacatgctgaatgccatggatcttgttagcgtgcaaatctttggcgaatttgcgggtggtggcattcagaaaggcgtcgattacggagacaaagatttctatgtgtttgacatcctgtctgatagcgggaacgagaaagtttactgggatgactatcgcgtcgaatcgttttgcaccacgctcggtctgaaattagcgcctctgctgggacgtggtagtttcgctgaactgtcccagtacccaaacgatttcaaaagcattgtgaaccgttataatgaattggttgatacgacgggcctggaacatgccaataaacacgtctttggtccgcaagcgtcttctgaaactggcgtagcagaaggctacgttcttaaacccgtctatccgatcttctttaataacggtacgcgcgtggcgattaaatgcaagaactccaaattttcggagaaagccaagctggactcgccaattgtggcggcggtggaactgacggagaacgataaacgtctgctcgaaatctttagcgagtatgttacctggaatcgcgtcagtaacgtactgtcacatattggctcagtgaccgcaaaagattttgggcgtgttatgggtctgacgatgaaagacatcattaatgaagcagcacgcgaaggccatgatctgttgttcgctgataacccgtcggcggtgaagaaagagctgaccattctcatccagaacacgattcgttccaaatggcacgaagttctggag

SEQ ID NO: 518 - protein, 346 aa, synthetic construct
  REGION 1..346: note = variant of RNA ligase 2 from Klebsiella phage KP179
MHHHHHHGGSNVFAYYSSLENHYNNKFIEKIRGAGFLMHTVEWVAREKIHGTNFSVIITPTEIVPAKRTGPILEGESFFGHEIIMKKYKDSFVKVQNMLNAMDLVSVQIFGEFAGGGIQKGVDYGDKDFYVFDILSDSGNEKVYWDDYRVESFCTTLGLKLAPLLGRGSFAELSQYPNDFKSIVNRYNELVDTTGLEHANKHVFGPQASSETGVAEGYVLKPVYPIFFNNGTRVAIKCKNSKFSEKAKLDSPIVAAVELTENDKRLLEIFSEYVTWNRVSNVLSHIGSVTAKDFGRVMGLTMKDIINEAAREGHDLLFADNPSAVKKELTILIQNTIRSKWHEVLE

SEQ ID NO: 519 - DNA, 1038 bp, synthetic construct
  misc_feature 1..1038: note = variant of RNA ligase 2 from Klebsiella phage KP179
  source 1..1038: mol_type = other DNA
atgcatcaccatcaccatcacggtggcagcaacatgtttgcgtattattcaagtctggaaaaccattacaataataagttcattgagaagatccgtggtgcaggcttcctgatgcacaccgtggaatgggtagctcgcgagaagattcatggaacgaactttagcgttatcattactccgaccgaaatcgtcccagccaaacgcacagggccgatcttggaaggcgagtcgttctttggtcacgaaattatcatgaaaaaatataaagactccttcgtgaaggtgcagaacatgctgaatgccatggatcttgttagcgtgcaaatctttggcgaatttgcgggtggtggcattcagaaaggcgtcgattacggagacaaagatttctatgtgtttgacatcctgtctgatagcgggaacgagaaagtttactgggatgactatcgcgtcgaatcgttttgcacccagctcggtctgaaattagcgcctctgctgggacgtggtagtttcgctgaactgtcccagtacccaaacgatttcaaaagcattgtgaaccgttataatgaattggttgatacgacgggcctggaacatgccaataaacacgtctttggtccgcaagcgtcttctgaaactggcgtagcagaaggctacgttcttaaacccgtctatccgatcttctttaataatggtacgcgcgtggcgattaaatgcaagaactccaaattttcggagaaagccacgcgcgacaaaccaattaaagcgaaagtggaactgacggagaacgataaacgtctgctcgaaatctttagcgagtatgttacctggaatcgcgtcagtaacgtactgtcacatattggctcagtgaccgcaaaagattttgggcgtgttatgggtctgacgatgaaagacatcattaatgaagcagcacgcgaaggccatgatctgttgttcgctgataacccgtcggcggtgaagaaagagctgaccattctcatccgccacacgattcgttccaaatggcacgaagttctggag

SEQ ID NO: 520 - protein, 346 aa, synthetic construct
  REGION 1..346: note = variant of RNA ligase 2 from Klebsiella phage KP179
MHHHHHHGGSNMFAYYSSLENHYNNKFIEKIRGAGFLMHTVEWVAREKIHGTNFSVIITPTEIVPAKRTGPILEGESFFGHEIIMKKYKDSFVKVQNMLNAMDLVSVQIFGEFAGGGIQKGVDYGDKDFYVFDILSDSGNEKVYWDDYRVESFCTQLGLKLAPLLGRGSFAELSQYPNDFKSIVNRYNELVDTTGLEHANKHVFGPQASSETGVAEGYVLKPVYPIFFNNGTRVAIKCKNSKFSEKATRDKPIKAKVELTENDKRLLEIFSEYVTWNRVSNVLSHIGSVTAKDFGRVMGLTMKDIINEAAREGHDLLFADNPSAVKKELTILIRHTIRSKWHEVLE

SEQ ID NO: 521 - DNA, 1038 bp, synthetic construct
  misc_feature 1..1038: note = variant of RNA ligase 2 from Klebsiella phage KP179
  source 1..1038: mol_type = other DNA
atgcatcaccatcaccatcacggtggcagcaacatgtttgcgtattattcaagtctggaaaaccattacaataataagttcattgagaagatccgtggtgcaggcttcctgatgcacaccgtggaatgggtagctcgcgagaagattcatggaacgaactttagcgttatcattactccgaccgaaatcgtcccagccaaacgcacagggccgatcttggaaggcgagtcgttctttggtcacgaaattatcatgaaaaaatataaagactccttcgtgaaggtgcagaacatgctgaatgccatggatcttgttagcgtgcaaatctttggcgaatttgcgggtggtggcattcagaaaggcgtcgattacggagacaaagatttctatgtgtttgacatcctgtctgatagcgggaacgagaaagtttactgggatgactatcgcgtcgaatcgttttgcaccaccctcggtctgaaattagcgcctctgctgggacgtggtagtttcgctgaactgtcccagtacccaaacgatttcaaaagcattgtgaaccgttataatgaattggttgatacgacgggcctggaacatgccaataaacacgtctttggtccgcaagcgtcttctgaaactggcgtagcagaaggctacgttcttaaacccgtctatccgatcttctttaataatggtacgcgcgtggcgattaaatgcaagaactccaaattttcggagaaagccaagctggacaaaccaattaaagcgaaagtggaactgacggagaacgataaacgtctgctcgaaatctttagcgagtatgttacctggaatcgcgtcagtaacgtactgtcacatattggctcagtgaccgcaaaagattttgggcgtgttatgggtctgacgatgaaagacatcattaatgaagcagcacgcgaaggccatgatctgttgttcgctgataacccgtcggcggtgaagaaagagctgcgtattctcatccaacacacgattcgttccaaatggcacgaagttctggag

SEQ ID NO: 522 - protein, 346 aa, synthetic construct
  REGION 1..346: note = variant of RNA ligase 2 from Klebsiella phage KP179
MHHHHHHGGSNMFAYYSSLENHYNNKFIEKIRGAGFLMHTVEWVAREKIHGTNFSVIITPTEIVPAKRTGPILEGESFFGHEIIMKKYKDSFVKVQNMLNAMDLVSVQIFGEFAGGGIQKGVDYGDKDFYVFDILSDSGNEKVYWDDYRVESFCTTLGLKLAPLLGRGSFAELSQYPNDFKSIVNRYNELVDTTGLEHANKHVFGPQASSETGVAEGYVLKPVYPIFFNNGTRVAIKCKNSKFSEKAKLDKPIKAKVELTENDKRLLEIFSEYVTWNRVSNVLSHIGSVTAKDFGRVMGLTMKDIINEAAREGHDLLFADNPSAVKKELRILIQHTIRSKWHEVLE

SEQ ID NO: 523 - DNA, 1038 bp, synthetic construct
  misc_feature 1..1038: note = variant of RNA ligase 2 from Klebsiella phage KP179
  source 1..1038: mol_type = other DNA
atgcatcaccatcaccatcacggtggcagcaacatgtttgcgtattattcaagtctggaaaaccattacaataataagttcattgagaagatccgtggtgcaggcttcctgatgcacaccgtggaatgggtagctcgcgagaagattcatggaacgaactttagcgttatcattactccgaccgaaatcgtcccagccaaacgcacagggccgatcttggaaggcgagtcgttctttggtcacgaaattatcatgaaaaaatataaagactccttcgtgaaggtgcagaacatgctgaatgccatggatcttgttagcgtgcaaatctttggcgaatttgcgggtggtggcattcagaaaggcgtcgattacggagacaaagatttctatgtgtttgacatcctgtctgatagcgggaacgagaaagtttactgggatgactatcgcgtcgaatcgttttgcaccaccctcggtctgaaattagcgcctctgctgggacgtggtagtttcgctgaactgtcccagtacccaaacgatttcaaaagcattgtgaaccgttataatgaattggttgatacgacgggcctggaacatgccaataaacacgtctttggtccgcaagcgtcttctgaaactggcgtagcagaaggctacgttcttaaacccgtctatccgatcttctttaataatggtacgcgcgtggcgattaaatgcaagaactccaaattttcggagaaagccacgctggacaaaccaattaaagcgaaaggcgaactgacggagaacgataaacgtctgctcgaaatctttagcgagtatgttacctggaatcgcgtcagtaacgtactgtcacatattggctcagtgaccgcaaaagattttgggcgtgttatgggtctgacgatgaaagacatcattaatgaagcagcacgcgaaggccatgatctgttgttcgctgataacccgtcggcggtgaagaaagagctgaccattctcatccgccacacgattcgttccaaatggcacgaagttctggag

SEQ ID NO: 524 - protein, 346 aa, synthetic construct
  REGION 1..346: note = variant of RNA ligase 2 from Klebsiella phage KP179
MHHHHHHGGSNMFAYYSSLENHYNNKFIEKIRGAGFLMHTVEWVAREKIHGTNFSVIITPTEIVPAKRTGPILEGESFFGHEIIMKKYKDSFVKVQNMLNAMDLVSVQIFGEFAGGGIQKGVDYGDKDFYVFDILSDSGNEKVYWDDYRVESFCTTLGLKLAPLLGRGSFAELSQYPNDFKSIVNRYNELVDTTGLEHANKHVFGPQASSETGVAEGYVLKPVYPIFFNNGTRVAIKCKNSKFSEKATLDKPIKAKGELTENDKRLLEIFSEYVTWNRVSNVLSHIGSVTAKDFGRVMGLTMKDIINEAAREGHDLLFADNPSAVKKELTILIRHTIRSKWHEVLE

SEQ ID NO: 525 - DNA, 1038 bp, synthetic construct
  misc_feature 1..1038: note = variant of RNA ligase 2 from Klebsiella phage KP179
  source 1..1038: mol_type = other DNA
atgcatcaccatcaccatcacggtggcagcaacatgtttgcgtattattcaagtctggaaaaccattacaataataagttcattgagaagatccgtggtgcaggcttcctgatgcacaccgtggaatgggtagctcgcgagaagattcatggaacgaactttagcgttatcattactccgaccgaaatcgtcccagccaaacgcacagggccgatcttggaaggcgagtcgttctttggtcacgaaattatcatgaaaaaatataaagactccttcgtgaaggtgcagaacatgctgaatgccatggatcttgttagcgtgcaaatctttggcgaatttgcgggtggtggcattcagaaaggcgtcgattacggagacaaagatttctatgtgtttgacatcctgtctgatagcgggaacgagaaagtttactgggatgactatcgcgtcgaatcgttttgcaccaccctcggtctgaaattagcgcctctgctgggacgtggtagtttcgctgaactgtcccagtacccaaacgatttcaaaagcattgtgaaccgttataatgaattggttgatacgacgggcctggaacatgccaataaacacgtctttggtccgcaagcgtcttctgaaactggcgtagcagaaggctacgttcttaaacccgtctatccgatcttctttaataatggtgggcgcgtggcgattaaatgcaagaactccaaattttcggagaaagccacgctggacaaaccaattaaagcgaaagtggaactgacggagaacgataaacgtctgctcgaaatctttagcgagtatgttacctggaatcgcgtcagtaacgtactgtcacatattggctcagtgaccgcaaaagattttgggcgtgttatgggtctgacgatgaaagacatcattaatgaagcagcacgcgaaggccatgatctgttgttcgctgataacccgtcggcggtgaagaaagagctgaccattctcatccgcaacacgattcgttccaaatggcacgaagttctggag

SEQ ID NO: 526 - protein, 346 aa, synthetic construct
  REGION 1..346: note = variant of RNA ligase 2 from Klebsiella phage KP179
MHHHHHHGGSNMFAYYSSLENHYNNKFIEKIRGAGFLMHTVEWVAREKIHGTNFSVIITPTEIVPAKRTGPILEGESFFGHEIIMKKYKDSFVKVQNMLNAMDLVSVQIFGEFAGGGIQKGVDYGDKDFYVFDILSDSGNEKVYWDDYRVESFCTTLGLKLAPLLGRGSFAELSQYPNDFKSIVNRYNELVDTTGLEHANKHVFGPQASSETGVAEGYVLKPVYPIFFNNGGRVAIKCKNSKFSEKATLDKPIKAKVELTENDKRLLEIFSEYVTWNRVSNVLSHIGSVTAKDFGRVMGLTMKDIINEAAREGHDLLFADNPSAVKKELTILIRNTIRSKWHEVLE

SEQ ID NO: 527 - DNA, 1038 bp, synthetic construct
  misc_feature 1..1038: note = variant of RNA ligase 2 from Klebsiella phage KP179
  source 1..1038: mol_type = other DNA
atgcatcaccatcaccatcacggtggcagcaacatgtttgcgtattattcaagtctggaaaaccattacaataataagttcattgagaagatccgtggtgcaggcttcctgatgcacaccgtggaatgggtagctcgcgagaagattcatggaacgaactttagcgttatcattactccgaccgaaatcgtcccagccaaacgcacagggccgatcttggaaggcgagtcgttctttggtcacgaaattatcatgaaaaaatataaagactccttcgtgaaggtgcagaacatgctgaatgccatggatcttgttagcgtgcaaatctttggcgaatttgcgggtggtggcattcagaaaggcgtcgattacggagacaaagatttctatgtgtttgacatcctgtctgatagcgggaacgagaaagtttactgggatgactatcgcgtcgaatcgttttgcacccagctcggtctgaaattagcgcctctgctgggacgtggtagtttcgctgaactgtcccagtacccaaacgatttcaaaagcattgtgaaccgttataatgaattggttgatacgacgggcctggaacatgccaataaacacgtctttggtccgcaagcgtcttctgaaactggcgtagcagaaggctacgttcttaaacccgtctatccgatcttctttaataatggtgggcgcgtggcgattaaatgcaagaactccaaattttcggagaaagccacgctggacaaaccaattaaagcgaaagtggaactgacggagaacgataaacgtctgctcgaaatctttagcgagtatgttacctggaatcgcgtcagtaacgtactgtcacatattggctcagtgaccgcaaaagattttgggcgtgttatgggtctgacgatgaaagacatcattaatgaagcagcacgcgaaggccatgatctgttgttcgctgataacccgtcggcggtgaagaaagagctgaccattctcatccgccacacgattcgttccaaatggcacgaagttctggag

SEQ ID NO: 528 - protein, 346 aa, synthetic construct
  REGION 1..346: note = variant of RNA ligase 2 from Klebsiella phage KP179
MHHHHHHGGSNMFAYYSSLENHYNNKFIEKIRGAGFLMHTVEWVAREKIHGTNFSVIITPTEIVPAKRTGPILEGESFFGHEIIMKKYKDSFVKVQNMLNAMDLVSVQIFGEFAGGGIQKGVDYGDKDFYVFDILSDSGNEKVYWDDYRVESFCTQLGLKLAPLLGRGSFAELSQYPNDFKSIVNRYNELVDTTGLEHANKHVFGPQASSETGVAEGYVLKPVYPIFFNNGGRVAIKCKNSKFSEKATLDKPIKAKVELTENDKRLLEIFSEYVTWNRVSNVLSHIGSVTAKDFGRVMGLTMKDIINEAAREGHDLLFADNPSAVKKELTILIRHTIRSKWHEVLE

SEQ ID NO: 529 - DNA, 1038 bp, synthetic construct
  misc_feature 1..1038: note = variant of RNA ligase 2 from Klebsiella phage KP179
  source 1..1038: mol_type = other DNA
atgcatcaccatcaccatcacggtggcagcaacatgtttgcgtattattcaagtctggaaaaccattacaataataagttcattgagaagatccgtggtgcaggcttcctgatgcacaccgtggaatgggtagctcgcgagaagattcatggaacgaactttagcgttatcattactccgaccgaaatcgtcccagccaaacgcacagggccgatcttggaaggcgagtcgttctttggtcacgaaattatcatgaaaaaatataaagactccttcgtgaaggtgcagaacatgctgaatgccatggatcttgttagcgtgcaaatctttggcgaatttgcgggtggtggcattcagaaaggcgtcgattacggagacaaagatttctatgtgtttgacatcctgtctgatagcgggaacgagaaagtttactgggatgactatcgcgtcgaatcgttttgcaccaccctcggtctgaaattagcgcctctgctgggacgtggtagtttcgctgaactgtcccagtacccaaacgatttcaaaagcattgtgaaccgttataatgaattggttgatacgacgggcctggaacatgccaataaacacgtctttggtccgcaagcgtcttctgaaactggcgtagcagaaggctacgttcttaaacccgtctatccgatcttctttaataatggtgggcgcgtggcgattaaatgcaagaactccaaattttcggagaaagccaagctggacaaaccaattaaagcgaaaggcgaactgacggagaacgataaacgtctgctcgaaatctttagcgagtatgttacctggaatcgcgtcagtaacgtactgtcacatattggctcagtgaccgcaaaagattttgggcgtgttatgggtctgacgatgaaagacatcattaatgaagcagcacgcgaaggccatgatctgttgttcgctgataacccgtcggcggtgaagaaagagctgcgtattctcatccgcaacacgattcgttccaaatggcacgaagttctggag

SEQ ID NO: 530 - protein, 346 aa, synthetic construct
  REGION 1..346: note = variant of RNA ligase 2 from Klebsiella phage KP179
MHHHHHHGGSNMFAYYSSLENHYNNKFIEKIRGAGFLMHTVEWVAREKIHGTNFSVIITPTEIVPAKRTGPILEGESFFGHEIIMKKYKDSFVKVQNMLNAMDLVSVQIFGEFAGGGIQKGVDYGDKDFYVFDILSDSGNEKVYWDDYRVESFCTTLGLKLAPLLGRGSFAELSQYPNDFKSIVNRYNELVDTTGLEHANKHVFGPQASSETGVAEGYVLKPVYPIFFNNGGRVAIKCKNSKFSEKAKLDKPIKAKGELTENDKRLLEIFSEYVTWNRVSNVLSHIGSVTAKDFGRVMGLTMKDIINEAAREGHDLLFADNPSAVKKELRILIRNTIRSKWHEVLE

SEQ ID NO: 531 - DNA, 1038 bp, synthetic construct
  misc_feature 1..1038: note = variant of RNA ligase 2 from Klebsiella phage KP179
  source 1..1038: mol_type = other DNA
atgcatcaccatcaccatcacggtggcagcaacatgtttgcgtattattcaagtctggaaaaccattacaataataagttcattgagaagatccgtggtgcaggcttcctgatgcacaccgtggaatgggtagctcgcgagaagattcatggaacgaactttagcgttatcattactccgaccgaaatcgtcccagccaaacgcacagggccgatcttggaaggcgagtcgttctttggtcacgaaattatcatgaaaaaatataaagactccttcgtgaaggtgcagaacatgctgaatgccatggatcttgttagcgtgcaaatctttggcgaatttgcgggtggtggcattcagaaaggcgtcgattacggagacaaagatttctatgtgtttgacatcctgtctgatagcgggaacgagaaagtttactgggatgactatcgcgtcgaatcgttttgcacccagctcggtctgaaattagcgcctctgctgggacgtggtagtttcgctgaactgtcccagtacccaaacgatttcaaaagcattgtgaaccgttataatgaattggttgatacgacgggcctggaacatgccaataaacacgtctttggtccgcaagcgtcttctgaaactggcgtagcagaaggctacgttcttaaacccgtctatccgatcttctttaataatggtacgcgcgtggcgattaaatgcaagaactccaaattttcggagaaagccacgctggacaaaccaattaaagcgaaagtggaactgacggagaacgataaacgtctgctcgaaatctttagcgagtatgttacctggaatcgcgtcagtaacgtactgtcacatattggctcagtgaccacaaaagattttgggcgtgttatgggtctgacgatgaaagacatcattaatgaagcagcacgcgaaggccatgatctgttgttcgctgataacccgtcggcggtgaagaaagagctgaccattctcatccgccacacgattcgttccaaatggcacgaagttctggag

SEQ ID NO: 532 - protein, 346 aa, synthetic construct
  REGION 1..346: note = variant of RNA ligase 2 from Klebsiella phage KP179
MHHHHHHGGSNMFAYYSSLENHYNNKFIEKIRGAGFLMHTVEWVAREKIHGTNFSVIITPTEIVPAKRTGPILEGESFFGHEIIMKKYKDSFVKVQNMLNAMDLVSVQIFGEFAGGGIQKGVDYGDKDFYVFDILSDSGNEKVYWDDYRVESFCTQLGLKLAPLLGRGSFAELSQYPNDFKSIVNRYNELVDTTGLEHANKHVFGPQASSETGVAEGYVLKPVYPIFFNNGTRVAIKCKNSKFSEKATLDKPIKAKVELTENDKRLLEIFSEYVTWNRVSNVLSHIGSVTTKDFGRVMGLTMKDIINEAAREGHDLLFADNPSAVKKELTILIRHTIRSKWHEVLE

SEQ ID NO: 533 - DNA, 1038 bp, synthetic construct
  misc_feature 1..1038: note = variant of RNA ligase 2 from Klebsiella phage KP179
  source 1..1038: mol_type = other DNA
atgcatcaccatcaccatcacggtggcagcaacatgtttgcgtattattcaagtctggaaaaccattacaataataagttcattgagaagatccgtggtgcaggcttcctgatgcacaccgtggaatgggtagctcgcgagaagattcatggaacgaactttagcgttatcattactccgaccgaaatcgtcccagccaaacgcacagggccgatcttggaaggcgagtcgttctttggtcacgaaattatcatgaaaaaatataaagactccttcgtgaaggtgcagaacatgctgaatgccatggatcttgttagcgtgcaaatctttggcgaatttgcgggtggtggcattcagaaaggcgtcgattacggagacaaagatttctatgtgtttgacatcctgtctgatagcgggaacgagaaagtttactgggatgactatcgcgtcgaatcgttttgcacccagctcggtctgaaattagcgcctctgctgggacgtggtagtttcgctgaactgtcccagtacccaaacgatttcaaaagcattgtgaaccgttataatgaattggttgatacgacgggcctggaacatgccaataaacacgtctttggtccgcaagcgtcttctgaaactggcgtagcagaaggctacgttcttaaacccgtctatccgatcttctttaataatggtgggcgcgtggcgattaaatgcaagaactccaaattttcggagaaagccacgctggacaaaccaattaaagcgaaaggcccactgacggagaacgataaacgtctgctcgaaatctttagcgagtatgttacctggaatcgcgtcagtaacgtactgtcacatattggctcagtgaccgcaaaagattttgggcgtgttatgggtctgacgatgaaagacatcattaatgaagcagcacgcgaaggccatgatctgttgttcgctgataacccgtcggcggtgaagaaagagctgaccattctcatccgcaacacgattcgttccaaatggcacgaagttctggag

SEQ ID NO: 534 - protein, 346 aa, synthetic construct
  REGION 1..346: note = variant of RNA ligase 2 from Klebsiella phage KP179
MHHHHHHGGSNMFAYYSSLENHYNNKFIEKIRGAGFLMHTVEWVAREKIHGTNFSVIITPTEIVPAKRTGPILEGESFFGHEIIMKKYKDSFVKVQNMLNAMDLVSVQIFGEFAGGGIQKGVDYGDKDFYVFDILSDSGNEKVYWDDYRVESFCTQLGLKLAPLLGRGSFAELSQYPNDFKSIVNRYNELVDTTGLEHANKHVFGPQASSETGVAEGYVLKPVYPIFFNNGGRVAIKCKNSKFSEKATLDKPIKAKGPLTENDKRLLEIFSEYVTWNRVSNVLSHIGSVTAKDFGRVMGLTMKDIINEAAREGHDLLFADNPSAVKKELTILIRNTIRSKWHEVLE

SEQ ID NO: 535 - DNA, 1038 bp, synthetic construct
  misc_feature 1..1038: note = variant of RNA ligase 2 from Klebsiella phage KP179
  source 1..1038: mol_type = other DNA
atgcatcaccatcaccatcacggtggcagcaacgtgtttgcgtattattcaagtctggaaaaccattacaataataagttcattgagaagatccgtggtgcaggcttcctgcgtcacaccgtggaatgggtagctcgcgagaagattcatggaacgaactttagcgttatcattactccgaccgaaatcgtcccagccaaacgcacagggccgatcttggaaggcgagtcgttctttggtcacgaaattatcatgaaaaaatataaagactccttcgtgaaggtgcagaacatgctgaatgccatggatcttgttagcgtgcaaatctttggcgaatttgcgggtggtggcattcagaaaggcgtcgattacggagacaaagatttctatgtgtttgacatcctgtctgatagcgggaacgagaaagtttactgggatgactatcgcgtcgaatcgttttgcaccacgctcggtctgaaattagcgcctctgctgggacgtggtagtttcgctgaactgtcccagtacccaaacgatttcaaaagcattgtgaaccgttataatgaattggttgatacgacgggcctggaacatgccaataaacacgtctttggtccgcaagcgtcttctgaaactggcgtagcagaaggctacgttcttaaacccgtctatccgatcttctttaataatggtacgcgcgtggcgattaaatgcaagaactccaaattttcggagaaagccaagctggacacgccaattctggcgaaggtggaactgacggagaacgataaacgtctgctcgaaatctttagcgagtatgttacctggaatcgcgtcagtaacgtactgtcacatattggctcagtgaccgcaaaagattttgggcgtgttatgggtctgacgatgaaagacatcattaatgaagcagcacgcgaaggccatgatctgttgttcgctgataacccgtcggcggtgaagaaagagctgaccattctcatccagaacacgattcgttccaaatggcacgaagttctggag

SEQ ID NO: 536 - protein, 346 aa, synthetic construct
  REGION 1..346: note = variant of RNA ligase 2 from Klebsiella phage KP179
MHHHHHHGGSNVFAYYSSLENHYNNKFIEKIRGAGFLRHTVEWVAREKIHGTNFSVIITPTEIVPAKRTGPILEGESFFGHEIIMKKYKDSFVKVQNMLNAMDLVSVQIFGEFAGGGIQKGVDYGDKDFYVFDILSDSGNEKVYWDDYRVESFCTTLGLKLAPLLGRGSFAELSQYPNDFKSIVNRYNELVDTTGLEHANKHVFGPQASSETGVAEGYVLKPVYPIFFNNGTRVAIKCKNSKFSEKAKLDTPILAKVELTENDKRLLEIFSEYVTWNRVSNVLSHIGSVTAKDFGRVMGLTMKDIINEAAREGHDLLFADNPSAVKKELTILIQNTIRSKWHEVLE

SEQ ID NO: 537 - DNA, 1038 bp, synthetic construct
  misc_feature 1..1038: note = variant of RNA ligase 2 from Klebsiella phage KP179
  source 1..1038: mol_type = other DNA
atgcatcaccatcaccatcacggtggcagcaacacgtttgcgtattattcaagtctggaaaaccattacaatctgaagttcattgagaagatccgtggtgcaggcttcctgcgtcacaccgtggaatgggtagctcgcgagaagattcatggaacgaactttagcgttatcattactccgaccgaaatcgtcccagccaaacgcacagggccgatcttggaaggcgagtcgttctttggtcacgaaattatcatgaaaaaatataaagactccttcgtgaaggtgcagaacatgctgaatgccatggatcttgttagcgtgcaaatctttggcgaatttgcgggtggtggcattcagaaaggcgtcgattacggagacaaagatttctatgtgtttgacatcctgtctgatagcgggaacgagaaagtttactgggatgactatcgcgtcgaatcgttttgcaccacgctcggtctgaaattagcgcctctgctgggacgtggtagtttcgctgaactgtcccagtacccaaacgatttcaaaagcattgtgaaccgttataatgaattggttgatacgacgggcctggaacatgccaataaacacgtctttggtccgcaagcgtcttctgaaactggcgtagcagaaggctacgttcttaaacccgtctatccgatcttctttaataacggtacgcgcgtggcgattaaatgcaagaactccaaattttcggagaaagccaagctggacaaaccaattaaagcgaaagtggaactgacggagaacgataaacgtctgctcgaaatctttagcgagtatgttacctggaatcgcgtcagtaacgtactgtcacatattggctcagtgaccgcaaaagattttgggcgtgttatgggtctgacgatgaaagacatcattaatgaagcagcacgcgaaggccatgatctgttgttcgctgataacccgtcggcggtgaagaaagagctgaccattctcatccagaacacgattcgttccaaatggcacgaagttctggag

SEQ ID NO: 538 - protein, 346 aa, synthetic construct
  REGION 1..346: note = variant of RNA ligase 2 from Klebsiella phage KP179
MHHHHHHGGSNTFAYYSSLENHYNLKFIEKIRGAGFLRHTVEWVAREKIHGTNFSVIITPTEIVPAKRTGPILEGESFFGHEIIMKKYKDSFVKVQNMLNAMDLVSVQIFGEFAGGGIQKGVDYGDKDFYVFDILSDSGNEKVYWDDYRVESFCTTLGLKLAPLLGRGSFAELSQYPNDFKSIVNRYNELVDTTGLEHANKHVFGPQASSETGVAEGYVLKPVYPIFFNNGTRVAIKCKNSKFSEKAKLDKPIKAKVELTENDKRLLEIFSEYVTWNRVSNVLSHIGSVTAKDFGRVMGLTMKDIINEAAREGHDLLFADNPSAVKKELTILIQNTIRSKWHEVLE

SEQ ID NO: 539 - DNA, 1038 bp, synthetic construct
  misc_feature 1..1038: note = variant of RNA ligase 2 from Klebsiella phage KP179
  source 1..1038: mol_type = other DNA
atgcatcaccatcaccatcacggtggcagcaacatgtttgcgtattattcaagtctggaaaaccattacaataataagttcattgagaagatccgtggtgcaggcttcctgatgcacaccgtggaatgggtagctcgcgagaagattcatggaacgaactttagcgttatcattactccgaccgaaatcgtcccagccaaacgcacagggccgatcttggaaggcgagtcgttctttggtcacgaaattatcatgaaaaaatataaagactccttcgtgaaggtgcagaacatgctgaatgccatggatcttgttagcgtgcaaatctttggcgaatttgcgggtggtggcattcagaaaggcgtcgattacggagacaaagatttctatgtgtttgacatcctgtctgatagcgggaacgagaaagtttactgggatgactatcgcgtcgaatcgttttgcacccagctcggtctgaaattagcgcctctgctgggacgtggtagtttcgctgaactgtcccagtacccaaacgatttcaaaagcattgtgaaccgttataatgaattggttgatacgacgggcctggaacatgccaataaacacgtctttggtccgcaagcgtcttctgaaactggcgtagcagaaggctacgttcttaaacccgtctatccgatcttctttaataatggtgggcgcgtggcgattaaatgcaagaactccaaattttcggagaaagccaagcgcgacaaaccaattaaagcgaaagtggaactgacggagaacgataaacgtctgctcgaaatctttagcgagtatgttacctggaatcgcgtcagtaacgtactgtcacatattggctcagtgaccgcaaaagattttgggcgtgttatgggtctgacgatgaaagacatcattaatgaagcagcacgcgaaggccatgatctgttgttcgctgataacccgtcggcggtgaagaaagagctgaccattctcatccgccacacgattcgttccaaatggcacgaagttctggag

SEQ ID NO: 540 - protein, 346 aa, synthetic construct
  REGION 1..346: note = variant of RNA ligase 2 from Klebsiella phage KP179
MHHHHHHGGSNMFAYYSSLENHYNNKFIEKIRGAGFLMHTVEWVAREKIHGTNFSVIITPTEIVPAKRTGPILEGESFFGHEIIMKKYKDSFVKVQNMLNAMDLVSVQIFGEFAGGGIQKGVDYGDKDFYVFDILSDSGNEKVYWDDYRVESFCTQLGLKLAPLLGRGSFAELSQYPNDFKSIVNRYNELVDTTGLEHANKHVFGPQASSETGVAEGYVLKPVYPIFFNNGGRVAIKCKNSKFSEKAKRDKPIKAKVELTENDKRLLEIFSEYVTWNRVSNVLSHIGSVTAKDFGRVMGLTMKDIINEAAREGHDLLFADNPSAVKKELTILIRHTIRSKWHEVLE

SEQ ID NO: 541 - DNA, 1038 bp, synthetic construct
  misc_feature 1..1038: note = variant of RNA ligase 2 from Klebsiella phage KP179
  source 1..1038: mol_type = other DNA
atgcatcaccatcaccatcacggtggcagcaacacgtttgcgtattattcaagtctggaaaaccattacaatatgaagttcattgagaagatccgtggtgcaggcttcctgatgcacaccgtggaatgggtagctcgcgagaagattcatggaacgaactttagcgttatcattactccgaccgaaatcgtcccagccaaacgcacagggccgatcttggaaggcgagtcgttctttggtcacgaaattatcatgaaaaaatataaagactccttcgtgaaggtgcagaacatgctgaatgccatggatcttgttagcgtgcaaatctttggcgaatttgcgggtggtggcattcagaaaggcgtcgattacggagacaaagatttctatgtgtttgacatcctgtctgatagcgggaacgagaaagtttactgggatgactatcgcgtcgaatcgttttgcaccacgctcggtctgaaattagcgcctctgctgggacgtggtagtttcgctgaactgtcccagtacccaaacgatttcaaaagcattgtgaaccgttataatgaattggttgatacgacgggcctggaacatgccaataaacacgtctttggtccgcaagcgtcttctgaaactggcgtagcagaaggctacgttcttaaacccgtctatccgatcttctttaataacggtacgcgcgtggcgattaaatgcaagaactccaaattttcggagaaagccaagctggacaaaccaattaaagcgaaagtggaactgacggagaacgataaacgtctgctcgaaatctttagcgagtatgttacctggaatcgcgtcagtaacgtactgtcacatattggctcagtgaccgcaaaagattttgggcgtgttatgggtctgacgatgaaagacatcattaatgaagcagcacgcgaaggccatgatctgttgttcgctgataacccgtcggcggtgaagaaagagctgaccattctcatccagaacacgattcgttccaaatggcacgaagttctggag

SEQ ID NO: 542 - protein, 346 aa, synthetic construct
  REGION 1..346: note = variant of RNA ligase 2 from Klebsiella phage KP179
MHHHHHHGGSNTFAYYSSLENHYNMKFIEKIRGAGFLMHTVEWVAREKIHGTNFSVIITPTEIVPAKRTGPILEGESFFGHEIIMKKYKDSFVKVQNMLNAMDLVSVQIFGEFAGGGIQKGVDYGDKDFYVFDILSDSGNEKVYWDDYRVESFCTTLGLKLAPLLGRGSFAELSQYPNDFKSIVNRYNELVDTTGLEHANKHVFGPQASSETGVAEGYVLKPVYPIFFNNGTRVAIKCKNSKFSEKAKLDKPIKAKVELTENDKRLLEIFSEYVTWNRVSNVLSHIGSVTAKDFGRVMGLTMKDIINEAAREGHDLLFADNPSAVKKELTILIQNTIRSKWHEVLE

SEQ ID NO: 543 - DNA, 1038 bp, synthetic construct
  misc_feature 1..1038: note = variant of RNA ligase 2 from Klebsiella phage KP179
  source 1..1038: mol_type = other DNA
atgcatcaccatcaccatcacggtggcagcaacatgtttgcgtattattcaagtctggaaaaccattacaataataagttcattgagaagatccgtggtgcaggcttcctgatgcacaccgtggaatgggtagctcgcgagaagattcatggaacgaactttagcgttatcattactccgaccgaaatcgtcccagccaaacgcacagggccgatcttggaaggcgagtcgttctttggtcacgaaattatcatgaaaaaatataaagactccttcgtgaaggtgcagaacatgctgaatgccatggatcttgttagcgtgcaaatctttggcgaatttgcgggtggtggcattcagaaaggcgtcgattacggagacaaagatttctatgtgtttgacatcctgtctgatagcgggaacgagaaagtttactgggatgactatcgcgtcgaatcgttttgcacccagctcggtctgaaattagcgcctctgctgggacgtggtagtttcgctgaactgtcccagtacccaaacgatttcaaaagcattgtgaaccgttataatgaattggttgatacgacgggcctggaacatgccaataaacacgtctttggtccgcaagcgtcttctgaaactggcgtagcagaaggctacgttcttaaacccgtctatccgatcttctttaataatggtacgcgcgtggcgattaaatgcaagaactccaaattttcggagaaagccacgctggacaaaccaattaaagcgaaagtggaactgacggagaacgataaacgtctgctcgaaatctttagcgagtatgttacctggaatcgcgtcagtaacgtactgtcacatattggctcagtgaccgcaaaagattttgggcgtgttatgggtctgacgatgaaagacatcattaatgaagcagcacgcgaaggccatgatctgttgttcgctgataacccgtcggcggtgaagaaagagctgcgtattctcatccgccacacgattcgttccaaatggcacgaagttctggag

SEQ ID NO: 544 - protein, 346 aa, synthetic construct
  REGION 1..346: note = variant of RNA ligase 2 from Klebsiella phage KP179
MHHHHHHGGSNMFAYYSSLENHYNNKFIEKIRGAGFLMHTVEWVAREKIHGTNFSVIITPTEIVPAKRTGPILEGESFFGHEIIMKKYKDSFVKVQNMLNAMDLVSVQIFGEFAGGGIQKGVDYGDKDFYVFDILSDSGNEKVYWDDYRVESFCTQLGLKLAPLLGRGSFAELSQYPNDFKSIVNRYNELVDTTGLEHANKHVFGPQASSETGVAEGYVLKPVYPIFFNNGTRVAIKCKNSKFSEKATLDKPIKAKVELTENDKRLLEIFSEYVTWNRVSNVLSHIGSVTAKDFGRVMGLTMKDIINEAAREGHDLLFADNPSAVKKELRILIRHTIRSKWHEVLE

SEQ ID NO: 545 - DNA, 1038 bp, synthetic construct
  misc_feature 1..1038: note = variant of RNA ligase 2 from Klebsiella phage KP179
  source 1..1038: mol_type = other DNA
atgcatcaccatcaccatcacggtggcagcaacatgtttgcgtattattcaagtctggaaaaccattacaataataagttcattgagaagatccgtggtgcaggcttcctgatgcacaccgtggaatgggtagctcgcgagaagattcatggaacgaactttagcgttatcattactccgaccgaaatcgtcccagccaaacgcacagggccgatcttggaaggcgagtcgttctttggtcacgaaattatcatgaaaaaatataaagactccttcgtgaaggtgcagaacatgctgaatgccatggatcttgttagcgtgcaaatctttggcgaatttgcgggtggtggcattcagaaaggcgtcgattacggagacaaagatttctatgtgtttgacatcctgtctgatagcgggaacgagaaagtttactgggatgactatcgcgtcgaatcgttttgcacccagctcggtctgaaattagcgcctctgctgggacgtggtagtttcgctgaactgtcccagtacccaaacgatttcaaaagcattgtgaaccgttataatgaattggttgatacgacgggcctggaacatgccaataaacacgtctttggtccgcaagcgtcttctgaaactggcgtagcagaaggctacgttcttaaacccgtctatccgatcttctttaataatggtacgcgcgtggcgattaaatgcaagaactccaaattttcggagaaagccacgcgcgacaaaccaattaaagcgaaagtggaactgacggagaacgataaacgtctgctcgaaatctttagcgagtatgttacctggaatcgcgtcagtaacgtactgtcacatattggctcagtgaccgcaaaagattttgggcgtgttatgggtctgacgatgaaagacatcattaatgaagcagcacgcgaaggccatgatctgttgttcgctgataacccgtcggcggtgaagaaagagctgaccattctcatccgcaacacgattcgttccaaatggcacgaagttctggag

SEQ ID NO: 546 - protein, 346 aa, synthetic construct
  REGION 1..346: note = variant of RNA ligase 2 from Klebsiella phage KP179
MHHHHHHGGSNMFAYYSSLENHYNNKFIEKIRGAGFLMHTVEWVAREKIHGTNFSVIITPTEIVPAKRTGPILEGESFFGHEIIMKKYKDSFVKVQNMLNAMDLVSVQIFGEFAGGGIQKGVDYGDKDFYVFDILSDSGNEKVYWDDYRVESFCTQLGLKLAPLLGRGSFAELSQYPNDFKSIVNRYNELVDTTGLEHANKHVFGPQASSETGVAEGYVLKPVYPIFFNNGTRVAIKCKNSKFSEKATRDKPIKAKVELTENDKRLLEIFSEYVTWNRVSNVLSHIGSVTAKDFGRVMGLTMKDIINEAAREGHDLLFADNPSAVKKELTILIRNTIRSKWHEVLE

SEQ ID NO: 547 - DNA, 1038 bp, synthetic construct
  misc_feature 1..1038: note = variant of RNA ligase 2 from Klebsiella phage KP179
  source 1..1038: mol_type = other DNA
atgcatcaccatcaccatcacggtggcagcaacatgtttgcgtattattcaagtctggaaaaccattacaataataagttcattgagaagatccgtggtgcaggcttcctgatgcacaccgtggaatgggtagctcgcgagaagattcatggaacgaactttagcgttatcattactccgaccgaaatcgtcccagccaaacgcacagggccgatcttggaaggcgagtcgttctttggtcacgaaattatcatgaaaaaatataaagactccttcgtgaaggtgcagaacatgctgaatgccatggatcttgttagcgtgcaaatctttggcgaatttgcgggtggtggcattcagaaaggcgtcgattacggagacaaagatttctatgtgtttgacatcctgtctgatagcgggaacgagaaagtttactgggatgactatcgcgtcgaatcgttttgcacccacctcggtctgaaattagcgcctctgctgggacgtggtagtttcgctgaactgtcccagtacccaaacgatttcaaaagcattgtgaaccgttataatgaattggttgatacgacgggcctggaacatgccaataaacacgtctttggtccgcaagcgtcttctgaaactggcgtagcagaaggctacgttcttaaacccgtctatccgatcttctttaataatggtgggcgcgtggcgattaaatgcaagaactccaaattttcggagaaagccacgctggacaaaccaattaaagcgaaagtggaactgacggagaacgataaacgtctgctcgaaatctttagcgagtatgttacctggaatcgcgtcagtaacgtactgtcacatattggctcagtgaccgcaaaagattttgggcgtgttatgggtctgacgatgaaagacatcattaatgaagcagcacgcgaaggccatgatctgttgttcgctgataacccgtcggcggtgaagaaagagctgaccattctcatccgccacacgattcgttccaaatggcacgaagttctggag

SEQ ID NO: 548 - protein, 346 aa, synthetic construct
  REGION 1..346: note = variant of RNA ligase 2 from Klebsiella phage KP179
MHHHHHHGGSNMFAYYSSLENHYNNKFIEKIRGAGFLMHTVEWVAREKIHGTNFSVIITPTEIVPAKRTGPILEGESFFGHEIIMKKYKDSFVKVQNMLNAMDLVSVQIFGEFAGGGIQKGVDYGDKDFYVFDILSDSGNEKVYWDDYRVESFCTHLGLKLAPLLGRGSFAELSQYPNDFKSIVNRYNELVDTTGLEHANKHVFGPQASSETGVAEGYVLKPVYPIFFNNGGRVAIKCKNSKFSEKATLDKPIKAKVELTENDKRLLEIFSEYVTWNRVSNVLSHIGSVTAKDFGRVMGLTMKDIINEAAREGHDLLFADNPSAVKKELTILIRHTIRSKWHEVLE

SEQ ID NO: 549 - DNA, 1038 bp, synthetic construct
  misc_feature 1..1038: note = variant of RNA ligase 2 from Klebsiella phage KP179
  source 1..1038: mol_type = other DNA
atgcatcaccatcaccatcacggtggcagcaacatgtttgcgtattattcaagtctggaaaaccattacaataataagttcattgagaagatccgtggtgcaggcttcctgatgcacaccgtggaatgggtagctcgcgagaagattcatggaacgaactttagcgttatcattactccgaccgaaatcgtcccagccaaacgcacagggccgatcttggaaggcgagtcgttctttggtcacgaaattatcatgaaaaaatataaagactccttcgtgaaggtgcagaacatgctgaatgccatggatcttgttagcgtgcaaatctttggcgaatttgcgggtggtggcattcagaaaggcgtcgattacggagacaaagatttctatgtgtttgacatcctgtctgatagcgggaacgagaaagtttactgggatgactatcgcgtcgaatcgttttgcaccaccctcggtctgaaattagcgcctctgctgggacgtggtagtttcgctgaactgtcccagtacccaaacgatttcaaaagcattgtgaaccgttataatgaattggttgatacgacgggcctggaacatgccaataaacacgtctttggtccgcaagcgtcttctgaaactggcgtagcagaaggctacgttcttaaacccgtctatccgatcttctttaataatggtgggcgcgtggcgattaaatgcaagaactccaaattttcggagaaagccacgctggacaaaccaattaaagcgaaagtggaactgacggagaacgataaacgtctgctcgaaatctttagcgagtatgttacctggaatcgcgtcagtaacgtactgtcacatattggctcagtgaccgcaaaagattttgggcgtgttatgggtctgacgatgaaagacatcattaatgaagcagcacgcgaaggccatgatctgttgttcgctgataacccgtcggcggtgaagaaagagctgcgtattctcatccaacacacgattcgttccaaatggcacgaagttctggag

SEQ ID NO: 550 - protein, 346 aa, synthetic construct
  REGION 1..346: note = variant of RNA ligase 2 from Klebsiella phage KP179
MHHHHHHGGSNMFAYYSSLENHYNNKFIEKIRGAGFLMHTVEWVAREKIHGTNFSVIITPTEIVPAKRTGPILEGESFFGHEIIMKKYKDSFVKVQNMLNAMDLVSVQIFGEFAGGGIQKGVDYGDKDFYVFDILSDSGNEKVYWDDYRVESFCTTLGLKLAPLLGRGSFAELSQYPNDFKSIVNRYNELVDTTGLEHANKHVFGPQASSETGVAEGYVLKPVYPIFFNNGGRVAIKCKNSKFSEKATLDKPIKAKVELTENDKRLLEIFSEYVTWNRVSNVLSHIGSVTAKDFGRVMGLTMKDIINEAAREGHDLLFADNPSAVKKELRILIQHTIRSKWHEVLE

SEQ ID NO: 551 - DNA, 1038 bp, synthetic construct
  misc_feature 1..1038: note = variant of RNA ligase 2 from Klebsiella phage KP179
  source 1..1038: mol_type = other DNA
atgcatcaccatcaccatcacggtggcagcaacatgtttgcgtattattcaagtctggaaaaccattacaataataagttcattgagaagatccgtggtgcaggcttcctgatgcacaccgtggaatgggtagctcgcgagaagattcatggaacgaactttagcgttatcattactccgaccgaaatcgtcccagccaaacgcacagggccgatcttggaaggcgagtcgttctttggtcacgaaattatcatgaaaaaatataaagactccttcgtgaaggtgcagaacatgctgaatgccatggatcttgttagcgtgcaaatctttggcgaatttgcgggtggtggcattcagaaaggcgtcgattacggagacaaagatttctatgtgtttgacatcctgtctgatagcgggaacgagaaagtttactgggatgactatcgcgtcgaatcgttttgcacccagctcggtctgaaattagcgcctctgctgggacgtggtagtttcgctgaactgtcccagtacccaaacgatttcaaaagcattgtgaaccgttataatgaattggttgatacgacgggcctggaacatgccaataaacacgtctttggtccgcaagcgtcttctgaaactggcgtagcagaaggctacgttcttaaacccgtctatccgatcttctttaataatggtgggcgcgtggcgattaaatgcaagaactccaaattttcggagaaagccaagctggacaaaccaattaaagcgaaagtggaactgacggagaacgataaacgtctgctcgaaatctttagcgagtatgttacctggaatcgcgtcagtaacgtactgtcacatattggctcagtgaccgcaaaagattttgggcgtgttatgggtctgacgatgaaagacatcattaatgaagcagcacgcgaaggccatgatctgttgttcgctgataacccgtcggcggtgaagaaagagctgcgtattctcatccgccacacgattcgttccaaatggcacgaagttctggag

SEQ ID NO: 552 - protein, 346 aa, synthetic construct
  REGION 1..346: note = variant of RNA ligase 2 from Klebsiella phage KP179
MHHHHHHGGSNMFAYYSSLENHYNNKFIEKIRGAGFLMHTVEWVAREKIHGTNFSVIITPTEIVPAKRTGPILEGESFFGHEIIMKKYKDSFVKVQNMLNAMDLVSVQIFGEFAGGGIQKGVDYGDKDFYVFDILSDSGNEKVYWDDYRVESFCTQLGLKLAPLLGRGSFAELSQYPNDFKSIVNRYNELVDTTGLEHANKHVFGPQASSETGVAEGYVLKPVYPIFFNNGGRVAIKCKNSKFSEKAKLDKPIKAKVELTENDKRLLEIFSEYVTWNRVSNVLSHIGSVTAKDFGRVMGLTMKDIINEAAREGHDLLFADNPSAVKKELRILIRHTIRSKWHEVLE

SEQ ID NO: 553 - DNA, 1038 bp, synthetic construct
  misc_feature 1..1038: note = variant of RNA ligase 2 from Klebsiella phage KP179
  source 1..1038: mol_type = other DNA
atgcatcaccatcaccatcacggtggcagcaacatgtttgcgtattattcaagtctggaaaaccattacaataataagttcattgagaagatccgtggtgcaggcttcctgatgcacaccgtggaatgggtagctcgcgagaagattcatggaacgaactttagcgttatcattactccgaccgaaatcgtcccagccaaacgcacagggccgatcttggaaggcgagtcgttctttggtcacgaaattatcatgaaaaaatataaagactccttcgtgaaggtgcagaacatgctgaatgccatggatcttgttagcgtgcaaatctttggcgaatttgcgggtggtggcattcagaaaggcgtcgattacggagacaaagatttctatgtgtttgacatcctgtctgatagcgggaacgagaaagtttactgggatgactatcgcgtcgaatcgttttgcaccacgctcggtctgaaattagcgcctctgctgggacgtggtagtttcgctgaactgtcccagtacccaaacgatttcaaaagcattgtgaaccgttataatgaattggttgatacgacgggcctgtggcatgccaataaacacgtctttggtccgcaagcgtcttctgaaactggcgtagcagaaggctacgttcttaaacccgtctatccgatcttctttaataatggtacgcgcgtggcgattaaatgcaagaactccaaattttcggagaaagccaagctggacaaaccaattaaagcgaaagtggaactgacggagaacgataaacgtctgctcgaaatctttagcgagtatgttacctggaatcgcgtcagtaacgtactgtcacatattggctcagtgaccgcaaaagattttgggcgtgttatgggtctgacgatgaaagacatcattaatgaagcagcacgcgaaggccatgatctgttgttcgctgataacccgtcggcggtgaagaaagagctgaccattctcatccagaacacgattcgttccaaatggcacgaagttctggag

SEQ ID NO: 554 - protein, 346 aa, synthetic construct
  REGION 1..346: note = variant of RNA ligase 2 from Klebsiella phage KP179
MHHHHHHGGSNMFAYYSSLENHYNNKFIEKIRGAGFLMHTVEWVAREKIHGTNFSVIITPTEIVPAKRTGPILEGESFFGHEIIMKKYKDSFVKVQNMLNAMDLVSVQIFGEFAGGGIQKGVDYGDKDFYVFDILSDSGNEKVYWDDYRVESFCTTLGLKLAPLLGRGSFAELSQYPNDFKSIVNRYNELVDTTGLWHANKHVFGPQASSETGVAEGYVLKPVYPIFFNNGTRVAIKCKNSKFSEKAKLDKPIKAKVELTENDKRLLEIFSEYVTWNRVSNVLSHIGSVTAKDFGRVMGLTMKDIINEAAREGHDLLFADNPSAVKKELTILIQNTIRSKWHEVLE

SEQ ID NO: 555 - DNA, 1038 bp, synthetic construct
  misc_feature 1..1038: note = variant of RNA ligase 2 from Klebsiella phage KP179
  source 1..1038: mol_type = other DNA
atgcatcaccatcaccatcacggtggcagcaacatgtttgcgtattattcaagtctggaaaaccattacaataataagttcattgagaagatccgtggtgcaggcttcctgatgcacaccgtggaatgggtagctcgcgagaagattcatggaacgaactttagcgttatcattactccgaccgaaatcgtcccagccaaacgcacagggccgatcttggaaggcgagtcgttctttggtcacgaaattatcatgaaaaaatataaagactccttcgtgaaggtgcagaacatgctgaatgccatggatcttgttagcgtgcaaatctttggcgaatttgcgggtggtggcattcagaaaggcgtcgattacggagacaaagatttctatgtgtttgacatcctgtctgatagcgggaacgagaaagtttactgggatgactatcgcgtcgaatcgttttgcaccacgctcggtctgaaattagcgcctctgctgggacgtggtagtttcgctgaactgtcccagtacccaaacgatttcaaaagcattgtgaaccgttataatgaattggttgatacgacgggcctggaacatgccaataaacacgtctttggtccgcaagcgtcttctgaaactggcgtagcagaaggctacgttcttaaacccgtctatccgatcttctttaataatggtacgcgcgtggcgattaaatgcaagaactccaaattttcggagaaagccaagctggacaaaccaattaaagcgaaagtggaactgacggagaacgataaacgtctgctcgaaatctttagcgagtatgttacctggaatcgcgtcagtaacgtactgtcacatattggctcagtgaccgcaaaagattttgggcgtgttatgggtctgacgatgaaagacatcattaatgaagcagcacgcgaaggccatgatctgttgttcgctgataacccgtcggcggtgaagaaagagctgaccattctcatccagaacacgattttgtccaaatggcacgaagttctggag

SEQ ID NO: 556 - protein, 346 aa, synthetic construct
  REGION 1..346: note = variant of RNA ligase 2 from Klebsiella phage KP179
MHHHHHHGGSNMFAYYSSLENHYNNKFIEKIRGAGFLMHTVEWVAREKIHGTNFSVIITPTEIVPAKRTGPILEGESFFGHEIIMKKYKDSFVKVQNMLNAMDLVSVQIFGEFAGGGIQKGVDYGDKDFYVFDILSDSGNEKVYWDDYRVESFCTTLGLKLAPLLGRGSFAELSQYPNDFKSIVNRYNELVDTTGLEHANKHVFGPQASSETGVAEGYVLKPVYPIFFNNGTRVAIKCKNSKFSEKAKLDKPIKAKVELTENDKRLLEIFSEYVTWNRVSNVLSHIGSVTAKDFGRVMGLTMKDIINEAAREGHDLLFADNPSAVKKELTILIQNTILSKWHEVLE

SEQ ID NO: 557 - DNA, 1038 bp, synthetic construct
  misc_feature 1..1038: note = variant of RNA ligase 2 from Klebsiella phage KP179
  source 1..1038: mol_type = other DNA
atgcatcaccatcaccatcacggtggcagcaacatgtttgcgtattattcaagtctggaaaaccattacaataataagttcattgagaagatccgtggtgcaggcttcctgatgcacaccgtggaatgggtagctcgcgagaagattcatggaacgaactttagcgttatcattactccgaccgaaatcgtcccagccaaacgcacagggccgatcttggaaggcgagtcgttctttggtcacgaaattatcatgaaaaaatataaagactccttcgtgaaggtgcagaacatgctgaatgccatggatcttgttagcgtgcaaatctttggcgaatttgcgggtggtggcattcagaaaggcgtcgattacggagacaaagatttctatgtgtttgacatcctgtctgatagcgggaacgagaaagtttactgggatgactatcgcgtcgaatcgttttgcaccacgctcggtctgaaattagcgcctctgctgggacgtggtagtttcgctgaactgtcccagtacccaaacgatttcaaaagcattgtgaaccgttataatgaattggttgatacgacgggcctggaacatgccaataaacacgtctttggtccgcaagcgtcttctgaaactggcgtagcagaaggctacgttcttaaacccgtctatccgatcttctttaataatggtacgcgcgtggcgattaaatgcaagaactccaaattttcggagaaagccaagctggacaaaccaattaaagcgaaagtggaactgacggagaacgataaacgtctgctcgaaatctttagcgagtatgttacctggaatcgcgtcagtaacgtactgtcacatattggctcagtgaccgcaaaagattttgggcgtgttatgggtctgacgatgaaagacatcattaatgaagcagcacgcgaaggccatgatctgttgttcgctgataacccgtcggcggtgaagagtgagctgaccattctcatccagaacacgattcgttccaaatggcacgaagttctggag

SEQ ID NO: 558 - protein, 346 aa, synthetic construct
  REGION 1..346: note = variant of RNA ligase 2 from Klebsiella phage KP179
MHHHHHHGGSNMFAYYSSLENHYNNKFIEKIRGAGFLMHTVEWVAREKIHGTNFSVIITPTEIVPAKRTGPILEGESFFGHEIIMKKYKDSFVKVQNMLNAMDLVSVQIFGEFAGGGIQKGVDYGDKDFYVFDILSDSGNEKVYWDDYRVESFCTTLGLKLAPLLGRGSFAELSQYPNDFKSIVNRYNELVDTTGLEHANKHVFGPQASSETGVAEGYVLKPVYPIFFNNGTRVAIKCKNSKFSEKAKLDKPIKAKVELTENDKRLLEIFSEYVTWNRVSNVLSHIGSVTAKDFGRVMGLTMKDIINEAAREGHDLLFADNPSAVKSELTILIQNTIRSKWHEVLE

SEQ ID NO: 559 - DNA, 1038 bp, synthetic construct
  misc_feature 1..1038: note = variant of RNA ligase 2 from Klebsiella phage KP179
  source 1..1038: mol_type = other DNA
atgcatcaccatcaccatcacggtggcagcaacatgtttgcgtattattcaagtctggaaaaccattacaataataagttcattgagaagatccgtggtgcaggcttcctgatgcacaccgtggaatgggtagctcgcgagaagattcatggaacgaactttagcgttatcattactccgaccgaaatcgtcccagccaaacgcacagggccgatcttggaaggcgagtcgttctttggtcacgaaattatcatgaaaaaatataaagactccttcgtgaaggtgcagaacatgctgaatgccatggatcttgttagcgtgcaaatctttggcgaatttgcgggtggtggcattcagaaaggcgtcgattacggagacaaagatttctatgtgtttgacatcctgtctgatagcgggaacgagaaagtttactgggatgactatcgcgtcgaatcgttttgcaccacgctcggtctgaaattagcgcctctgctgggacgtggtagtttcgctgaactgtcccagtacccaaacgatttcaaaagcattgtgaaccgttataatgaattggtttttacgacgggcctggaacatgccaataaacacgtctttggtccgcaagcgtcttctgaaactggcgtagcagaaggctacgttcttaaacccgtctatccgatcttctttaataatggtacgcgcgtggcgattaaatgcaagaactccaaattttcggagaaagccaagctggacaaaccaattaaagcgaaagtggaactgacggagaacgataaacgtctgctcgaaatctttagcgagtatgttacctggaatcgcgtcagtaacgtactgtcacatattggctcagtgaccgcaaaagattttgggcgtgttatgggtctgacgatgaaagacatcattaatgaagcagcacgcgaaggccatgatctgttgttcgctgataacccgtcggcggtgaagaaagagctgaccattctcatccagaacacgattcgttccaaatggcacgaagttctggag

SEQ ID NO: 560 - protein, 346 aa, synthetic construct
  REGION 1..346: note = variant of RNA ligase 2 from Klebsiella phage KP179
MHHHHHHGGSNMFAYYSSLENHYNNKFIEKIRGAGFLMHTVEWVAREKIHGTNFSVIITPTEIVPAKRTGPILEGESFFGHEIIMKKYKDSFVKVQNMLNAMDLVSVQIFGEFAGGGIQKGVDYGDKDFYVFDILSDSGNEKVYWDDYRVESFCTTLGLKLAPLLGRGSFAELSQYPNDFKSIVNRYNELVFTTGLEHANKHVFGPQASSETGVAEGYVLKPVYPIFFNNGTRVAIKCKNSKFSEKAKLDKPIKAKVELTENDKRLLEIFSEYVTWNRVSNVLSHIGSVTAKDFGRVMGLTMKDIINEAAREGHDLLFADNPSAVKKELTILIQNTIRSKWHEVLE

SEQ ID NO: 561 - DNA, 1038 bp, synthetic construct
  misc_feature 1..1038: note = variant of RNA ligase 2 from Klebsiella phage KP179
  source 1..1038: mol_type = other DNA
atgcatcaccatcaccatcacggtggcagcaacatgtttgcgtattattcaagtctggaaaaccattacaataataagttcattgagaagatccgtggtgcaggcttcctgatgcacaccgtggaatgggtagctcgcgagaagattcatggaacgaactttagcgttatcattactccgaccgaaatcgtcccagccaaacgcacagggccgatcttggaaggcgagtcgttctttggtcacgaaattatcatgaaaaaatataaagactccttcgtgaaggtgcagaacatgctgaatgccatggatcttgttagcgtgcaaatctttggcgaatttgcgggtggtggcattcagaaaggcgtcgattacggagacaaagatttctatgtgtttgacatcctgtctgatagcgggaacgagaaagtttactgggatgactatcgcgtcgaatcgttttgcaccacgctcggtctgaaattagcgcctctgctgggacgtggtagtttcgctgaactgtcccagtacccaaacgatttcaaaagcattgtgaaccgttataatgaattggttgatacgacgggcctggaacatgccaataaacacgtctttggtccgcaagcgtcttctgaaactggcgtagcagaaggctacgttcttaaacccgtctatccgatcttctttaataatggtacgcgcgtggcgattaaatgcaagaactccaaattttcggagaaagccaagctggacaaaccaattaaagcgaaagtggaactgacggagaacgataaacgtctgctcgaaatctttagcgagtatgttacctggaatcgcgtcagtaacgtactgtcacatattggctcagtgaccgcaaaagattttgggcgtgttatgggtctgacgatgaaagacatcattaatgaagcagcacgcgaaggccatgatctgttgttcgctgataacccgtcggcggtgaagaaagagctgacctcgctcatccagaacacgattcgttccaaatggcacgaagttctggag

SEQ ID NO: 562 - protein, 346 aa, synthetic construct
  REGION 1..346: note = variant of RNA ligase 2 from Klebsiella phage KP179
MHHHHHHGGSNMFAYYSSLENHYNNKFIEKIRGAGFLMHTVEWVAREKIHGTNFSVIITPTEIVPAKRTGPILEGESFFGHEIIMKKYKDSFVKVQNMLNAMDLVSVQIFGEFAGGGIQKGVDYGDKDFYVFDILSDSGNEKVYWDDYRVESFCTTLGLKLAPLLGRGSFAELSQYPNDFKSIVNRYNELVDTTGLEHANKHVFGPQASSETGVAEGYVLKPVYPIFFNNGTRVAIKCKNSKFSEKAKLDKPIKAKVELTENDKRLLEIFSEYVTWNRVSNVLSHIGSVTAKDFGRVMGLTMKDIINEAAREGHDLLFADNPSAVKKELTSLIQNTIRSKWHEVLE

SEQ ID NO: 563 - DNA, 1038 bp, synthetic construct
  misc_feature 1..1038: note = variant of RNA ligase 2 from Klebsiella phage KP179
  source 1..1038: mol_type = other DNA
atgcatcaccatcaccatcacggtggcagcaacatgtttgcgtattattcaagtctggaaaaccattacaataataagttcattgagaagatccgtggtgcaggcttcctgatgcacaccgtggaatgggtagctcgcgagaagattcatggaacgaactttagcgttatcattactccgaccgaaatcgtcccagccaaacgcacagggccgatcttggaaggcgagtcgttctttggtcacgaaattatcatgaaaaaatataaagactccttcgtgaaggtgcagaacatgctgaatgccatggatcttgttagcgtgcaaatctttggcgaatttgcgggtggtggcattcagaaaggcgtcgattacggagacaaagatttctatgtgtttgacatcctgtctgatagcgggaacgagaaagtttactgggatgactatcgcgtcgaatcgttttgcaccacgctcggtctgaaattagcgcctctgctgggacgtggtagtttcgctgaactgtcccagtacccaaacgatttcaaaagcattgtgaaccgttataatgaattggttgatacgacgggcctggaacatgccaataaacacgtctttggtccgcaagcgtcttctgaaactggcgtagcagaaggctacgttcttaaacccgtctatccgatcttctttaataatggtacgcgcgtggcgattaaatgcaagaactccaaattttcggagaaagccaagctggacaaaccaattaaagcgaaagtggaactgacggagaacgataaacgtctgctcgaaatctttagcgagtatgttacctggaatcgcgtcagtaacgtactgtcacatattggctcagtgaccgcaaaagattttgggcgtgttatgggtctgacgatgaaagacatcattaatgaagcagcacgcgaaggccatgatctgttgttcgctgataacccgtcggcggtgtgtaaagagctgaccattctcatccagaacacgattcgttccaaatggcacgaagttctggag

SEQ ID NO: 564 - protein, 346 aa, synthetic construct
  REGION 1..346: note = variant of RNA ligase 2 from Klebsiella phage KP179
MHHHHHHGGSNMFAYYSSLENHYNNKFIEKIRGAGFLMHTVEWVAREKIHGTNFSVIITPTEIVPAKRTGPILEGESFFGHEIIMKKYKDSFVKVQNMLNAMDLVSVQIFGEFAGGGIQKGVDYGDKDFYVFDILSDSGNEKVYWDDYRVESFCTTLGLKLAPLLGRGSFAELSQYPNDFKSIVNRYNELVDTTGLEHANKHVFGPQASSETGVAEGYVLKPVYPIFFNNGTRVAIKCKNSKFSEKAKLDKPIKAKVELTENDKRLLEIFSEYVTWNRVSNVLSHIGSVTAKDFGRVMGLTMKDIINEAAREGHDLLFADNPSAVCKELTILIQNTIRSKWHEVLE

SEQ ID NO: 565 - DNA, 1038 bp, synthetic construct
  misc_feature 1..1038: note = variant of RNA ligase 2 from Klebsiella phage KP179
  source 1..1038: mol_type = other DNA
atgcatcaccatcaccatcacggtggcagcaacatgtttgcgtattattcaagtctggaaaaccattacaataataagttcattgagaagatccgtggtgcaggcttcctgatgcacaccgtggaatgggtagctcgcgagaagattcatggaacgaactttagcgttatcattactccgaccgaaatcgtcccagccaaacgcacagggccgatcttggaaggcgagtcgttctttggtcacgaaattatcatgaaaaaatataaagactccttcgtgaaggtgcagaacatgctgaatgccatggatcttgttagcgtgcaaatctttggcgaatttgcgggtggtggcattcagaaaggcgtcgattacggagacaaagatttctatgtgtttgacatcctgtctgatagcgggaacgagaaagtttactgggatgactatcgcgtcgaatcgttttgcaccacgctcggtctgaaattagcgcctctgctgggacgtggtagtttcgctgaactgtcccagtacccaaacgatttcaaaagcattgtgaaccgttataatgaattggttgatacgacgggcctggaacatgccaataaacacgtctttggtccgcaagcgtcttctgaaactggcgtagcagaaggctacgttcttaaacccgtctatccgatcttctttaataatggtacgcgcgtggcgattaaatgcaagaactccaaattttcggagaaagccaagctggacaaaccaattaaagcgaaagtggaactgacggagaacgataaacgtctgctcgaaatctttagcgagtatgttacctggaatcgcgtcagtaacgtactgtcacatattggctcagtgaccgcaaaagattttgggcgtgttatgggtctgacgatgaaagacatcattaatgaagcagcacgcgaaggccatgatctgttgttcgctgataacccgtcggcggtgaagaaagagctgaccattctcatccagaacacgattgggtccaaatggcacgaagttctggag

SEQ ID NO: 566 - protein, 346 aa, synthetic construct
  REGION 1..346: note = variant of RNA ligase 2 from Klebsiella phage KP179
MHHHHHHGGSNMFAYYSSLENHYNNKFIEKIRGAGFLMHTVEWVAREKIHGTNFSVIITPTEIVPAKRTGPILEGESFFGHEIIMKKYKDSFVKVQNMLNAMDLVSVQIFGEFAGGGIQKGVDYGDKDFYVFDILSDSGNEKVYWDDYRVESFCTTLGLKLAPLLGRGSFAELSQYPNDFKSIVNRYNELVDTTGLEHANKHVFGPQASSETGVAEGYVLKPVYPIFFNNGTRVAIKCKNSKFSEKAKLDKPIKAKVELTENDKRLLEIFSEYVTWNRVSNVLSHIGSVTAKDFGRVMGLTMKDIINEAAREGHDLLFADNPSAVKKELTILIQNTIGSKWHEVLE

SEQ ID NO: 567 - DNA, 1038 bp, synthetic construct
  misc_feature 1..1038: note = variant of RNA ligase 2 from Klebsiella phage KP179
  source 1..1038: mol_type = other DNA
atgcatcaccatcaccatcacggtggcagcaacatgtttgcgtattattcaagtctggaaaaccattacaataataagttcattgagaagatccgtggtgcaggcttcctgatgcacaccgtggaatgggtagctcgcgagaagattcatggaacgaactttagcgttatcattactccgaccgaaatcgtcccagccaaacgcacagggccgatcttggaaggcgagtcgttctttggtcacgaaattatcatgaaaaaatataaagactccttcgtgaaggtgcagaacatgctgaatgccatggatcttgttagcgtgcaaatctttggcgaatttgcgggtggtggcattcagaaaggcgtcgattacggagacaaagatttctatgtgtttgacatcctgtctgatagcgggaacgagaaagtttactgggatgactatcgcgtcgaatcgttttgcaccacgctcggtctgaaattagcgcctctgctgggacgtggtagtttcgctgaactgtcccagtacccaaacgatttcaaaagcattgtgaaccgttataatgaattggttgatacgacgggcctggaacatgccaataaacacgtctttggtccgcaagcgtcttctgaaactggcgtagcagaaggctacgttcttaaacccgtctatccgatcttctttaataatggtacgcgcgtggcgattaaatgcaagaactccaaattttcggagaaagccaagctggacaaaccaattaaagcgaaagtggaactgacggagaacgataaacgtctgctcgaaatctttagcgagtatgttacctggaatcgcgtcagtaacgtactgtcacatattggctcagtgaccgcaaaagattttgggcgtgttatgggtctgacgatgaaagacatcattaatgaagcagcacgcgaaggccatgatctgttgttcgctgataacccgtcggcggtgaagaaagagctgaccattctcatccagaacacgattcgttccaaatggcacgaagtttctgag

SEQ ID NO: 568 - protein, 346 aa, synthetic construct
  REGION 1..346: note = variant of RNA ligase 2 from Klebsiella phage KP179
MHHHHHHGGSNMFAYYSSLENHYNNKFIEKIRGAGFLMHTVEWVAREKIHGTNFSVIITPTEIVPAKRTGPILEGESFFGHEIIMKKYKDSFVKVQNMLNAMDLVSVQIFGEFAGGGIQKGVDYGDKDFYVFDILSDSGNEKVYWDDYRVESFCTTLGLKLAPLLGRGSFAELSQYPNDFKSIVNRYNELVDTTGLEHANKHVFGPQASSETGVAEGYVLKPVYPIFFNNGTRVAIKCKNSKFSEKAKLDKPIKAKVELTENDKRLLEIFSEYVTWNRVSNVLSHIGSVTAKDFGRVMGLTMKDIINEAAREGHDLLFADNPSAVKKELTILIQNTIRSKWHEVSE

SEQ ID NO: 569 - DNA, 1038 bp, synthetic construct
  misc_feature 1..1038: note = variant of RNA ligase 2 from Klebsiella phage KP179
  source 1..1038: mol_type = other DNA
atgcatcaccatcaccatcacggtggcagcaacatgtttgcgtattattcaagtctggaaaaccattacaataataagttcattgagaagatccgtggtgcaggcttcctgatgcacaccgtggaatgggtagctcgcgagaagattcatggaacgaactttagcgttatcattactccgaccgaaatcgtcccagccaaacgcacagggccgatcttggaaggcgagtcgttctttggtcacgaaattatcatgaaaaaatataaagactccttcgtgaaggtgcagaacatgctgaatgccatggatcttgttagcgtgcaaatctttggcgaatttgcgggtggtggcattcagaaaggcgtcgattacggagacaaagatttctatgtgtttgacatcctgtctgatagcgggaacgagaaagtttactgggatgactatcgcgtcgaatcgttttgcaccacgctcggtctgaaattagcgcctctgctgggacgtggtagtttcgctgaactgtcccagtacccaaacgatttcaaaagcattgtgaaccgttataatgaattggttgatacgacgggcctggaacatgccaataaacacgtctttggtccgcaagcgtcttctgaaactggcgtagcagaaggctacgttcttaaacccgtctatccgatcttctttaataatggtacgcgcgtggcgattaaatgcaagaactccaaattttcggagaaagccaagctggacaaaccaattaaagcgaaagtggaactgacggagaacgataaacgtctgctcgaaatctttagcgagtatgttacctggaatcgcgtcagtaacgtactgtcacatattggctcagtgaccgcaaaagattttgggcgtgttatgggtctgacgatgaaagacatcattaatgaagcagcacgcgaaggccatgatctgttgttcgctgataacccgtcggcggtgaagggggagctgaccattctcatccagaacacgattcgttccaaatggcacgaagttctggag

SEQ ID NO: 570 - protein, 346 aa, synthetic construct
  REGION 1..346: note = variant of RNA ligase 2 from Klebsiella phage KP179
MHHHHHHGGSNMFAYYSSLENHYNNKFIEKIRGAGFLMHTVEWVAREKIHGTNFSVIITPTEIVPAKRTGPILEGESFFGHEIIMKKYKDSFVKVQNMLNAMDLVSVQIFGEFAGGGIQKGVDYGDKDFYVFDILSDSGNEKVYWDDYRVESFCTTLGLKLAPLLGRGSFAELSQYPNDFKSIVNRYNELVDTTGLEHANKHVFGPQASSETGVAEGYVLKPVYPIFFNNGTRVAIKCKNSKFSEKAKLDKPIKAKVELTENDKRLLEIFSEYVTWNRVSNVLSHIGSVTAKDFGRVMGLTMKDIINEAAREGHDLLFADNPSAVKGELTILIQNTIRSKWHEVLE

SEQ ID NO: 571 - DNA, 1038 bp, synthetic construct
  misc_feature 1..1038: note = variant of RNA ligase 2 from Klebsiella phage KP179
  source 1..1038: mol_type = other DNA
atgcatcaccatcaccatcacggtggcagcaacatgtttgcgtattattcaagtctggaaaaccattacaataataagttcattgagaagatccgtggtgcaggcttcctgatgcacaccgtggaatgggtagctcgcgagaagattcatggaacgaactttagcgttatcattactccgaccgaaatcgtcccagccaaacgcacagggccgatcttggaaggcgagtcgttctttggtcacgaaattatcatgaaaaaatataaagactccttcgtgaaggtgcagaacatgctgaatgtgatggatcttgttagcgtgcaaatctttggcgaatttgcgggtggtggcattcagaaaggcgtcgattacggagacaaagatttctatgtgtttgacatcctgtctgatagcgggaacgagaaagtttactgggatgactatcgcgtcgaatcgttttgcaccacgctcggtctgaaattagcgcctctgctgggacgtggtagtttcgctgaactgtcccagtacccaaacgatttcaaaagcattgtgaaccgttataatgaattggttgatacgacgggcctggaacatgccaataaacacgtctttggtccgcaagcgtcttctgaaactggcgtagcagaaggctacgttcttaaacccgtctatccgatcttctttaataatggtacgcgcgtggcgattaaatgcaagaactccaaattttcggagaaagccaagctggacaaaccaattaaagcgaaagtggaactgacggagaacgataaacgtctgctcgaaatctttagcgagtatgttacctggaatcgcgtcagtaacgtactgtcacatattggctcagtgaccgcaaaagattttgggcgtgttatgggtctgacgatgaaagacatcattaatgaagcagcacgcgaaggccatgatctgttgttcgctgataacccgtcggcggtgaagaaagagctgaccattctcatccagaacacgattcgttccaaatggcacgaagttctggag

SEQ ID NO: 572 - protein, 346 aa, synthetic construct
  REGION 1..346: note = variant of RNA ligase 2 from Klebsiella phage KP179
MHHHHHHGGSNMFAYYSSLENHYNNKFIEKIRGAGFLMHTVEWVAREKIHGTNFSVIITPTEIVPAKRTGPILEGESFFGHEIIMKKYKDSFVKVQNMLNVMDLVSVQIFGEFAGGGIQKGVDYGDKDFYVFDILSDSGNEKVYWDDYRVESFCTTLGLKLAPLLGRGSFAELSQYPNDFKSIVNRYNELVDTTGLEHANKHVFGPQASSETGVAEGYVLKPVYPIFFNNGTRVAIKCKNSKFSEKAKLDKPIKAKVELTENDKRLLEIFSEYVTWNRVSNVLSHIGSVTAKDFGRVMGLTMKDIINEAAREGHDLLFADNPSAVKKELTILIQNTIRSKWHEVLE

SEQ ID NO: 573 - DNA, 1038 bp, synthetic construct
  misc_feature 1..1038: note = variant of RNA ligase 2 from Klebsiella phage KP179
  source 1..1038: mol_type = other DNA
atgcatcaccatcaccatcacggtggcagcaacatgtttgcgtattattcaagtctggaaaaccattacaataataagttcattgagaagatccgtggtgcaggcttcctgatgcacaccgtggaatgggtagctcgcgagaagattcatggaacgaactttagcgttatcattactccgaccgaaatcgtcccagccaaacgcacagggccgatcttggaaggcgagtcgttctttggtcacgaaattatcatgaaaaaatataaagactccttcgtgaaggtgcagaacatgctggtggccatggatcttgttagcgtgcaaatctttggcgaatttgcgggtggtggcattcagaaaggcgtcgattacggagacaaagatttctatgtgtttgacatcctgtctgatagcgggaacgagaaagtttactgggatgactatcgcgtcgaatcgttttgcaccacgctcggtctgaaattagcgcctctgctgggacgtggtagtttcgctgaactgtcccagtacccaaacgatttcaaaagcattgtgaaccgttataatgaattggttgatacgacgggcctggaacatgccaataaacacgtctttggtccgcaagcgtcttctgaaactggcgtagcagaaggctacgttcttaaacccgtctatccgatcttctttaataatggtacgcgcgtggcgattaaatgcaagaactccaaattttcggagaaagccaagctggacaaaccaattaaagcgaaagtggaactgacggagaacgataaacgtctgctcgaaatctttagcgagtatgttacctggaatcgcgtcagtaacgtactgtcacatattggctcagtgaccgcaaaagattttgggcgtgttatgggtctgacgatgaaagacatcattaatgaagcagcacgcgaaggccatgatctgttgttcgctgataacccgtcggcggtgaagaaagagctgaccattctcatccagaacacgattcgttccaaatggcacgaagttctggag

SEQ ID NO: 574 - protein, 346 aa, synthetic construct
  REGION 1..346: note = variant of RNA ligase 2 from Klebsiella phage KP179
MHHHHHHGGSNMFAYYSSLENHYNNKFIEKIRGAGFLMHTVEWVAREKIHGTNFSVIITPTEIVPAKRTGPILEGESFFGHEIIMKKYKDSFVKVQNMLVAMDLVSVQIFGEFAGGGIQKGVDYGDKDFYVFDILSDSGNEKVYWDDYRVESFCTTLGLKLAPLLGRGSFAELSQYPNDFKSIVNRYNELVDTTGLEHANKHVFGPQASSETGVAEGYVLKPVYPIFFNNGTRVAIKCKNSKFSEKAKLDKPIKAKVELTENDKRLLEIFSEYVTWNRVSNVLSHIGSVTAKDFGRVMGLTMKDIINEAAREGHDLLFADNPSAVKKELTILIQNTIRSKWHEVLE

SEQ ID NO: 575 - DNA, 1038 bp, synthetic construct
  misc_feature 1..1038: note = variant of RNA ligase 2 from Klebsiella phage KP179
  source 1..1038: mol_type = other DNA
atgcatcaccatcaccatcacggtggcagcaacatgtttgcgtattattcaagtctggaaaaccattacaataataagttcattgagaagatccgtggtgcaggcttcctgatgcacaccgtggaatgggtagctcgcgagaagattcatggaacgaactttagcgttatcattactccgaccgaaatcgtcccagccaaacgcacagggccgatcttggaaggcgagtcgttctttggtcacgaaattatcatgaaaaaatataaagactccttcgtgaaggtgcagaacatgctgaatgccatggatcttgttagcgtgcaaatctttggcgaatttgcgggtggtggcattcagaaaggcgtcgattacggagacaaagatttctatgtgtttgacatcctgtctgatagcgggaacgagaaagtttactgggatgactatcgcgtcgaatcgttttgcaccacgctcggtctgaaattagcgcctctgctgggacgtggtagtttcgctgaactgtcccagtacccaaacgatttcaaaagcattgtgaaccgttataatgaattggttgatacgacgggcctggaacatgccaataaacacgtctttggtccgcaagcgtcttctgaaactggcgtagcagaaggctacgttcttaaacccgtctatccgatcttctttaataatggtacgcgcgtggcgattaaatgcaagaactccaaattttcggagaaagccaagctggacaaaccaattaaagcgaaagtggaactgacggagaacgataaacgtctgctcgaaatctttagcgagtatgttacctggaatcgcgtcagtaacgtactgtcacatattggctcagtgaccgcaaaagattttgggcgtgttatgggtctgacgatgaaagacatcattaatgaagcagcacgcgaaggccatgatctgttgttcgctgataacccgtcggcggtgaagaaagagctgaccgggctcatccagaacacgattcgttccaaatggcacgaagttctggag

SEQ ID NO: 576 - protein, 346 aa, synthetic construct
  REGION 1..346: note = variant of RNA ligase 2 from Klebsiella phage KP179
MHHHHHHGGSNMFAYYSSLENHYNNKFIEKIRGAGFLMHTVEWVAREKIHGTNFSVIITPTEIVPAKRTGPILEGESFFGHEIIMKKYKDSFVKVQNMLNAMDLVSVQIFGEFAGGGIQKGVDYGDKDFYVFDILSDSGNEKVYWDDYRVESFCTTLGLKLAPLLGRGSFAELSQYPNDFKSIVNRYNELVDTTGLEHANKHVFGPQASSETGVAEGYVLKPVYPIFFNNGTRVAIKCKNSKFSEKAKLDKPIKAKVELTENDKRLLEIFSEYVTWNRVSNVLSHIGSVTAKDFGRVMGLTMKDIINEAAREGHDLLFADNPSAVKKELTGLIQNTIRSKWHEVLE

SEQ ID NO: 577 - DNA, 1038 bp, synthetic construct
  misc_feature 1..1038: note = variant of RNA ligase 2 from Klebsiella phage KP179
  source 1..1038: mol_type = other DNA
atgcatcaccatcaccatcacggtggcagcaacatgtttgcgtattattcaagtctggaaaaccattacaataataagttcattgagaagatccgtggtgcaggcttcctgatgcacaccgtggaatgggtagctcgcgagaagattcatggaacgaactttagcgttatcattactccgaccgaaatcgtcccagccaaacgcacagggccgatcttggaaggcgagtcgttctttggtcacgaaattatcatgaaaaaatataaagactccttcgtgaaggtgcagaacatgctgaatgccatggatcttgttagcgtgcaaatctttggcgaatttgcgggtggtggcattcagaaaggcgtcgattacggagacaaagatttctatgtgtttgacatcctgtctgatagcgggaacgggaaagtttactgggatgactatcgcgtcgaatcgttttgcaccacgctcggtctgaaattagcgcctctgctgggacgtggtagtttcgctgaactgtcccagtacccaaacgatttcaaaagcattgtgaaccgttataatgaattggttgatacgacgggcctggaacatgccaataaacacgtctttggtccgcaagcgtcttctgaaactggcgtagcagaaggctacgttcttaaacccgtctatccgatcttctttaataatggtacgcgcgtggcgattaaatgcaagaactccaaattttcggagaaagccaagctggacaaaccaattaaagcgaaagtggaactgacggagaacgataaacgtctgctcgaaatctttagcgagtatgttacctggaatcgcgtcagtaacgtactgtcacatattggctcagtgaccgcaaaagattttgggcgtgttatgggtctgacgatgaaagacatcattaatgaagcagcacgcgaaggccatgatctgttgttcgctgataacccgtcggcggtgaagaaagagctgaccattctcatccagaacacgattcgttccaaatggcacgaagttctggag

SEQ ID NO: 578 - protein, 346 aa, synthetic construct
  REGION 1..346: note = variant of RNA ligase 2 from Klebsiella phage KP179
MHHHHHHGGSNMFAYYSSLENHYNNKFIEKIRGAGFLMHTVEWVAREKIHGTNFSVIITPTEIVPAKRTGPILEGESFFGHEIIMKKYKDSFVKVQNMLNAMDLVSVQIFGEFAGGGIQKGVDYGDKDFYVFDILSDSGNGKVYWDDYRVESFCTTLGLKLAPLLGRGSFAELSQYPNDFKSIVNRYNELVDTTGLEHANKHVFGPQASSETGVAEGYVLKPVYPIFFNNGTRVAIKCKNSKFSEKAKLDKPIKAKVELTENDKRLLEIFSEYVTWNRVSNVLSHIGSVTAKDFGRVMGLTMKDIINEAAREGHDLLFADNPSAVKKELTILIQNTIRSKWHEVLE

SEQ ID NO: 579 - DNA, 1038 bp, synthetic construct
  misc_feature 1..1038: note = variant of RNA ligase 2 from Klebsiella phage KP179
  source 1..1038: mol_type = other DNA
atgcatcaccatcaccatcacggtggcagcaacatgtttgcgtattattcaagtctggaaaaccattacaataataagttcattgagaagatccgtggtgcaggcttcctgatgcacaccgtggaatgggtagctcgcgagaagattcatggaacgaactttagcgttatcattactccgaccgaaatcgtcccagccaaacgcacagggccgatcttggaaggcgagtcgttctttggtcacgaaattatcatgaaaaaatataaagactccttcgtgaaggtgcagaacatgctgaatgccatggatcttgttagcgtgcaaatctttggcgaatttgcgggtggtggcattcagaaaggcgtcgattacggagacaaagatttctatgtgtttgacatcctgtctgatagcgggaacgagaaagtttactgggatgactatcgcgtcgaatcgttttgcaccacgctcggtctgaaattagcgcctctgctgggacgtggtagtttcgctgaactgtcccagtacccaaacgatttcaaaagcattgtgaaccgttataatgaattggttgatacgacgggcctggaaatggccaataaacacgtctttggtccgcaagcgtcttctgaaactggcgtagcagaaggctacgttcttaaacccgtctatccgatcttctttaataatggtacgcgcgtggcgattaaatgcaagaactccaaattttcggagaaagccaagctggacaaaccaattaaagcgaaagtggaactgacggagaacgataaacgtctgctcgaaatctttagcgagtatgttacctggaatcgcgtcagtaacgtactgtcacatattggctcagtgaccgcaaaagattttgggcgtgttatgggtctgacgatgaaagacatcattaatgaagcagcacgcgaaggccatgatctgttgttcgctgataacccgtcggcggtgaagaaagagctgaccattctcatccagaacacgattcgttccaaatggcacgaagttctggag

SEQ ID NO: 580 - protein, 346 aa, synthetic construct
  REGION 1..346: note = variant of RNA ligase 2 from Klebsiella phage KP179
MHHHHHHGGSNMFAYYSSLENHYNNKFIEKIRGAGFLMHTVEWVAREKIHGTNFSVIITPTEIVPAKRTGPILEGESFFGHEIIMKKYKDSFVKVQNMLNAMDLVSVQIFGEFAGGGIQKGVDYGDKDFYVFDILSDSGNEKVYWDDYRVESFCTTLGLKLAPLLGRGSFAELSQYPNDFKSIVNRYNELVDTTGLEMANKHVFGPQASSETGVAEGYVLKPVYPIFFNNGTRVAIKCKNSKFSEKAKLDKPIKAKVELTENDKRLLEIFSEYVTWNRVSNVLSHIGSVTAKDFGRVMGLTMKDIINEAAREGHDLLFADNPSAVKKELTILIQNTIRSKWHEVLE

SEQ ID NO: 581 - DNA, 1038 bp, synthetic construct
  misc_feature 1..1038: note = variant of RNA ligase 2 from Klebsiella phage KP179
  source 1..1038: mol_type = other DNA
atgcatcaccatcaccatcacggtggcagcaacatgtttgcgtattattcaagtctggaaaaccattacaataataagttcattgagaagatccgtggtgcaggcttcctgatgcacaccgtggaatgggtagctcgcgagaagattcatggaacgaactttagcgttatcattactccgaccgaaatcgtcccagccaaacgcacagggccgatcttggaaggcgagtcgttctttggtcacgaaattatcatgaaaaaatataaagactccttcgtgaaggtgcagaacatgctgaatgccatggatcttgttagcgtgcaaatctttggcgaatttgcgggtggtggcattcagaaaggcgtcgattacggagacaaagatttctatgtgtttgacatcctgtctgatagcgggaacgagaaagtttactgggatgactatcgcgtcgaatcgttttgcaccacgctcggtctgaaattagcgcctctgctgggacgtggtagtttcgctgaactgtcccagtacccaaacgatttcaaaagcattgtgaaccgttataatgaattggttgatacgacgggcctggaacatgccaataaacacgtctttggtccgcaagcgtcttctgaaactggcgtagcagaaggctacgttcttaaacccgtctatccgatcttctttaataatggtacgcgcgtggcgattaaatgcaagaactccaaattttcggagaaagccaagctggacaaaccaattaaagcgaaagtggaactgacggagaacgataaacgtctgctcgaaatctttagcgagtatgttacctggaatcgcgtcagtaacgtactgtcacatattggctcagtgaccgcaaaagattttgggcgtgttatgggtctgacgatgaaagacatcattaatgaagcagcacgcgaaggccatgatctgttgttcgctgataacccgtcggcggtgcttaaagagctgaccattctcatccagaacacgattcgttccaaatggcacgaagttctggag

SEQ ID NO: 582 - protein, 346 aa, synthetic construct
  REGION 1..346: note = variant of RNA ligase 2 from Klebsiella phage KP179
MHHHHHHGGSNMFAYYSSLENHYNNKFIEKIRGAGFLMHTVEWVAREKIHGTNFSVIITPTEIVPAKRTGPILEGESFFGHEIIMKKYKDSFVKVQNMLNAMDLVSVQIFGEFAGGGIQKGVDYGDKDFYVFDILSDSGNEKVYWDDYRVESFCTTLGLKLAPLLGRGSFAELSQYPNDFKSIVNRYNELVDTTGLEHANKHVFGPQASSETGVAEGYVLKPVYPIFFNNGTRVAIKCKNSKFSEKAKLDKPIKAKVELTENDKRLLEIFSEYVTWNRVSNVLSHIGSVTAKDFGRVMGLTMKDIINEAAREGHDLLFADNPSAVLKELTILIQNTIRSKWHEVLE

SEQ ID NO: 583 - DNA, 1038 bp, synthetic construct
  misc_feature 1..1038: note = variant of RNA ligase 2 from Klebsiella phage KP179
  source 1..1038: mol_type = other DNA
atgcatcaccatcaccatcacggtggcagcaacatgtttgcgtattattcaagtctggaaaaccattacaataataagttcattgagaagatccgtggtgcaggcttcctgatgcacaccgtggaatgggtagctcgcgagaagattcatggaacgaactttagcgttatcattactccgaccgaaatctggccagccaaacgcacagggccgatcttggaaggcgagtcgttctttggtcacgaaattatcatgaaaaaatataaagactccttcgtgaaggtgcagaacatgctgaatgccatggatcttgttagcgtgcaaatctttggcgaatttgcgggtggtggcattcagaaaggcgtcgattacggagacaaagatttctatgtgtttgacatcctgtctgatagcgggaacgagaaagtttactgggatgactatcgcgtcgaatcgttttgcaccacgctcggtctgaaattagcgcctctgctgggacgtggtagtttcgctgaactgtcccagtacccaaacgatttcaaaagcattgtgaaccgttataatgaattggttgatacgacgggcctggaacatgccaataaacacgtctttggtccgcaagcgtcttctgaaactggcgtagcagaaggctacgttcttaaacccgtctatccgatcttctttaataatggtacgcgcgtggcgattaaatgcaagaactccaaattttcggagaaagccaagctggacaaaccaattaaagcgaaagtggaactgacggagaacgataaacgtctgctcgaaatctttagcgagtatgttacctggaatcgcgtcagtaacgtactgtcacatattggctcagtgaccgcaaaagattttgggcgtgttatgggtctgacgatgaaagacatcattaatgaagcagcacgcgaaggccatgatctgttgttcgctgataacccgtcggcggtgaagaaagagctgaccattctcatccagaacacgattcgttccaaatggcacgaagttctggag

SEQ ID NO: 584 - protein, 346 aa, synthetic construct
  REGION 1..346: note = variant of RNA ligase 2 from Klebsiella phage KP179
MHHHHHHGGSNMFAYYSSLENHYNNKFIEKIRGAGFLMHTVEWVAREKIHGTNFSVIITPTEIWPAKRTGPILEGESFFGHEIIMKKYKDSFVKVQNMLNAMDLVSVQIFGEFAGGGIQKGVDYGDKDFYVFDILSDSGNEKVYWDDYRVESFCTTLGLKLAPLLGRGSFAELSQYPNDFKSIVNRYNELVDTTGLEHANKHVFGPQASSETGVAEGYVLKPVYPIFFNNGTRVAIKCKNSKFSEKAKLDKPIKAKVELTENDKRLLEIFSEYVTWNRVSNVLSHIGSVTAKDFGRVMGLTMKDIINEAAREGHDLLFADNPSAVKKELTILIQNTIRSKWHEVLE

SEQ ID NO: 585 - DNA, 1038 bp, synthetic construct
  misc_feature 1..1038: note = variant of RNA ligase 2 from Klebsiella phage KP179
  source 1..1038: mol_type = other DNA
atgcatcaccatcaccatcacggtggcagcaacatgtttgcgtattattcaagtctggaaaaccattacaataataagttcattgagaagatccgtggtgcaggcttcctgatgcacaccgtggaatgggtagctcgcgagaagattcatggaacgaactttagcgttatcattactccgaccgaaatcgtcccagccaaacgcacagggccgatcttggaaggcgagtcgttctttggtcacgaaattatcatgaaaaaatataaagactccttcgtgaaggtgcagaacatgctgaatgccatggatcttgttagcgtgcaaatctttggcgaatttgcgggtggtggcattcagaaaggcgtcgattacggagacaaagatttctatgtgtttgacatcctgtctgatagcgggaacgagaaagtttactgggatgactatcgcgtcgaatcgttttgcaccacgctcggtctgaaattagcgcctctgctgggacgtggtagtttcgctgaactgtcccagtacccaaacgatttcaaaagcattgtgaaccgttataatgaattggttgatacgacgggcctggaacatgccaataaacacgtctttggtccgcaagcgtcttctgaaactggcgtagcagaaggctacgttcttaaacccgtctatccgatcttctttaataatggtacgcgcgtggcgattaaatgcaagaactccaaattttcggagaaagccaagctggacaaaccaattaaagcgaaagtggaactgacggagaacgataaacgtctgctcgaaatctttagcgagtatgttacctggaatcgcgtcagtaacgtactgtcacatattggctcagtgaccgcaaaagattttgggcgtgttatgggtctgacgatgaaagacatcggtaatgaagcagcacgcgaaggccatgatctgttgttcgctgataacccgtcggcggtgaagaaagagctgaccattctcatccagaacacgattcgttccaaatggcacgaagttctggag

SEQ ID NO: 586 - protein, 346 aa, synthetic construct
  REGION 1..346: note = variant of RNA ligase 2 from Klebsiella phage KP179
MHHHHHHGGSNMFAYYSSLENHYNNKFIEKIRGAGFLMHTVEWVAREKIHGTNFSVIITPTEIVPAKRTGPILEGESFFGHEIIMKKYKDSFVKVQNMLNAMDLVSVQIFGEFAGGGIQKGVDYGDKDFYVFDILSDSGNEKVYWDDYRVESFCTTLGLKLAPLLGRGSFAELSQYPNDFKSIVNRYNELVDTTGLEHANKHVFGPQASSETGVAEGYVLKPVYPIFFNNGTRVAIKCKNSKFSEKAKLDKPIKAKVELTENDKRLLEIFSEYVTWNRVSNVLSHIGSVTAKDFGRVMGLTMKDIGNEAAREGHDLLFADNPSAVKKELTILIQNTIRSKWHEVLE

SEQ ID NO: 587 - DNA, 1038 bp, synthetic construct
  misc_feature 1..1038: note = variant of RNA ligase 2 from Klebsiella phage KP179
  source 1..1038: mol_type = other DNA
atgcatcaccatcaccatcacggtggcagcaacatgtttgcgtattattcaagtctggaaaaccattacaataataagttcattgagaagatccgtggtgcaggcttcctgatgcacaccgtggaatgggtagctcgcgagaagattcatggaacgaactttagcgttatcattactccgaccgaaatcgtcccagccaaacgcacagggccgatcttggaaggcgagtcgttctttggtcacgaaattatcatgaaaaaatataaagactccttcgtgaaggtgcagaacatgctgaatgccatggatcttgttagcgtgcaaatctttggcgaatttgcgggtggtggcattcagaaaggcgtcgattacggagacaaagatttctatgtgtttgacatcctgtctgatagcgggaacgagaaagtttactgggatgactatcgcgtcgaatcgttttgcaccacgctcggtctgaaattagcgcctctgctgggacgtggtagtttcgctgaactgtcccagtacccaaacgatttcaaaagcattgtgaaccgttataatgaattggttgatacgacgggcctggaacatgccaataaacacgtctttggtccgcaagcgtcttctgaaactggcgtagcagaaggctacgttcttaaacccgtctatccgatcttctttaataatggtacgcgcgtggcgattaaatgcaagaactccaaattttcggagaaagccaagctggacaaaccaattaaagcgaaagtggaactgacggagaacgataaacgtctgctcgaaatctttagcgagtatgttacctggaatcgcgtcagtaacgtactgtcacatattggctcagtgaccgcaaaagattttgggcgtgttatgggtctgacgatgaaagacatcattaatgaagcagcacgcgaaggccatgatctgttgttcgctgataacccgtcggcggtgaagaaagagctgaccattctcatccagaacacgattcgttccaaatggcacgaagttcaggag

SEQ ID NO: 588 - protein, 346 aa, synthetic construct
  REGION 1..346: note = variant of RNA ligase 2 from Klebsiella phage KP179
MHHHHHHGGSNMFAYYSSLENHYNNKFIEKIRGAGFLMHTVEWVAREKIHGTNFSVIITPTEIVPAKRTGPILEGESFFGHEIIMKKYKDSFVKVQNMLNAMDLVSVQIFGEFAGGGIQKGVDYGDKDFYVFDILSDSGNEKVYWDDYRVESFCTTLGLKLAPLLGRGSFAELSQYPNDFKSIVNRYNELVDTTGLEHANKHVFGPQASSETGVAEGYVLKPVYPIFFNNGTRVAIKCKNSKFSEKAKLDKPIKAKVELTENDKRLLEIFSEYVTWNRVSNVLSHIGSVTAKDFGRVMGLTMKDIINEAAREGHDLLFADNPSAVKKELTILIQNTIRSKWHEVQE

SEQ ID NO: 589 - DNA, 1038 bp, synthetic construct
  misc_feature 1..1038: note = variant of RNA ligase 2 from Klebsiella phage KP179
  source 1..1038: mol_type = other DNA
atgcatcaccatcaccatcacggtggcagcaacatgtttgcgtattattcaagtctggaaaaccattacaataataagttcattgagaagatccgtggtgcaggcttcctgatgcacaccgtggaatgggtagctcgcgagaagattcatggaacgaactttagcgttatcattactccgaccgaaatcgtcccagccaaacgcacagggccgatcttggaaggcgagtcgttctttggtcacgaaattatcatgaaaaaatataaagactccttcgtgaaggtgcagaacatgctgaattggatggatcttgttagcgtgcaaatctttggcgaatttgcgggtggtggcattcagaaaggcgtcgattacggagacaaagatttctatgtgtttgacatcctgtctgatagcgggaacgagaaagtttactgggatgactatcgcgtcgaatcgttttgcaccacgctcggtctgaaattagcgcctctgctgggacgtggtagtttcgctgaactgtcccagtacccaaacgatttcaaaagcattgtgaaccgttataatgaattggttgatacgacgggcctggaacatgccaataaacacgtctttggtccgcaagcgtcttctgaaactggcgtagcagaaggctacgttcttaaacccgtctatccgatcttctttaataatggtacgcgcgtggcgattaaatgcaagaactccaaattttcggagaaagccaagctggacaaaccaattaaagcgaaagtggaactgacggagaacgataaacgtctgctcgaaatctttagcgagtatgttacctggaatcgcgtcagtaacgtactgtcacatattggctcagtgaccgcaaaagattttgggcgtgttatgggtctgacgatgaaagacatcattaatgaagcagcacgcgaaggccatgatctgttgttcgctgataacccgtcggcggtgaagaaagagctgaccattctcatccagaacacgattcgttccaaatggcacgaagttctggag

SEQ ID NO: 590 - protein, 346 aa, synthetic construct
  REGION 1..346: note = variant of RNA ligase 2 from Klebsiella phage KP179
MHHHHHHGGSNMFAYYSSLENHYNNKFIEKIRGAGFLMHTVEWVAREKIHGTNFSVIITPTEIVPAKRTGPILEGESFFGHEIIMKKYKDSFVKVQNMLNWMDLVSVQIFGEFAGGGIQKGVDYGDKDFYVFDILSDSGNEKVYWDDYRVESFCTTLGLKLAPLLGRGSFAELSQYPNDFKSIVNRYNELVDTTGLEHANKHVFGPQASSETGVAEGYVLKPVYPIFFNNGTRVAIKCKNSKFSEKAKLDKPIKAKVELTENDKRLLEIFSEYVTWNRVSNVLSHIGSVTAKDFGRVMGLTMKDIINEAAREGHDLLFADNPSAVKKELTILIQNTIRSKWHEVLE

SEQ ID NO: 591 - DNA, 1038 bp, synthetic construct
  misc_feature 1..1038: note = variant of RNA ligase 2 from Klebsiella phage KP179
  source 1..1038: mol_type = other DNA
atgcatcaccatcaccatcacggtggcagcaacatgtttgcgtattattcaagtctggaaaaccattacaataataagttcattgagaagatccgtggtgcaggcttcctgatgcacaccgtggaatgggtagctcgcgagaagattcatggaacgaactttagcgttatcattactccgaccgaaatcgtcccagccaaacgcacagggccgatcttggaaggcgagtcgttctttggtcacgaaattatcatgaaaaaatataaagactccttcgtgaaggtgcagaacatgctgcgggccatggatcttgttagcgtgcaaatctttggcgaatttgcgggtggtggcattcagaaaggcgtcgattacggagacaaagatttctatgtgtttgacatcctgtctgatagcgggaacgagaaagtttactgggatgactatcgcgtcgaatcgttttgcaccacgctcggtctgaaattagcgcctctgctgggacgtggtagtttcgctgaactgtcccagtacccaaacgatttcaaaagcattgtgaaccgttataatgaattggttgatacgacgggcctggaacatgccaataaacacgtctttggtccgcaagcgtcttctgaaactggcgtagcagaaggctacgttcttaaacccgtctatccgatcttctttaataatggtacgcgcgtggcgattaaatgcaagaactccaaattttcggagaaagccaagctggacaaaccaattaaagcgaaagtggaactgacggagaacgataaacgtctgctcgaaatctttagcgagtatgttacctggaatcgcgtcagtaacgtactgtcacatattggctcagtgaccgcaaaagattttgggcgtgttatgggtctgacgatgaaagacatcattaatgaagcagcacgcgaaggccatgatctgttgttcgctgataacccgtcggcggtgaagaaagagctgaccattctcatccagaacacgattcgttccaaatggcacgaagttctggag

SEQ ID NO: 592 - protein, 346 aa, synthetic construct
  REGION 1..346: note = variant of RNA ligase 2 from Klebsiella phage KP179
MHHHHHHGGSNMFAYYSSLENHYNNKFIEKIRGAGFLMHTVEWVAREKIHGTNFSVIITPTEIVPAKRTGPILEGESFFGHEIIMKKYKDSFVKVQNMLRAMDLVSVQIFGEFAGGGIQKGVDYGDKDFYVFDILSDSGNEKVYWDDYRVESFCTTLGLKLAPLLGRGSFAELSQYPNDFKSIVNRYNELVDTTGLEHANKHVFGPQASSETGVAEGYVLKPVYPIFFNNGTRVAIKCKNSKFSEKAKLDKPIKAKVELTENDKRLLEIFSEYVTWNRVSNVLSHIGSVTAKDFGRVMGLTMKDIINEAAREGHDLLFADNPSAVKKELTILIQNTIRSKWHEVLE

SEQ ID NO: 593 - DNA, 1038 bp, synthetic construct
  misc_feature 1..1038: note = variant of RNA ligase 2 from Klebsiella phage KP179
  source 1..1038: mol_type = other DNA
atgcatcaccatcaccatcacggtggcagcaacatgtttgcgtattattcaagtctggaaaaccattacaataataagttcattgagaagatccgtggtgcaggcttcctgatgcacaccgtggaatgggtagctcgcgagaagattcatggaacgaactttagcgttatcattactccgaccgaaatcgtcccagccaaacgcacagggccgatcttggaaggcgagtcgttctttggtcacgaaattatcatgaaaaaatataaagactccttcgtgaaggtgcagaacatgctgaatgccatggatcttgttagcgtgcaaatctttggcgaatttgcgggtggtggcattcagaaaggcgtcgattacggagacaaagatttctatgtgtttgacatcctgtctgatagcgggaacgagaaagtttactgggatgactatcgcgtcgaatcgttttgcaccacgctcggtctgaaattagcgcctctgctgggacgtggtagtttcgctgaactgtcccagtacccaaacgatttcaaaagcattgtgaaccgttataatgaattggttgatacgacgggcctggaacatgccaataaacacgtctttggtccgcaagcgtcttctgaaactggcgtagcagaaggctacgttcttaaacccgtctatccgatcttctttaataatggtacgcgcgtggcgattaaatgcaagaactccaaattttcggagaaagccaagctggacaaaccaattaaagcgaaagtggaactgacggagaacgataaacgtctgctcgaaatctttagcgagtatgttacctggaatcgcgtcagtaacgtactgtcacatattggctcagtgaccgcaaaagattttgggcgtgttatgggtctgacgatgaaagacatcattaatgaagcagcacgcgaaggccatgatctgttgttcgctgataacccgtcggcggtgaagaaagagctgacctggctcatccagaacacgattcgttccaaatggcacgaagttctggag

SEQ ID NO: 594 - protein, 346 aa, synthetic construct
  REGION 1..346: note = variant of RNA ligase 2 from Klebsiella phage KP179
MHHHHHHGGSNMFAYYSSLENHYNNKFIEKIRGAGFLMHTVEWVAREKIHGTNFSVIITPTEIVPAKRTGPILEGESFFGHEIIMKKYKDSFVKVQNMLNAMDLVSVQIFGEFAGGGIQKGVDYGDKDFYVFDILSDSGNEKVYWDDYRVESFCTTLGLKLAPLLGRGSFAELSQYPNDFKSIVNRYNELVDTTGLEHANKHVFGPQASSETGVAEGYVLKPVYPIFFNNGTRVAIKCKNSKFSEKAKLDKPIKAKVELTENDKRLLEIFSEYVTWNRVSNVLSHIGSVTAKDFGRVMGLTMKDIINEAAREGHDLLFADNPSAVKKELTWLIQNTIRSKWHEVLE

SEQ ID NO: 595 - DNA, 1038 bp, synthetic construct
  misc_feature 1..1038: note = variant of RNA ligase 2 from Klebsiella phage KP179
  source 1..1038: mol_type = other DNA
atgcatcaccatcaccatcacggtggcagcaacatgtttgcgtattattcaagtctggaaaaccattacaataataagttcattgagaagatccgtggtgcaggcttcctgatgcacaccgtggaatgggtagctcgcgagaagattcatggaacgaactttagcgttatcattactccgaccgaaatcgtcccagccaaacgcacagggccgatcttggaaggcgagtcgttctttggtcacgaaattatcatgaaaaaatataaagactccttcgtgaaggtgcagaacatgctgaatgccatggatcttgttagcgtgcaaatctttggcgaatttgcgggtggtggcattcagaaaggcgtcgattacggagacaaagatttctatgtgtttgacatcctgtctgatagcgggaacgagaaagtttactgggatgactatcgcgtcgaatcgttttgcaccacgctcggtctgaaattagcgcctctgctgggacgtggtagtttcgctgaactgtcccagtacccaaacgatttcaaaagcattgtgaaccgttataatgaattggttgatacgacgggcctggaacatgccaataaacacgtctttggtccgcaagcgtcttctgaaactggcgtagcagaaggctacgttcttaaacccgtctatccgatcttctttaataatggtacgcgcgtggcgattaaatgcaagaactccaaattttcggagaaagccaagctggacaaaccaattaaagcgaaagtggaactgacggagaacgataaacgtctgctcgaaatctttagcgagtatgttacctggaatcgcgtcagtaacgtactgtcacatattggctcagtgaccgcaaaagattttgggcgtgttatgggtctgacgatgaaagacatcattaatgaagcagcacgcgaaggccatgatctgtttttcgctgataacccgtcggcggtgaagaaagagctgaccattctcatccagaacacgattcgttccaaatggcacgaagttctggag

SEQ ID NO: 596 - protein, 346 aa, synthetic construct
  REGION 1..346: note = variant of RNA ligase 2 from Klebsiella phage KP179
MHHHHHHGGSNMFAYYSSLENHYNNKFIEKIRGAGFLMHTVEWVAREKIHGTNFSVIITPTEIVPAKRTGPILEGESFFGHEIIMKKYKDSFVKVQNMLNAMDLVSVQIFGEFAGGGIQKGVDYGDKDFYVFDILSDSGNEKVYWDDYRVESFCTTLGLKLAPLLGRGSFAELSQYPNDFKSIVNRYNELVDTTGLEHANKHVFGPQASSETGVAEGYVLKPVYPIFFNNGTRVAIKCKNSKFSEKAKLDKPIKAKVELTENDKRLLEIFSEYVTWNRVSNVLSHIGSVTAKDFGRVMGLTMKDIINEAAREGHDLFFADNPSAVKKELTILIQNTIRSKWHEVLE

SEQ ID NO: 597 - DNA, 1038 bp, synthetic construct
  misc_feature 1..1038: note = variant of RNA ligase 2 from Klebsiella phage KP179
  source 1..1038: mol_type = other DNA
atgcatcaccatcaccatcacggtggcagcaacatgtttgcgtattattcaagtctggaaaaccattacaataataagttcattgagaagatccgtggtgcaggcttcctgatgcacaccgtggaatgggtagctcgcgagaagattcatggaacgaactttagcgttatcattactccgaccgaaatcgtcccagccaaacgcacagggccgatcttggaaggcgagtcgttctttggtcacgaaattatcatgaaaaaatataaagactccttcgtgaaggtgcagaacatgctgaatgccatggatcttgttagcgtgcaaatctttggcgaatttgcgggtggtggcattcagaaaggcgtcgattacggagacaaagatttctatgtgtttgacatcctgtctgatagcgggaacgagaaagtttactgggatgactatcgcgtcgaatcgttttgcaccacgctcggtctgaaattagcgcctctgctgggacgtggtagtttcgctgaactgtcccagtacccaaacgatttcaaaagcattgtgaaccgttataatgaattggttgatacgacgggcctggaacatgccaataaacacgtctttggtccgcaagcgtcttctgaaactggcgtagcagaaggctacgttcttaaacccgtctatccgatcttctttaataatggtacgcgcgtggcgattaaatgcaagaactccaaattttcggagaaagccaagctggacaaaccaattaaagcgaaagtggaactgacggagaacgataaacgtctgctcgaaatctttagcgagtatgttacctggaatcgcgtcagtaacgtactgtcacatattggctcagtgaccgcaaaagattttgggcgtgttatgggtctgacgatgaaagacatcattaatgaagcagcacgcgaaggccatgatctgttgttcgctgataacccgtcggcggtgaagaaagagctgaccattctcatccagaacacgattatgtccaaatggcacgaagttctggag

SEQ ID NO: 598 - protein, 346 aa, synthetic construct
  REGION 1..346: note = variant of RNA ligase 2 from Klebsiella phage KP179
MHHHHHHGGSNMFAYYSSLENHYNNKFIEKIRGAGFLMHTVEWVAREKIHGTNFSVIITPTEIVPAKRTGPILEGESFFGHEIIMKKYKDSFVKVQNMLNAMDLVSVQIFGEFAGGGIQKGVDYGDKDFYVFDILSDSGNEKVYWDDYRVESFCTTLGLKLAPLLGRGSFAELSQYPNDFKSIVNRYNELVDTTGLEHANKHVFGPQASSETGVAEGYVLKPVYPIFFNNGTRVAIKCKNSKFSEKAKLDKPIKAKVELTENDKRLLEIFSEYVTWNRVSNVLSHIGSVTAKDFGRVMGLTMKDIINEAAREGHDLLFADNPSAVKKELTILIQNTIMSKWHEVLE

SEQ ID NO: 599 - DNA, 1038 bp, synthetic construct
  misc_feature 1..1038: note = variant of RNA ligase 2 from Klebsiella phage KP179
  source 1..1038: mol_type = other DNA
atgcatcaccatcaccatcacggtggcagcaacatgtttgcgtattattcaagtctggaaaaccattacaataataagttcattgagaagatccgtggtgcaggcttcctgatgcacaccgtggaatgggtagctcgcgagaagattcatggaacgaactttagcgttatcattactccgaccgaaatcgtcccagccaaacgcacagggccgatcttggaaggcgagtcgttctttggtcacgaaattatcatgaaaaaatataaagactccttcgtgaaggtgcagaacatgctgaatgccatggatcttgttagcgtgcaaatctttggcgaatttgcgggtggtggcattcagaaaggcgtcgattacggagacaaagatttctatgtgtttgacatcctgtctgatagcgggaacgagaaagtttactgggatgactatcgcgtcgaatcgttttgcaccacgctcggtctgaaattagcgcctctgctgggacgtggtagtttcgctgaactgtcccagtacccaaacgatttcaaaagcattgtgaaccgttataatgaattggttgatacgacgggcctggaacatgccaataaacacgtctttggtccgcaagcgtcttctgaaactggcgtagcagaaggctacgttcttaaacccgtctatccgatcttctttaataatggtacgcgcgtggcgattaaatgcaagaactccaaattttcggagaaagccaagctggacaaaccaattaaagcgaaagtggaactgacggagaacgataaatttctgctcgaaatctttagcgagtatgttacctggaatcgcgtcagtaacgtactgtcacatattggctcagtgaccgcaaaagattttgggcgtgttatgggtctgacgatgaaagacatcattaatgaagcagcacgcgaaggccatgatctgttgttcgctgataacccgtcggcggtgaagaaagagctgaccattctcatccagaacacgattcgttccaaatggcacgaagttctggag

SEQ ID NO: 600 - protein, 346 aa, synthetic construct
  REGION 1..346: note = variant of RNA ligase 2 from Klebsiella phage KP179
MHHHHHHGGSNMFAYYSSLENHYNNKFIEKIRGAGFLMHTVEWVAREKIHGTNFSVIITPTEIVPAKRTGPILEGESFFGHEIIMKKYKDSFVKVQNMLNAMDLVSVQIFGEFAGGGIQKGVDYGDKDFYVFDILSDSGNEKVYWDDYRVESFCTTLGLKLAPLLGRGSFAELSQYPNDFKSIVNRYNELVDTTGLEHANKHVFGPQASSETGVAEGYVLKPVYPIFFNNGTRVAIKCKNSKFSEKAKLDKPIKAKVELTENDKFLLEIFSEYVTWNRVSNVLSHIGSVTAKDFGRVMGLTMKDIINEAAREGHDLLFADNPSAVKKELTILIQNTIRSKWHEVLE

SEQ ID NO: 601 - DNA, 1038 bp, synthetic construct
  misc_feature 1..1038: note = variant of RNA ligase 2 from Klebsiella phage KP179
  source 1..1038: mol_type = other DNA
atgcatcaccatcaccatcacggtggcagcaacatgtttgcgtattattcaagtctggaaaaccattacaataataagttcattgagaagatccgtggtgcaggcttcctgatgcacaccgtggaatgggtagctcgcgagaagattcatggaacgaactttagcgttatcattactccgaccgaaatcgtcccagccaaacgcacagggccgatcttggaaggcgagtcgttctttggtcacgaaattatcatgaaaaaatataaagactccttcgtgaaggtgcagaacatgctgaatgccatggatcttgttagcgtgcaaatctttggcgaatttgcgggtggtggcattcagaaaggcgtcgattacggagacaaagatttctatgtgtttgacatcctgtctgatagcgggaacgagaaagtttactgggatgactatcgcgtcgaatcgttttgcaccacgctcggtctgaaattagcgcctctgctgggacgtggtagtttcgctgaactgtcccagtacccaaacgatttcaaaagcattgtgaaccgttataatgaattggttgatacgacgggcctggaacatgccaataaacacgtctttggtccgcaagcgtcttctgaaactggcgtagcagaaggctacgttcttaaacccgtctatccgatcttctttaataatggtacgcgcgtggcgattaaatgcaagaactccaaattttcggagaaagccaagctggacaaaccaattaaagcgaaagtggaactgacggagaacgataaacgtctgctcgaaatctttagcgagtatgttacctggaatcgcgtcagtaacgtactgtcacatattggctcagtgaccgcaaaagattttgggtgggttatgggtctgacgatgaaagacatcattaatgaagcagcacgcgaaggccatgatctgttgttcgctgataacccgtcggcggtgaagaaagagctgaccattctcatccagaacacgattcgttccaaatggcacgaagttctggag

SEQ ID NO: 602 - protein, 346 aa, synthetic construct
  REGION 1..346: note = variant of RNA ligase 2 from Klebsiella phage KP179
MHHHHHHGGSNMFAYYSSLENHYNNKFIEKIRGAGFLMHTVEWVAREKIHGTNFSVIITPTEIVPAKRTGPILEGESFFGHEIIMKKYKDSFVKVQNMLNAMDLVSVQIFGEFAGGGIQKGVDYGDKDFYVFDILSDSGNEKVYWDDYRVESFCTTLGLKLAPLLGRGSFAELSQYPNDFKSIVNRYNELVDTTGLEHANKHVFGPQASSETGVAEGYVLKPVYPIFFNNGTRVAIKCKNSKFSEKAKLDKPIKAKVELTENDKRLLEIFSEYVTWNRVSNVLSHIGSVTAKDFGWVMGLTMKDIINEAAREGHDLLFADNPSAVKKELTILIQNTIRSKWHEVLE

SEQ ID NO: 603 - DNA, 1038 bp, synthetic construct
  misc_feature 1..1038: note = variant of RNA ligase 2 from Klebsiella phage KP179
  source 1..1038: mol_type = other DNA
atgcatcaccatcaccatcacggtggcagcaacatgtttgcgtattattcaagtctggaaaaccattacaataataagttcattgagaagatccgtggtgcaggcttcctgatgcacaccgtggaatgggtagctcgcgagaagattcatggaacgaactttagcgttatcattactccgaccgaaatcgtcccagccaaacgcacagggccgatcttggaaggcgagtcgttctttggtcacgaaattatcatgaaaaaatataaagactccttcgtgaaggtgcagaacatgctgaatgccatggatcttgttagcgtgcaaatctttggcgaatttgcgggtggtggcattcagaaaggcgtcgattacggagacaaagatttctatgtgtttgacatcctgtctgatagcgggaacgagaaagtttactgggatgactatcgcgtcgaatcgttttgcaccacgctcggtctgaaattagcgcctctgctgggacgtggtagtttcgctgaactgtcccagtacccaaacgatttcaaaagcattgtgaaccgttataatgaattggttgatacggtgggcctggaacatgccaataaacacgtctttggtccgcaagcgtcttctgaaactggcgtagcagaaggctacgttcttaaacccgtctatccgatcttctttaataatggtacgcgcgtggcgattaaatgcaagaactccaaattttcggagaaagccaagctggacaaaccaattaaagcgaaagtggaactgacggagaacgataaacgtctgctcgaaatctttagcgagtatgttacctggaatcgcgtcagtaacgtactgtcacatattggctcagtgaccgcaaaagattttgggcgtgttatgggtctgacgatgaaagacatcattaatgaagcagcacgcgaaggccatgatctgttgttcgctgataacccgtcggcggtgaagaaagagctgaccattctcatccagaacacgattcgttccaaatggcacgaagttctggag

SEQ ID NO: 604 - protein, 346 aa, synthetic construct
  REGION 1..346: note = variant of RNA ligase 2 from Klebsiella phage KP179
MHHHHHHGGSNMFAYYSSLENHYNNKFIEKIRGAGFLMHTVEWVAREKIHGTNFSVIITPTEIVPAKRTGPILEGESFFGHEIIMKKYKDSFVKVQNMLNAMDLVSVQIFGEFAGGGIQKGVDYGDKDFYVFDILSDSGNEKVYWDDYRVESFCTTLGLKLAPLLGRGSFAELSQYPNDFKSIVNRYNELVDTVGLEHANKHVFGPQASSETGVAEGYVLKPVYPIFFNNGTRVAIKCKNSKFSEKAKLDKPIKAKVELTENDKRLLEIFSEYVTWNRVSNVLSHIGSVTAKDFGRVMGLTMKDIINEAAREGHDLLFADNPSAVKKELTILIQNTIRSKWHEVLE

SEQ ID NO: 605 - DNA, 1038 bp, synthetic construct
  misc_feature 1..1038: note = variant of RNA ligase 2 from Klebsiella phage KP179
  source 1..1038: mol_type = other DNA
atgcatcaccatcaccatcacggtggcagcaacatgtttgcgtattattcaagtctggaaaaccattacaataataagttcattgagaagatccgtggtgcaggcttcctgatgcacaccgtggaatgggtagctcgcgagaagattcatggaacgaactttagcgttatcattactccgaccgtgatcgtcccagccaaacgcacagggccgatcttggaaggcgagtcgttctttggtcacgaaattatcatgaaaaaatataaagactccttcgtgaaggtgcagaacatgctgaatgccatggatcttgttagcgtgcaaatctttggcgaatttgcgggtggtggcattcagaaaggcgtcgattacggagacaaagatttctatgtgtttgacatcctgtctgatagcgggaacgagaaagtttactgggatgactatcgcgtcgaatcgttttgcaccacgctcggtctgaaattagcgcctctgctgggacgtggtagtttcgctgaactgtcccagtacccaaacgatttcaaaagcattgtgaaccgttataatgaattggttgatacgacgggcctggaacatgccaataaacacgtctttggtccgcaagcgtcttctgaaactggcgtagcagaaggctacgttcttaaacccgtctatccgatcttctttaataatggtacgcgcgtggcgattaaatgcaagaactccaaattttcggagaaagccaagctggacaaaccaattaaagcgaaagtggaactgacggagaacgataaacgtctgctcgaaatctttagcgagtatgttacctggaatcgcgtcagtaacgtactgtcacatattggctcagtgaccgcaaaagattttgggcgtgttatgggtctgacgatgaaagacatcattaatgaagcagcacgcgaaggccatgatctgttgttcgctgataacccgtcggcggtgaagaaagagctgaccattctcatccagaacacgattcgttccaaatggcacgaagttctggag

SEQ ID NO: 606 - protein, 346 aa, synthetic construct
  REGION 1..346: note = variant of RNA ligase 2 from Klebsiella phage KP179
MHHHHHHGGSNMFAYYSSLENHYNNKFIEKIRGAGFLMHTVEWVAREKIHGTNFSVIITPTVIVPAKRTGPILEGESFFGHEIIMKKYKDSFVKVQNMLNAMDLVSVQIFGEFAGGGIQKGVDYGDKDFYVFDILSDSGNEKVYWDDYRVESFCTTLGLKLAPLLGRGSFAELSQYPNDFKSIVNRYNELVDTTGLEHANKHVFGPQASSETGVAEGYVLKPVYPIFFNNGTRVAIKCKNSKFSEKAKLDKPIKAKVELTENDKRLLEIFSEYVTWNRVSNVLSHIGSVTAKDFGRVMGLTMKDIINEAAREGHDLLFADNPSAVKKELTILIQNTIRSKWHEVLE

SEQ ID NO: 607 - DNA, 1038 bp, synthetic construct
  misc_feature 1..1038: note = variant of RNA ligase 2 from Klebsiella phage KP179
  source 1..1038: mol_type = other DNA
atgcatcaccatcaccatcacggtggcagcaacatgtttgcgtattattcaagtctggaaaaccattacaataataagttcattgagaagatccgtggtgcaggcttcctgatgcacaccgtggaatgggtagctcgcgagaagattcatggaacgaactttagcgttatcattactccgaccgaaatcgtcccagccaaacgcacagggccgatcttggaaggcgagtcgttctttggtcacgaaattatcatgaaaaaatataaagactccttcgtgaaggtgcagaacatgctgaatgccatggatcttgttagcgtgcaaatctttggcgaatttgcgggtggtggcattcagaaaggcgtcgattacggagacaaagatttctatgtgtttgacatcctgtctgatagcgggaacgagaaagtttactgggatgactatcgcgtcgaatcgttttgcaccacgctcggtctgaaattagcgcctctgctgggacgtggtagtttcgctgaactgtcccagtacccaaacgatttcaaaagcattgtgaaccgttataatgaattggttgatacgacgggcctggaacatgccaataaacacgtctttggtccgcaagcgtcttctgaaactggcgtagcagaaggctacgttcttaaacccgtctatccgatcttctttaataatggtacgcgcgtggcgattaaatgcaagaactccaaattttcggagaaagccaagctggacaaaccaattaaagcgaaagtggaactgacggagaacgataaacgtctgctcgaaatctttagcgagtatgttacctggaatcgcgtcagtaacgtactgtcacatattggctcagtgaccgcaaaagattttgggcgtgttatgggtctgacgatgaaagacatcattaatgaagcagcacgcgaaggccatgatctgtggttcgctgataacccgtcggcggtgaagaaagagctgaccattctcatccagaacacgattcgttccaaatggcacgaagttctggag

SEQ ID NO: 608 - protein, 346 aa, synthetic construct
  REGION 1..346: note = variant of RNA ligase 2 from Klebsiella phage KP179
MHHHHHHGGSNMFAYYSSLENHYNNKFIEKIRGAGFLMHTVEWVAREKIHGTNFSVIITPTEIVPAKRTGPILEGESFFGHEIIMKKYKDSFVKVQNMLNAMDLVSVQIFGEFAGGGIQKGVDYGDKDFYVFDILSDSGNEKVYWDDYRVESFCTTLGLKLAPLLGRGSFAELSQYPNDFKSIVNRYNELVDTTGLEHANKHVFGPQASSETGVAEGYVLKPVYPIFFNNGTRVAIKCKNSKFSEKAKLDKPIKAKVELTENDKRLLEIFSEYVTWNRVSNVLSHIGSVTAKDFGRVMGLTMKDIINEAAREGHDLWFADNPSAVKKELTILIQNTIRSKWHEVLE

SEQ ID NO: 609 - DNA, 1038 bp, synthetic construct
  misc_feature 1..1038: note = variant of RNA ligase 2 from Klebsiella phage KP179
  source 1..1038: mol_type = other DNA
atgcatcaccatcaccatcacggtggcagcaacatgtttgcgtattattcaagtctggaaaaccattacaataataagttcattgagaagatccgtggtgcaggcttcctgatgcacaccgtggaatgggtagctcgcgagaagattcatggaacgaactttagcgttatcattactccgaccgaaatcgtcccagccaaacgcacagggccgatcttggaaggcgagtcgttctttggtcacgaaattatcatgaaaaaatataaattttccttcgtgaaggtgcagaacatgctgaatgccatggatcttgttagcgtgcaaatctttggcgaatttgcgggtggtggcattcagaaaggcgtcgattacggagacaaagatttctatgtgtttgacatcctgtctgatagcgggaacgagaaagtttactgggatgactatcgcgtcgaatcgttttgcaccacgctcggtctgaaattagcgcctctgctgggacgtggtagtttcgctgaactgtcccagtacccaaacgatttcaaaagcattgtgaaccgttataatgaattggttgatacgacgggcctggaacatgccaataaacacgtctttggtccgcaagcgtcttctgaaactggcgtagcagaaggctacgttcttaaacccgtctatccgatcttctttaataatggtacgcgcgtggcgattaaatgcaagaactccaaattttcggagaaagccaagctggacaaaccaattaaagcgaaagtggaactgacggagaacgataaacgtctgctcgaaatctttagcgagtatgttacctggaatcgcgtcagtaacgtactgtcacatattggctcagtgaccgcaaaagattttgggcgtgttatgggtctgacgatgaaagacatcattaatgaagcagcacgcgaaggccatgatctgttgttcgctgataacccgtcggcggtgaagaaagagctgaccattctcatccagaacacgattcgttccaaatggcacgaagttctggag

SEQ ID NO: 610 - protein, 346 aa, synthetic construct
  REGION 1..346: note = variant of RNA ligase 2 from Klebsiella phage KP179
MHHHHHHGGSNMFAYYSSLENHYNNKFIEKIRGAGFLMHTVEWVAREKIHGTNFSVIITPTEIVPAKRTGPILEGESFFGHEIIMKKYKFSFVKVQNMLNAMDLVSVQIFGEFAGGGIQKGVDYGDKDFYVFDILSDSGNEKVYWDDYRVESFCTTLGLKLAPLLGRGSFAELSQYPNDFKSIVNRYNELVDTTGLEHANKHVFGPQASSETGVAEGYVLKPVYPIFFNNGTRVAIKCKNSKFSEKAKLDKPIKAKVELTENDKRLLEIFSEYVTWNRVSNVLSHIGSVTAKDFGRVMGLTMKDIINEAAREGHDLLFADNPSAVKKELTILIQNTIRSKWHEVLE

SEQ ID NO: 611 - DNA, 1038 bp, synthetic construct
  misc_feature 1..1038: note = variant of RNA ligase 2 from Klebsiella phage KP179
  source 1..1038: mol_type = other DNA
atgcatcaccatcaccatcacggtggcagcaacatgtttgcgtattattcaagtctggaaaaccattacaataataagttcattgagaagatccgtggtgcaggcttcctgatgcacaccgtggaatgggtagctcgcgagaagattcatggaacgaactttagcgttatcattactccgaccgaaatcgtcccagccaaacgcacagggccgatcttggaaggcgagtcgttctttggtcacgaaattatcatgaaaaaatataaagactccttcgtgaaggtgcagaacatgctgaatgccatggatcttgttagcgtgcaaatctttggcgaatttgcgggtggtggcattcagaaaggcgtcgattacggagacaaagatttctatgtgtttgacatcctgtctgatagcgggaacgagaaagtttactgggatgactatcgcgtcgaatcgttttgcaccacgctcggtctgaaattagcgcctctgctgggacgtggtagtttcgctgaactgtcccagtacccaaacgatttcaaaagcattgtgaaccgttataatgaattggttgatacgacgggcctggaacatgccaataaacacgtctttggtccgcaagcgtcttctgaaactggcgtagcagaaggctacgttcttaaacccgtctatccgatcttctttaataatggtacgcgcgtggcgattaaatgcaagaactccaaattttcggagaaagccaagctggacaaaccaattaaagcgaaagtggaactgacggagaacgataaacgtctgctcgaaatctttagcgagtatgttacctggaatcgcgtcagtaacgtactgtcacatattggctcagtgaccgcaaaagattttgggcgtgttatgggtctgacgatgaaagacatcattagggaagcagcacgcgaaggccatgatctgttgttcgctgataacccgtcggcggtgaagaaagagctgaccattctcatccagaacacgattcgttccaaatggcacgaagttctggag

SEQ ID NO: 612 - protein, 346 aa, synthetic construct
  REGION 1..346: note = variant of RNA ligase 2 from Klebsiella phage KP179
MHHHHHHGGSNMFAYYSSLENHYNNKFIEKIRGAGFLMHTVEWVAREKIHGTNFSVIITPTEIVPAKRTGPILEGESFFGHEIIMKKYKDSFVKVQNMLNAMDLVSVQIFGEFAGGGIQKGVDYGDKDFYVFDILSDSGNEKVYWDDYRVESFCTTLGLKLAPLLGRGSFAELSQYPNDFKSIVNRYNELVDTTGLEHANKHVFGPQASSETGVAEGYVLKPVYPIFFNNGTRVAIKCKNSKFSEKAKLDKPIKAKVELTENDKRLLEIFSEYVTWNRVSNVLSHIGSVTAKDFGRVMGLTMKDIIREAAREGHDLLFADNPSAVKKELTILIQNTIRSKWHEVLE

SEQ ID NO: 613 - DNA, 1038 bp, synthetic construct
  misc_feature 1..1038: note = variant of RNA ligase 2 from Klebsiella phage KP179
  source 1..1038: mol_type = other DNA
atgcatcaccatcaccatcacggtggcagcaacatgtttgcgtattattcaagtctggaaaaccattacaataataagttcattgagaagatccgtggtgcaggcttcctgatgcacaccgtggaatgggtagctcgcgagaagattcatggaacgaactttagcgttatcattactccgaccgaaatcgtcccagccaaacgcacagggccgatcttggaaggcgagtcgttctttggtcacgaaattatcatgaaaaaatataaagactccttcgtgaaggtgcagaacatgctgaatgccatggatcttgttagcgtgcaaatctttggcgaatttgcgggtggtggcattcagaaaggcgtcgattacggagacaaagatttctatgtgtttgacatcctgtctgatagcgggaacgagaaagtttactgggatgactatcgcgtcgaatcgttttgcaccacgctcggtctgaaattagcgcctctgctgggacgtggtagtttcgctgaactgtcccagtacccaaacgatttcaaaagcattgtgaaccgttataatgaattggttgatacgacgggcctggaacatgccaataaacacgtctttggtccgcaagcgtcttctgaaactggcgtagcagaaggctacgttcttaaacccgtctatccgatcttctttaataatggtacgcgcgtggcgattaaatgcaagaactccaaattttcggagaaagccaagctggacaaaccaattaaagcgaaagtggaactgacggagaacgataaacgtctgctcgaaatctttagcgagtatgttacctggaatcgcgtcagtaacgtactgtcacatattggctcagtgaccgcaaaagattttgggcgtgttatgggtctgacgatgaaagacatcattaatgaagcagcacgcgaaggccatgatctgggtttcgctgataacccgtcggcggtgaagaaagagctgaccattctcatccagaacacgattcgttccaaatggcacgaagttctggag

SEQ ID NO: 614 - protein, 346 aa, synthetic construct
  REGION 1..346: note = variant of RNA ligase 2 from Klebsiella phage KP179
MHHHHHHGGSNMFAYYSSLENHYNNKFIEKIRGAGFLMHTVEWVAREKIHGTNFSVIITPTEIVPAKRTGPILEGESFFGHEIIMKKYKDSFVKVQNMLNAMDLVSVQIFGEFAGGGIQKGVDYGDKDFYVFDILSDSGNEKVYWDDYRVESFCTTLGLKLAPLLGRGSFAELSQYPNDFKSIVNRYNELVDTTGLEHANKHVFGPQASSETGVAEGYVLKPVYPIFFNNGTRVAIKCKNSKFSEKAKLDKPIKAKVELTENDKRLLEIFSEYVTWNRVSNVLSHIGSVTAKDFGRVMGLTMKDIINEAAREGHDLGFADNPSAVKKELTILIQNTIRSKWHEVLE

SEQ ID NO: 615 - DNA, 1038 bp, synthetic construct
  misc_feature 1..1038: note = variant of RNA ligase 2 from Klebsiella phage KP179
  source 1..1038: mol_type = other DNA
atgcatcaccatcaccatcacggtggcagcaacatgtttgcgtattattcaagtctggaaaaccattacaataataagttcattgagaagatccgtggtgcaggcttcctgatgcacaccgtggaatgggtagctcgcgagaagattcatggaacgaactttagcgttatcattactccgaccgaaatcgtcccagccaaacgcacagggccgatcttggaaggcgagtcgttctttggtcacgaaattatcatgaaaaaatataaagactccttcgtgaaggtgcagaacatgctgacggccatggatcttgttagcgtgcaaatctttggcgaatttgcgggtggtggcattcagaaaggcgtcgattacggagacaaagatttctatgtgtttgacatcctgtctgatagcgggaacgagaaagtttactgggatgactatcgcgtcgaatcgttttgcaccacgctcggtctgaaattagcgcctctgctgggacgtggtagtttcgctgaactgtcccagtacccaaacgatttcaaaagcattgtgaaccgttataatgaattggttgatacgacgggcctggaacatgccaataaacacgtctttggtccgcaagcgtcttctgaaactggcgtagcagaaggctacgttcttaaacccgtctatccgatcttctttaataatggtacgcgcgtggcgattaaatgcaagaactccaaattttcggagaaagccaagctggacaaaccaattaaagcgaaagtggaactgacggagaacgataaacgtctgctcgaaatctttagcgagtatgttacctggaatcgcgtcagtaacgtactgtcacatattggctcagtgaccgcaaaagattttgggcgtgttatgggtctgacgatgaaagacatcattaatgaagcagcacgcgaaggccatgatctgttgttcgctgataacccgtcggcggtgaagaaagagctgaccattctcatccagaacacgattcgttccaaatggcacgaagttctggag

SEQ ID NO: 616 - protein, 346 aa, synthetic construct
  REGION 1..346: note = variant of RNA ligase 2 from Klebsiella phage KP179
MHHHHHHGGSNMFAYYSSLENHYNNKFIEKIRGAGFLMHTVEWVAREKIHGTNFSVIITPTEIVPAKRTGPILEGESFFGHEIIMKKYKDSFVKVQNMLTAMDLVSVQIFGEFAGGGIQKGVDYGDKDFYVFDILSDSGNEKVYWDDYRVESFCTTLGLKLAPLLGRGSFAELSQYPNDFKSIVNRYNELVDTTGLEHANKHVFGPQASSETGVAEGYVLKPVYPIFFNNGTRVAIKCKNSKFSEKAKLDKPIKAKVELTENDKRLLEIFSEYVTWNRVSNVLSHIGSVTAKDFGRVMGLTMKDIINEAAREGHDLLFADNPSAVKKELTILIQNTIRSKWHEVLE

SEQ ID NO: 617 - DNA, 1038 bp, synthetic construct
  misc_feature 1..1038: note = variant of RNA ligase 2 from Klebsiella phage KP179
  source 1..1038: mol_type = other DNA
atgcatcaccatcaccatcacggtggcagcaacatgtttgcgtattattcaagtctggaaaaccattacaataataagttcattgagaagatccgtggtgcaggcttcctgatgcacaccgtggaatgggtagctcgcgagaagattcatggaacgaactttagcgttatcattactccgaccgaaatcgtcccagccaaacgcacagggccgatcttggaaggcgagtcgttctttggtcacgaaattatcatgaaaaaatataaagactccttcgtgaaggtgcagaacatgctgttggccatggatcttgttagcgtgcaaatctttggcgaatttgcgggtggtggcattcagaaaggcgtcgattacggagacaaagatttctatgtgtttgacatcctgtctgatagcgggaacgagaaagtttactgggatgactatcgcgtcgaatcgttttgcaccacgctcggtctgaaattagcgcctctgctgggacgtggtagtttcgctgaactgtcccagtacccaaacgatttcaaaagcattgtgaaccgttataatgaattggttgatacgacgggcctggaacatgccaataaacacgtctttggtccgcaagcgtcttctgaaactggcgtagcagaaggctacgttcttaaacccgtctatccgatcttctttaataatggtacgcgcgtggcgattaaatgcaagaactccaaattttcggagaaagccaagctggacaaaccaattaaagcgaaagtggaactgacggagaacgataaacgtctgctcgaaatctttagcgagtatgttacctggaatcgcgtcagtaacgtactgtcacatattggctcagtgaccgcaaaagattttgggcgtgttatgggtctgacgatgaaagacatcattaatgaagcagcacgcgaaggccatgatctgttgttcgctgataacccgtcggcggtgaagaaagagctgaccattctcatccagaacacgattcgttccaaatggcacgaagttctggag

SEQ ID NO: 618 - protein, 346 aa, synthetic construct
  REGION 1..346: note = variant of RNA ligase 2 from Klebsiella phage KP179
MHHHHHHGGSNMFAYYSSLENHYNNKFIEKIRGAGFLMHTVEWVAREKIHGTNFSVIITPTEIVPAKRTGPILEGESFFGHEIIMKKYKDSFVKVQNMLLAMDLVSVQIFGEFAGGGIQKGVDYGDKDFYVFDILSDSGNEKVYWDDYRVESFCTTLGLKLAPLLGRGSFAELSQYPNDFKSIVNRYNELVDTTGLEHANKHVFGPQASSETGVAEGYVLKPVYPIFFNNGTRVAIKCKNSKFSEKAKLDKPIKAKVELTENDKRLLEIFSEYVTWNRVSNVLSHIGSVTAKDFGRVMGLTMKDIINEAAREGHDLLFADNPSAVKKELTILIQNTIRSKWHEVLE

SEQ ID NO: 619 - DNA, 1038 bp, synthetic construct
  misc_feature 1..1038: note = variant of RNA ligase 2 from Klebsiella phage KP179
  source 1..1038: mol_type = other DNA
atgcatcaccatcaccatcacggtggcagcaacatgtttgcgtattattcaagtctggaaaaccattacaataataagttcattgagaagatccgtggtgcaggcttcctgatgcacaccgtggaatgggtagctcgcgagaagattcatggaacgaactttagcgttatcattactccgaccgaaatcgtcccagccaaacgcacagggccgatcttggaaggcgagtcgttctttggtcacgaaattatcatgaaaaaatataaagactccttcgtgaaggtgcagaacatgctgaatgccatggatcttgttagcgtgcaaatctttggcgaatttgcgggtggtggcattcagaaaggcgtcgattacggagacaaagatttctatgtgtttgacatcctgtctgatagcgggaacgagaaagtttactgggatgactatcgcgtcgaatcgttttgcaccacgctcggtctgaaattagcgcctctgctgggacgtggtagtttcgctgaactgtcccagtacccaaacgatttcaaaagcattgtgaaccgttataatgaattggttgatacgggtggcctggaacatgccaataaacacgtctttggtccgcaagcgtcttctgaaactggcgtagcagaaggctacgttcttaaacccgtctatccgatcttctttaataatggtacgcgcgtggcgattaaatgcaagaactccaaattttcggagaaagccaagctggacaaaccaattaaagcgaaagtggaactgacggagaacgataaacgtctgctcgaaatctttagcgagtatgttacctggaatcgcgtcagtaacgtactgtcacatattggctcagtgaccgcaaaagattttgggcgtgttatgggtctgacgatgaaagacatcattaatgaagcagcacgcgaaggccatgatctgttgttcgctgataacccgtcggcggtgaagaaagagctgaccattctcatccagaacacgattcgttccaaatggcacgaagttctggag

SEQ ID NO: 620 - protein, 346 aa, synthetic construct
  REGION 1..346: note = variant of RNA ligase 2 from Klebsiella phage KP179
MHHHHHHGGSNMFAYYSSLENHYNNKFIEKIRGAGFLMHTVEWVAREKIHGTNFSVIITPTEIVPAKRTGPILEGESFFGHEIIMKKYKDSFVKVQNMLNAMDLVSVQIFGEFAGGGIQKGVDYGDKDFYVFDILSDSGNEKVYWDDYRVESFCTTLGLKLAPLLGRGSFAELSQYPNDFKSIVNRYNELVDTGGLEHANKHVFGPQASSETGVAEGYVLKPVYPIFFNNGTRVAIKCKNSKFSEKAKLDKPIKAKVELTENDKRLLEIFSEYVTWNRVSNVLSHIGSVTAKDFGRVMGLTMKDIINEAAREGHDLLFADNPSAVKKELTILIQNTIRSKWHEVLE

SEQ ID NO: 621 - DNA, 1038 bp, synthetic construct
  misc_feature 1..1038: note = variant of RNA ligase 2 from Klebsiella phage KP179
  source 1..1038: mol_type = other DNA
atgcatcaccatcaccatcacggtggcagcaacatgtttgcgtattattcaagtctggaaaaccattacaataataagttcattgagaagatccgtggtgcaggcttcctgatgcacaccgtggaatgggtagctcgcgagaagattcatggaacgaactttagcgttatcattactccgaccgaaatcgtcccagccaaacgcacagggccgatcttggaaggcgagtcgttctttggtcacgaaattatcatgaaaaaatataaagactccttcgtgaaggtgcagaacatgctgaatgccatggggcttgttagcgtgcaaatctttggcgaatttgcgggtggtggcattcagaaaggcgtcgattacggagacaaagatttctatgtgtttgacatcctgtctgatagcgggaacgagaaagtttactgggatgactatcgcgtcgaatcgttttgcaccacgctcggtctgaaattagcgcctctgctgggacgtggtagtttcgctgaactgtcccagtacccaaacgatttcaaaagcattgtgaaccgttataatgaattggttgatacgacgggcctggaacatgccaataaacacgtctttggtccgcaagcgtcttctgaaactggcgtagcagaaggctacgttcttaaacccgtctatccgatcttctttaataatggtacgcgcgtggcgattaaatgcaagaactccaaattttcggagaaagccaagctggacaaaccaattaaagcgaaagtggaactgacggagaacgataaacgtctgctcgaaatctttagcgagtatgttacctggaatcgcgtcagtaacgtactgtcacatattggctcagtgaccgcaaaagattttgggcgtgttatgggtctgacgatgaaagacatcattaatgaagcagcacgcgaaggccatgatctgttgttcgctgataacccgtcggcggtgaagaaagagctgaccattctcatccagaacacgattcgttccaaatggcacgaagttctggag

SEQ ID NO: 622 - protein, 346 aa, synthetic construct
  REGION 1..346: note = variant of RNA ligase 2 from Klebsiella phage KP179
MHHHHHHGGSNMFAYYSSLENHYNNKFIEKIRGAGFLMHTVEWVAREKIHGTNFSVIITPTEIVPAKRTGPILEGESFFGHEIIMKKYKDSFVKVQNMLNAMGLVSVQIFGEFAGGGIQKGVDYGDKDFYVFDILSDSGNEKVYWDDYRVESFCTTLGLKLAPLLGRGSFAELSQYPNDFKSIVNRYNELVDTTGLEHANKHVFGPQASSETGVAEGYVLKPVYPIFFNNGTRVAIKCKNSKFSEKAKLDKPIKAKVELTENDKRLLEIFSEYVTWNRVSNVLSHIGSVTAKDFGRVMGLTMKDIINEAAREGHDLLFADNPSAVKKELTILIQNTIRSKWHEVLE

SEQ ID NO: 623 - DNA, 1038 bp, synthetic construct
  misc_feature 1..1038: note = variant of RNA ligase 2 from Klebsiella phage KP179
  source 1..1038: mol_type = other DNA
atgcatcaccatcaccatcacggtggcagcaacatgtttgcgtattattcaagtctggaaaaccattacaataataagttcattgagaagatccgtggtgcaggcttcctgatgcacaccgtggaatgggtagctcgcgagaagattcatggaacgaactttagcgttatcattactccgaccgcgatcgtcccagccaaacgcacagggccgatcttggaaggcgagtcgttctttggtcacgaaattatcatgaaaaaatataaagactccttcgtgaaggtgcagaacatgctgaatgccatggatcttgttagcgtgcaaatctttggcgaatttgcgggtggtggcattcagaaaggcgtcgattacggagacaaagatttctatgtgtttgacatcctgtctgatagcgggaacgagaaagtttactgggatgactatcgcgtcgaatcgttttgcaccacgctcggtctgaaattagcgcctctgctgggacgtggtagtttcgctgaactgtcccagtacccaaacgatttcaaaagcattgtgaaccgttataatgaattggttgatacgacgggcctggaacatgccaataaacacgtctttggtccgcaagcgtcttctgaaactggcgtagcagaaggctacgttcttaaacccgtctatccgatcttctttaataatggtacgcgcgtggcgattaaatgcaagaactccaaattttcggagaaagccaagctggacaaaccaattaaagcgaaagtggaactgacggagaacgataaacgtctgctcgaaatctttagcgagtatgttacctggaatcgcgtcagtaacgtactgtcacatattggctcagtgaccgcaaaagattttgggcgtgttatgggtctgacgatgaaagacatcattaatgaagcagcacgcgaaggccatgatctgttgttcgctgataacccgtcggcggtgaagaaagagctgaccattctcatccagaacacgattcgttccaaatggcacgaagttctggag

SEQ ID NO: 624 - protein, 346 aa, synthetic construct
  REGION 1..346: note = variant of RNA ligase 2 from Klebsiella phage KP179
MHHHHHHGGSNMFAYYSSLENHYNNKFIEKIRGAGFLMHTVEWVAREKIHGTNFSVIITPTAIVPAKRTGPILEGESFFGHEIIMKKYKDSFVKVQNMLNAMDLVSVQIFGEFAGGGIQKGVDYGDKDFYVFDILSDSGNEKVYWDDYRVESFCTTLGLKLAPLLGRGSFAELSQYPNDFKSIVNRYNELVDTTGLEHANKHVFGPQASSETGVAEGYVLKPVYPIFFNNGTRVAIKCKNSKFSEKAKLDKPIKAKVELTENDKRLLEIFSEYVTWNRVSNVLSHIGSVTAKDFGRVMGLTMKDIINEAAREGHDLLFADNPSAVKKELTILIQNTIRSKWHEVLE

SEQ ID NO: 625 - DNA, 1038 bp, synthetic construct
  misc_feature 1..1038: note = variant of RNA ligase 2 from Klebsiella phage KP179
  source 1..1038: mol_type = other DNA
atgcatcaccatcaccatcacggtggcagcaacatgtttgcgtattattcaagtctggaaaaccattacaataataagttcattgagaagatccgtggtgcaggcttcctgatgcacaccgtggaatgggtagctcgcgagaagattcatggaacgaactttagcgttatcattactccgaccgaaatcgtcccagccaaacgcacagggccgatcttggaaggcgagtcgttctttggtcacgaaattatcatgaaaaaatataaagactccttcgtgaaggtgcagaacatgctgaatgccatggatcttgttagcgtgcaaatctttggcgaatttgcgggtggtggcattcagaaaggcgtcgattacggagacaaagatttctatgtgtttgacatcctgtctgatagcgggaacgagaaagtttactgggatgactatcgcgtcgaatcgttttgcaccacgctcggtctgaaattagcgcctctgctgggacgtggtagtttcgctgaactgtcccagtacccaaacgatttcaaaagcattgtgaaccgttataatgaattggttgatacgacgggcctggaacatgccaataaacacgtctttggtccgcaagcgtctggggaaactggcgtagcagaaggctacgttcttaaacccgtctatccgatcttctttaataatggtacgcgcgtggcgattaaatgcaagaactccaaattttcggagaaagccaagctggacaaaccaattaaagcgaaagtggaactgacggagaacgataaacgtctgctcgaaatctttagcgagtatgttacctggaatcgcgtcagtaacgtactgtcacatattggctcagtgaccgcaaaagattttgggcgtgttatgggtctgacgatgaaagacatcattaatgaagcagcacgcgaaggccatgatctgttgttcgctgataacccgtcggcggtgaagaaagagctgaccattctcatccagaacacgattcgttccaaatggcacgaagttctggag

SEQ ID NO: 626 - protein, 346 aa, synthetic construct
  REGION 1..346: note = variant of RNA ligase 2 from Klebsiella phage KP179
MHHHHHHGGSNMFAYYSSLENHYNNKFIEKIRGAGFLMHTVEWVAREKIHGTNFSVIITPTEIVPAKRTGPILEGESFFGHEIIMKKYKDSFVKVQNMLNAMDLVSVQIFGEFAGGGIQKGVDYGDKDFYVFDILSDSGNEKVYWDDYRVESFCTTLGLKLAPLLGRGSFAELSQYPNDFKSIVNRYNELVDTTGLEHANKHVFGPQASGETGVAEGYVLKPVYPIFFNNGTRVAIKCKNSKFSEKAKLDKPIKAKVELTENDKRLLEIFSEYVTWNRVSNVLSHIGSVTAKDFGRVMGLTMKDIINEAAREGHDLLFADNPSAVKKELTILIQNTIRSKWHEVLE

SEQ ID NO: 627 - DNA, 1038 bp, synthetic construct
  misc_feature 1..1038: note = variant of RNA ligase 2 from Klebsiella phage KP179
  source 1..1038: mol_type = other DNA
atgcatcaccatcaccatcacggtggcagcaacatgtttgcgtattattcaagtctggaaaaccattacaataataagttcattgagaagatccgtggtgcaggcttcctgatgcacaccgtggaatgggtagctcgcgagaagattcatggaacgaactttagcgttatcattactccgaccgaaatcgtcccagccaaacgcacagggccgatcttggaaggcgagtcgttctttggtcacgaaattatcatgaaaaaatataaagactccttcgtgaaggtgcagaacatgctgaatgccatggatcttcggagcgtgcaaatctttggcgaatttgcgggtggtggcattcagaaaggcgtcgattacggagacaaagatttctatgtgtttgacatcctgtctgatagcgggaacgagaaagtttactgggatgactatcgcgtcgaatcgttttgcaccacgctcggtctgaaattagcgcctctgctgggacgtggtagtttcgctgaactgtcccagtacccaaacgatttcaaaagcattgtgaaccgttataatgaattggttgatacgacgggcctggaacatgccaataaacacgtctttggtccgcaagcgtcttctgaaactggcgtagcagaaggctacgttcttaaacccgtctatccgatcttctttaataatggtacgcgcgtggcgattaaatgcaagaactccaaattttcggagaaagccaagctggacaaaccaattaaagcgaaagtggaactgacggagaacgataaacgtctgctcgaaatctttagcgagtatgttacctggaatcgcgtcagtaacgtactgtcacatattggctcagtgaccgcaaaagattttgggcgtgttatgggtctgacgatgaaagacatcattaatgaagcagcacgcgaaggccatgatctgttgttcgctgataacccgtcggcggtgaagaaagagctgaccattctcatccagaacacgattcgttccaaatggcacgaagttctggag

SEQ ID NO: 628 - protein, 346 aa, synthetic construct
  REGION 1..346: note = variant of RNA ligase 2 from Klebsiella phage KP179
MHHHHHHGGSNMFAYYSSLENHYNNKFIEKIRGAGFLMHTVEWVAREKIHGTNFSVIITPTEIVPAKRTGPILEGESFFGHEIIMKKYKDSFVKVQNMLNAMDLRSVQIFGEFAGGGIQKGVDYGDKDFYVFDILSDSGNEKVYWDDYRVESFCTTLGLKLAPLLGRGSFAELSQYPNDFKSIVNRYNELVDTTGLEHANKHVFGPQASSETGVAEGYVLKPVYPIFFNNGTRVAIKCKNSKFSEKAKLDKPIKAKVELTENDKRLLEIFSEYVTWNRVSNVLSHIGSVTAKDFGRVMGLTMKDIINEAAREGHDLLFADNPSAVKKELTILIQNTIRSKWHEVLE

SEQ ID NO: 629 - DNA, 1038 bp, synthetic construct
  misc_feature 1..1038: note = variant of RNA ligase 2 from Klebsiella phage KP179
  source 1..1038: mol_type = other DNA
atgcatcaccatcaccatcacggtggcagcaacatgtttgcgtattattcaagtctggaaaaccattacaataataagttcattgagaagatccgtggtgcaggcttcctgatgcacaccgtggaatgggtagctcgcgagaagattcatggaacgaactttagcgttatcattactccggcggaaatcgtcccagccaaacgcacagggccgatcttggaaggcgagtcgttctttggtcacgaaattatcatgaaaaaatataaagactccttcgtgaaggtgcagaacatgctgaatgccatggatcttgttagcgtgcaaatctttggcgaatttgcgggtggtggcattcagaaaggcgtcgattacggagacaaagatttctatgtgtttgacatcctgtctgatagcgggaacgagaaagtttactgggatgactatcgcgtcgaatcgttttgcaccacgctcggtctgaaattagcgcctctgctgggacgtggtagtttcgctgaactgtcccagtacccaaacgatttcaaaagcattgtgaaccgttataatgaattggttgatacgacgggcctggaacatgccaataaacacgtctttggtccgcaagcgtcttctgaaactggcgtagcagaaggctacgttcttaaacccgtctatccgatcttctttaataatggtacgcgcgtggcgattaaatgcaagaactccaaattttcggagaaagccaagctggacaaaccaattaaagcgaaagtggaactgacggagaacgataaacgtctgctcgaaatctttagcgagtatgttacctggaatcgcgtcagtaacgtactgtcacatattggctcagtgaccgcaaaagattttgggcgtgttatgggtctgacgatgaaagacatcattaatgaagcagcacgcgaaggccatgatctgttgttcgctgataacccgtcggcggtgaagaaagagctgaccattctcatccagaacacgattcgttccaaatggcacgaagttctggag

SEQ ID NO: 630 - protein, 346 aa, synthetic construct
  REGION 1..346: note = variant of RNA ligase 2 from Klebsiella phage KP179
MHHHHHHGGSNMFAYYSSLENHYNNKFIEKIRGAGFLMHTVEWVAREKIHGTNFSVIITPAEIVPAKRTGPILEGESFFGHEIIMKKYKDSFVKVQNMLNAMDLVSVQIFGEFAGGGIQKGVDYGDKDFYVFDILSDSGNEKVYWDDYRVESFCTTLGLKLAPLLGRGSFAELSQYPNDFKSIVNRYNELVDTTGLEHANKHVFGPQASSETGVAEGYVLKPVYPIFFNNGTRVAIKCKNSKFSEKAKLDKPIKAKVELTENDKRLLEIFSEYVTWNRVSNVLSHIGSVTAKDFGRVMGLTMKDIINEAAREGHDLLFADNPSAVKKELTILIQNTIRSKWHEVLE

SEQ ID NO: 631 - DNA, 1038 bp, synthetic construct
  misc_feature 1..1038: note = variant of RNA ligase 2 from Klebsiella phage KP179
  source 1..1038: mol_type = other DNA
atgcatcaccatcaccatcacggtggcagcaacacgtttgcgtattattcaagtctggaaaaccattacaataataagttcattgagaagatccgtggtgcaggcttcctgatgcacaccgtggaatgggtagctcgcgagaagattcatggaacgaactttagcgttatcattactccgaccgaaatcgtcccagccaaacgcacagggccgatcttggaaggcgagtcgttctttggtcacgaaattatcatgaaaaaatataaagactccttcgtgaaggtgcagaacatgctgaacgctatggatcttgttagcgtgcaaatctttggcgaatttgcgggtggtggcattcagaaaggcgtcgattacggagacaaagatttctatgtgtttgacatcctgtctgatagcgggaacgggaaagtttactgggatgactatcgcgtcgaatcgttttgcaccacgctcggtctgaaattagcgcctctgctgggacgtggtagtttcgctgaactgtcccagtacccaaacgatttcaaaagcattgtgaaccgttataatgaattggttgatacgacgggcctgtggcatgccaataaacacgtctttggtccgcaagcgtcttctgaaactggcgtagcagaaggctacgttcttaaacccgtctatccgatcttctttaataccggtacgcgcgtggcgattaaatgcaagaactccaaattttcggagaaagccaagctggactcgccaattaaggcgaaggtggaactgacggagaacgataaacgtctgctcgaaatctttagcgagtatgttacctggaatcgcgtcagtaacgtactgtcacatattggctcagtgaccgcaaaagattttgggcgtgttatgggtctgacgatgaaagacatcattaatgaagcagcacgcgaaggccatgatctgttgttcgctgataacccgtcggcggtgctgagcgagctgaccattctcatccagaacacgattcgttccaaatggcacgaagttctggag

SEQ ID NO: 632 - protein, 346 aa, synthetic construct
  REGION 1..346: note = variant of RNA ligase 2 from Klebsiella phage KP179
MHHHHHHGGSNTFAYYSSLENHYNNKFIEKIRGAGFLMHTVEWVAREKIHGTNFSVIITPTEIVPAKRTGPILEGESFFGHEIIMKKYKDSFVKVQNMLNAMDLVSVQIFGEFAGGGIQKGVDYGDKDFYVFDILSDSGNGKVYWDDYRVESFCTTLGLKLAPLLGRGSFAELSQYPNDFKSIVNRYNELVDTTGLWHANKHVFGPQASSETGVAEGYVLKPVYPIFFNTGTRVAIKCKNSKFSEKAKLDSPIKAKVELTENDKRLLEIFSEYVTWNRVSNVLSHIGSVTAKDFGRVMGLTMKDIINEAAREGHDLLFADNPSAVLSELTILIQNTIRSKWHEVLE

SEQ ID NO: 633 - DNA, 1038 bp, synthetic construct
  misc_feature 1..1038: note = variant of RNA ligase 2 from Klebsiella phage KP179
  source 1..1038: mol_type = other DNA
atgcatcaccatcaccatcacggtggcagcaacacgtttgcgtattattcaagtctggaaaaccattacaataataagttcattgagaagatccgtggtgcaggcttcctgatgcacaccgtggaatgggtagctcgcgagaagattcatggaacgaactttagcgttatcattactccgaccgaaatcgtgccagccaaacgcacagggccgatcttggaaggcgagtcgttctttggtcacgaaattatcatgaaaaaatataaagactccttcgtgaaggtgcagaacatgctggtggttatggatcttgttagcgtgcaaatctttggcgaatttgcgggtggtggcattcagaaaggcgtcgattacggagacaaagatttctatgtgtttgacatcctgtctgatagcgggaacgagaaagtttactgggatgactatcgcgtcgaatcgttttgcaccacgctcggtctgaaattagcgcctctgctgggacgtggtagtttcgctgaactgtcccagtacccaaacgatttcaaaagcattgtgaaccgttataatgaattggttgatacgacgggcctggaacatgccaataaacacgtctttggtccgcaagcgtcttctgaaactggcgtagcagaaggctacgttcttaaacccgtctatccgatcttctttaataccggtacgcgcgtggcgattaaatgcaagaactccaaattttcggagaaagccaagctggactcgccaattaaggcgaaggtggaactgacggagaacgataaacgtctgctcgaaatctttagcgagtatgttacctggaatcgcgtcagtaacgtactgtcacatattggctcagtgaccgcaaaagattttgggcgtgttatgggtctgacgatgaaagacatcattaatgaagcagcacgcgaaggccatgatctgttgttcgctgataacccgtcggcggtgaagaaagagctgaccattctcatccagaacacgattctgtccaaatggcacgaagttctggag

SEQ ID NO: 634 - protein, 346 aa, synthetic construct
  REGION 1..346: note = variant of RNA ligase 2 from Klebsiella phage KP179
MHHHHHHGGSNTFAYYSSLENHYNNKFIEKIRGAGFLMHTVEWVAREKIHGTNFSVIITPTEIVPAKRTGPILEGESFFGHEIIMKKYKDSFVKVQNMLVVMDLVSVQIFGEFAGGGIQKGVDYGDKDFYVFDILSDSGNEKVYWDDYRVESFCTTLGLKLAPLLGRGSFAELSQYPNDFKSIVNRYNELVDTTGLEHANKHVFGPQASSETGVAEGYVLKPVYPIFFNTGTRVAIKCKNSKFSEKAKLDSPIKAKVELTENDKRLLEIFSEYVTWNRVSNVLSHIGSVTAKDFGRVMGLTMKDIINEAAREGHDLLFADNPSAVKKELTILIQNTILSKWHEVLE

SEQ ID NO: 635 - DNA, 1038 bp, synthetic construct
  misc_feature 1..1038: note = variant of RNA ligase 2 from Klebsiella phage KP179
  source 1..1038: mol_type = other DNA
atgcatcaccatcaccatcacggtggcagcaacacgtttgcgtattattcaagtctggaaaaccattacaataataagttcattgagaagatccgtggtgcaggcttcctgatgcacaccgtggaatgggtagctcgcgagaagattcatggaacgaactttagcgttatcattactccgaccgaaatcgtcccagccaaacgcacagggccgatcttggaaggcgagtcgttctttggtcacgaaattatcatgaaaaaatataaagactccttcgtgaaggtgcagaacatgctgaatgccatggatcttgttagcgtgcaaatctttggcgaatttgcgggtggtggcattcagaaaggcgtcgattacggagacaaagatttctatgtgtttgacatcctgtctgatagcgggaacgggaaagtttactgggatgactatcgcgtcgaatcgttttgcaccacgctcggtctgaaattagcgcctctgctgggacgtggtagtttcgctgaactgtcccagtacccaaacgatttcaaaagcattgtgaaccgttataatgaattggttgatacgacgggcctggagatggccaataaacacgtctttggtccgcaagcgtcttctgaaactggcgtagcagaaggctacgttcttaaacccgtctatccgatcttctttaataccggtacgcgcgtggcgattaaatgcaagaactccaaattttcggagaaagccaagctggactcgccaattaaggcgaaggtggaactgacggagaacgataaacgtctgctcgaaatctttagcgagtatgttacctggaatcgcgtcagtaacgtactgtcacatattggctcagtgaccgcaaaagattttgggcgtgttatgggtctgacgatgaaagacatcatcaatgaagcagcacgcgaaggccatgatctgttgttcgctgataacccgtcggcggtgctgaaggagctgaccattctcatccagaacacgattcgttccaaatggcacgaagttctggag

SEQ ID NO: 636 - protein, 346 aa, synthetic construct
  REGION 1..346: note = variant of RNA ligase 2 from Klebsiella phage KP179
MHHHHHHGGSNTFAYYSSLENHYNNKFIEKIRGAGFLMHTVEWVAREKIHGTNFSVIITPTEIVPAKRTGPILEGESFFGHEIIMKKYKDSFVKVQNMLNAMDLVSVQIFGEFAGGGIQKGVDYGDKDFYVFDILSDSGNGKVYWDDYRVESFCTTLGLKLAPLLGRGSFAELSQYPNDFKSIVNRYNELVDTTGLEMANKHVFGPQASSETGVAEGYVLKPVYPIFFNTGTRVAIKCKNSKFSEKAKLDSPIKAKVELTENDKRLLEIFSEYVTWNRVSNVLSHIGSVTAKDFGRVMGLTMKDIINEAAREGHDLLFADNPSAVLKELTILIQNTIRSKWHEVLE

SEQ ID NO: 637 - DNA, 1038 bp, synthetic construct
  misc_feature 1..1038: note = variant of RNA ligase 2 from Klebsiella phage KP179
  source 1..1038: mol_type = other DNA
atgcatcaccatcaccatcacggtggcagcaacacgtttgcgtattattcaagtctggaaaaccattacaataataagttcattgagaagatccgtggtgcaggcttcctgatgcacaccgtggaatgggtagctcgcgagaagattcatggaacgaactttagcgttatcattactccgaccgaaatctggccagccaaacgcacagggccgatcttggaaggcgagtcgttctttggtcacgaaattatcatgaaaaaatataaagactccttcgtgaaggtgcagaacatgctggtggttatggatcttgttagcgtgcaaatctttggcgaatttgcgggtggtggcattcagaaaggcgtcgattacggagacaaagatttctatgtgtttgacatcctgtctgatagcgggaacgagaaagtttactgggatgactatcgcgtcgaatcgttttgcaccacgctcggtctgaaattagcgcctctgctgggacgtggtagtttcgctgaactgtcccagtacccaaacgatttcaaaagcattgtgaaccgttataatgaattggttgatacgacgggcctggagcacgccaataaacacgtctttggtccgcaagcgtcttctgaaactggcgtagcagaaggctacgttcttaaacccgtctatccgatcttctttaataccggtacgcgcgtggcgattaaatgcaagaactccaaattttcggagaaagccaagctggactcgccaattaaggcgaaggtggaactgacggagaacgataaacgtctgctcgaaatctttagcgagtatgttacctggaatcgcgtcagtaacgtactgtcacatattggctcagtgaccgcaaaagattttgggcgtgttatgggtctgacgatgaaagacatcattaatgaagcagcacgcgaaggccatgatctgttgttcgctgataacccgtcggcggtgaagaaagagctgaccattctcatccagaacacgattcgttccaaatggcacgaagttctggag

SEQ ID NO: 638 - protein, 346 aa, synthetic construct
  REGION 1..346: note = variant of RNA ligase 2 from Klebsiella phage KP179
MHHHHHHGGSNTFAYYSSLENHYNNKFIEKIRGAGFLMHTVEWVAREKIHGTNFSVIITPTEIWPAKRTGPILEGESFFGHEIIMKKYKDSFVKVQNMLVVMDLVSVQIFGEFAGGGIQKGVDYGDKDFYVFDILSDSGNEKVYWDDYRVESFCTTLGLKLAPLLGRGSFAELSQYPNDFKSIVNRYNELVDTTGLEHANKHVFGPQASSETGVAEGYVLKPVYPIFFNTGTRVAIKCKNSKFSEKAKLDSPIKAKVELTENDKRLLEIFSEYVTWNRVSNVLSHIGSVTAKDFGRVMGLTMKDIINEAAREGHDLLFADNPSAVKKELTILIQNTIRSKWHEVLE

SEQ ID NO: 639 - DNA, 1038 bp, synthetic construct
  misc_feature 1..1038: note = variant of RNA ligase 2 from Klebsiella phage KP179
  source 1..1038: mol_type = other DNA
atgcatcaccatcaccatcacggtggcagcaacacgtttgcgtattattcaagtctggaaaaccattacaataataagttcattgagaagatccgtggtgcaggcttcctgatgcacaccgtggaatgggtagctcgcgagaagattcatggaacgaactttagcgttatcattactccgaccgaaatcgtgccagccaaacgcacagggccgatcttggaaggcgagtcgttctttggtcacgaaattatcatgaaaaaatataaagactccttcgtgaaggtgcagaacatgctggtggctatggatcttgttagcgtgcaaatctttggcgaatttgcgggtggtggcattcagaaaggcgtcgattacggagacaaagatttctatgtgtttgacatcctgtctgatagcgggaacgagaaagtttactgggatgactatcgcgtcgaatcgttttgcaccacgctcggtctgaaattagcgcctctgctgggacgtggtagtttcgctgaactgtcccagtacccaaacgatttcaaaagcattgtgaaccgttataatgaattggttgatacgacgggcctggagcacgccaataaacacgtctttggtccgcaagcgtcttctgaaactggcgtagcagaaggctacgttcttaaacccgtctatccgatcttctttaataccggtacgcgcgtggcgattaaatgcaagaactccaaattttcggagaaagccaagctggactcgccaattaaggcgaaggtggaactgacggagaacgataaacgtctgctcgaaatctttagcgagtatgttacctggaatcgcgtcagtaacgtactgtcacatattggctcagtgaccgcaaaagattttgggcgtgttatgggtctgacgatgaaagacatcattaatgaagcagcacgcgaaggccatgatctgttgttcgctgataacccgtcggcggtgaagaaagagctgaccattctcatccagaacacgattctgtccaaatggcacgaagttctggag

SEQ ID NO: 640 - protein, 346 aa, synthetic construct
  REGION 1..346: note = variant of RNA ligase 2 from Klebsiella phage KP179
MHHHHHHGGSNTFAYYSSLENHYNNKFIEKIRGAGFLMHTVEWVAREKIHGTNFSVIITPTEIVPAKRTGPILEGESFFGHEIIMKKYKDSFVKVQNMLVAMDLVSVQIFGEFAGGGIQKGVDYGDKDFYVFDILSDSGNEKVYWDDYRVESFCTTLGLKLAPLLGRGSFAELSQYPNDFKSIVNRYNELVDTTGLEHANKHVFGPQASSETGVAEGYVLKPVYPIFFNTGTRVAIKCKNSKFSEKAKLDSPIKAKVELTENDKRLLEIFSEYVTWNRVSNVLSHIGSVTAKDFGRVMGLTMKDIINEAAREGHDLLFADNPSAVKKELTILIQNTILSKWHEVLE

SEQ ID NO: 641 - DNA, 1038 bp, synthetic construct
  misc_feature 1..1038: note = variant of RNA ligase 2 from Klebsiella phage KP179
  source 1..1038: mol_type = other DNA
atgcatcaccatcaccatcacggtggcagcaacacgtttgcgtattattcaagtctggaaaaccattacaataataagttcattgagaagatccgtggtgcaggcttcctgatgcacaccgtggaatgggtagctcgcgagaagattcatggaacgaactttagcgttatcattactccgaccgaaatcgtcccagccaaacgcacagggccgatcttggaaggcgagtcgttctttggtcacgaaattatcatgaaaaaatataaagactccttcgtgaaggtgcagaacatgctgaacgttatggatcttgttagcgtgcaaatctttggcgaatttgcgggtggtggcattcagaaaggcgtcgattacggagacaaagatttctatgtgtttgacatcctgtctgatagcgggaacgggaaagtttactgggatgactatcgcgtcgaatcgttttgcaccacgctcggtctgaaattagcgcctctgctgggacgtggtagtttcgctgaactgtcccagtacccaaacgatttcaaaagcattgtgaaccgttataatgaattggttgatacgacgggcctggagatggccaataaacacgtctttggtccgcaagcgtcttctgaaactggcgtagcagaaggctacgttcttaaacccgtctatccgatcttctttaataccggtacgcgcgtggcgattaaatgcaagaactccaaattttcggagaaagccaagctggactcgccaattaaggcgaaggtggaactgacggagaacgataaacgtctgctcgaaatctttagcgagtatgttacctggaatcgcgtcagtaacgtactgtcacatattggctcagtgaccgcaaaagattttgggcgtgttatgggtctgacgatgaaagacatcattaatgaagcagcacgcgaaggccatgatctgttgttcgctgataacccgtcggcggtgctgaaggagctgaccattctcatccagaacacgattcgttccaaatggcacgaagttctggag

SEQ ID NO: 642 - protein, 346 aa, synthetic construct
  REGION 1..346: note = variant of RNA ligase 2 from Klebsiella phage KP179
MHHHHHHGGSNTFAYYSSLENHYNNKFIEKIRGAGFLMHTVEWVAREKIHGTNFSVIITPTEIVPAKRTGPILEGESFFGHEIIMKKYKDSFVKVQNMLNVMDLVSVQIFGEFAGGGIQKGVDYGDKDFYVFDILSDSGNGKVYWDDYRVESFCTTLGLKLAPLLGRGSFAELSQYPNDFKSIVNRYNELVDTTGLEMANKHVFGPQASSETGVAEGYVLKPVYPIFFNTGTRVAIKCKNSKFSEKAKLDSPIKAKVELTENDKRLLEIFSEYVTWNRVSNVLSHIGSVTAKDFGRVMGLTMKDIINEAAREGHDLLFADNPSAVLKELTILIQNTIRSKWHEVLE

SEQ ID NO: 643 - DNA, 1038 bp, synthetic construct
  misc_feature 1..1038: note = variant of RNA ligase 2 from Klebsiella phage KP179
  source 1..1038: mol_type = other DNA
atgcatcaccatcaccatcacggtggcagcaacacgtttgcgtattattcaagtctggaaaaccattacaataataagttcattgagaagatccgtggtgcaggcttcctgatgcacaccgtggaatgggtagctcgcgagaagattcatggaacgaactttagcgttatcattactccgaccgaaatcgtcccagccaaacgcacagggccgatcttggaaggcgagtcgttctttggtcacgaaattatcatgaaaaaatataaagactccttcgtgaaggtgcagaacatgctgaacgttatggatcttgttagcgtgcaaatctttggcgaatttgcgggtggtggcattcagaaaggcgtcgattatggagacaaagatttctatgtgtttgacatcctgtctgatagcgggaacgagaaagtttactgggatgactatcgcgtcgaatcgttttgcaccacgctcggtctgaaattagcgcctctgctgggacgtggtagtttcgctgaactgtcccagtacccaaacgatttcaaaagcattgtgaaccgttataatgaattggttgatacgacgggcctggagatggccaataaacacgtctttggtccgcaagcgtcttctgaaactggcgtagcagaaggctacgttcttaaacccgtctatccgatcttctttaataccggtacgcgcgtggcgattaaatgcaagaactccaaattttcggagaaagccaagctggactcgccaattaaggcgaaggtggaactgacggagaacgataaacgtctgctcgaaatctttagcgagtatgttacctggaatcgcgtcagtaacgtactgtcacatattggctcagtgaccgcaaaagattttgggcgtgttatgggtctgacgatgaaagacatcatcaatgaagcagcacgcgaaggccatgatctgttgttcgctgataacccgtcggcggtgctgggcgagctgaccattctcatccagaacacgattcgttccaaatggcacgaagttctggag

SEQ ID NO: 644 - protein, 346 aa, synthetic construct
  REGION 1..346: note = variant of RNA ligase 2 from Klebsiella phage KP179
MHHHHHHGGSNTFAYYSSLENHYNNKFIEKIRGAGFLMHTVEWVAREKIHGTNFSVIITPTEIVPAKRTGPILEGESFFGHEIIMKKYKDSFVKVQNMLNVMDLVSVQIFGEFAGGGIQKGVDYGDKDFYVFDILSDSGNEKVYWDDYRVESFCTTLGLKLAPLLGRGSFAELSQYPNDFKSIVNRYNELVDTTGLEMANKHVFGPQASSETGVAEGYVLKPVYPIFFNTGTRVAIKCKNSKFSEKAKLDSPIKAKVELTENDKRLLEIFSEYVTWNRVSNVLSHIGSVTAKDFGRVMGLTMKDIINEAAREGHDLLFADNPSAVLGELTILIQNTIRSKWHEVLE

SEQ ID NO: 645 - DNA, 1038 bp, synthetic construct
  misc_feature 1..1038: note = variant of RNA ligase 2 from Klebsiella phage KP179
  source 1..1038: mol_type = other DNA
atgcatcaccatcaccatcacggtggcagcaacacgtttgcgtattattcaagtctggaaaaccattacaataataagttcattgagaagatccgtggtgcaggcttcctgatgcacaccgtggaatgggtagctcgcgagaagattcatggaacgaactttagcgttatcattactccgaccgaaatcgtcccagccaaacgcacagggccgatcttggaaggcgagtcgttctttggtcacgaaattatcatgaaaaaatataaagactccttcgtgaaggtgcagaacatgctggtggttatggatcttgttagcgtgcaaatctttggcgaatttgcgggtggtggcattcagaaaggcgtcgattacggagacaaagatttctatgtgtttgacatcctgtctgatagcgggaacgagaaagtttactgggatgactatcgcgtcgaatcgttttgcaccacgctcggtctgaaattagcgcctctgctgggacgtggtagtttcgctgaactgtcccagtacccaaacgatttcaaaagcattgtgaaccgttataatgaattggttgatacgacgggcctggagcacgccaataaacacgtctttggtccgcaagcgtcttctgaaactggcgtagcagaaggctacgttcttaaacccgtctatccgatcttctttaataccggtacgcgcgtggcgattaaatgcaagaactccaaattttcggagaaagccaagctggactcgccaattaaggcgaaggtggaactgacggagaacgataaacgtctgctcgaaatctttagcgagtatgttacctggaatcgcgtcagtaacgtactgtcacatattggctcagtgaccgcaaaagattttgggcgtgttatgggtctgacgatgaaagacatcattaatgaagcagcacgcgaaggccatgatctgttgttcgctgataacccgtcggcggtgaagaaagagctgaccattctcatccagaacacgattggctccaaatggcacgaagttctggag

SEQ ID NO: 646 - protein, 346 aa, synthetic construct
  REGION 1..346: note = variant of RNA ligase 2 from Klebsiella phage KP179
MHHHHHHGGSNTFAYYSSLENHYNNKFIEKIRGAGFLMHTVEWVAREKIHGTNFSVIITPTEIVPAKRTGPILEGESFFGHEIIMKKYKDSFVKVQNMLVVMDLVSVQIFGEFAGGGIQKGVDYGDKDFYVFDILSDSGNEKVYWDDYRVESFCTTLGLKLAPLLGRGSFAELSQYPNDFKSIVNRYNELVDTTGLEHANKHVFGPQASSETGVAEGYVLKPVYPIFFNTGTRVAIKCKNSKFSEKAKLDSPIKAKVELTENDKRLLEIFSEYVTWNRVSNVLSHIGSVTAKDFGRVMGLTMKDIINEAAREGHDLLFADNPSAVKKELTILIQNTIGSKWHEVLE

SEQ ID NO: 647 - DNA, 1038 bp, synthetic construct
  misc_feature 1..1038: note = variant of RNA ligase 2 from Klebsiella phage KP179
  source 1..1038: mol_type = other DNA
atgcatcaccatcaccatcacggtggcagcaacacgtttgcgtattattcaagtctggaaaaccattacaataataagttcattgagaagatccgtggtgcaggcttcctgatgcacaccgtggaatgggtagctcgcgagaagattcatggaacgaactttagcgttatcattactccgaccgaaatcgtcccagccaaacgcacagggccgatcttggaaggcgagtcgttctttggtcacgaaattatcatgaaaaaatataaagactccttcgtgaaggtgcagaacatgctgaatgccatggatcttgttagcgtgcaaatctttggcgaatttgcgggtggtggcattcagaaaggcgtcgattacggagacaaagatttctatgtgtttgacatcctgtctgatagcgggaacgagaaagtttactgggatgactatcgcgtcgaatcgttttgcaccacgctcggtctgaaattagcgcctctgctgggacgtggtagtttcgctgaactgtcccagtacccaaacgatttcaaaagcattgtgaaccgttataatgaattggttgatacgacgggcctggagatggccaataaacacgtctttggtccgcaagcgtcttctgaaactggcgtagcagaaggctacgttcttaaacccgtctatccgatcttctttaataccggtacgcgcgtggcgattaaatgcaagaactccaaattttcggagaaagccaagctggactcgccaattaaggcgaaggtggaactgacggagaacgataaacgtctgctcgaaatctttagcgagtatgttacctggaatcgcgtcagtaacgtactgtcacatattggctcagtgaccgcaaaagattttgggcgtgttatgggtctgacgatgaaagacatcattaatgaagcagcacgcgaaggccatgatctgttgttcgctgataacccgtcggcggtgctgaaggagctgaccattctcatccagaacacgattcgttccaaatggcacgaagttctggag

SEQ ID NO: 648 - protein, 346 aa, synthetic construct
  REGION 1..346: note = variant of RNA ligase 2 from Klebsiella phage KP179
MHHHHHHGGSNTFAYYSSLENHYNNKFIEKIRGAGFLMHTVEWVAREKIHGTNFSVIITPTEIVPAKRTGPILEGESFFGHEIIMKKYKDSFVKVQNMLNAMDLVSVQIFGEFAGGGIQKGVDYGDKDFYVFDILSDSGNEKVYWDDYRVESFCTTLGLKLAPLLGRGSFAELSQYPNDFKSIVNRYNELVDTTGLEMANKHVFGPQASSETGVAEGYVLKPVYPIFFNTGTRVAIKCKNSKFSEKAKLDSPIKAKVELTENDKRLLEIFSEYVTWNRVSNVLSHIGSVTAKDFGRVMGLTMKDIINEAAREGHDLLFADNPSAVLKELTILIQNTIRSKWHEVLE

SEQ ID NO: 649 - DNA, 1038 bp, synthetic construct
  misc_feature 1..1038: note = variant of RNA ligase 2 from Klebsiella phage KP179
  source 1..1038: mol_type = other DNA
atgcatcaccatcaccatcacggtggcagcaacacgtttgcgtattattcaagtctggaaaaccattacaataataagttcattgagaagatccgtggtgcaggcttcctgatgcacaccgtggaatgggtagctcgcgagaagattcatggaacgaactttagcgttatcattactccgaccgaaatctggccagccaaacgcacagggccgatcttggaaggcgagtcgttctttggtcacgaaattatcatgaaaaaatataaagactccttcgtgaaggtgcagaacatgctggtggttatggatcttgttagcgtgcaaatctttggcgaatttgcgggtggtggcattcagaaaggcgtcgattacggagacaaagatttctatgtgtttgacatcctgtctgatagcgggaacgagaaagtttactgggatgactatcgcgtcgaatcgttttgcaccacgctcggtctgaaattagcgcctctgctgggacgtggtagtttcgctgaactgtcccagtacccaaacgatttcaaaagcattgtgaaccgttataatgaattggttgatacgacgggcctggaacatgccaataaacacgtctttggtccgcaagcgtcttctgaaactggcgtagcagaaggctacgttcttaaacccgtctatccgatcttctttaataccggtacgcgcgtggcgattaaatgcaagaactccaaattttcggagaaagccaagctggactcgccaattaaggcgaaggtggaactgacggagaacgataaacgtctgctcgaaatctttagcgagtatgttacctggaatcgcgtcagtaacgtactgtcacatattggctcagtgaccgcaaaagattttgggcgtgttatgggtctgacgatgaaagacatcattaatgaagcagcacgcgaaggccatgatctgttgttcgctgataacccgtcggcggtgaagaaagagctgaccattctcatccagaacacgattggctccaaatggcacgaagttcaggag

SEQ ID NO: 650 - protein, 346 aa, synthetic construct
  REGION 1..346: note = variant of RNA ligase 2 from Klebsiella phage KP179
MHHHHHHGGSNTFAYYSSLENHYNNKFIEKIRGAGFLMHTVEWVAREKIHGTNFSVIITPTEIWPAKRTGPILEGESFFGHEIIMKKYKDSFVKVQNMLVVMDLVSVQIFGEFAGGGIQKGVDYGDKDFYVFDILSDSGNEKVYWDDYRVESFCTTLGLKLAPLLGRGSFAELSQYPNDFKSIVNRYNELVDTTGLEHANKHVFGPQASSETGVAEGYVLKPVYPIFFNTGTRVAIKCKNSKFSEKAKLDSPIKAKVELTENDKRLLEIFSEYVTWNRVSNVLSHIGSVTAKDFGRVMGLTMKDIINEAAREGHDLLFADNPSAVKKELTILIQNTIGSKWHEVQE

SEQ ID NO: 651 - DNA, 1038 bp, synthetic construct
  misc_feature 1..1038: note = variant of RNA ligase 2 from Klebsiella phage KP179
  source 1..1038: mol_type = other DNA
atgcatcaccatcaccatcacggtggcagcaacacgtttgcgtattattcaagtctggaaaaccattacaataataagttcattgagaagatccgtggtgcaggcttcctgatgcacaccgtggaatgggtagctcgcgagaagattcatggaacgaactttagcgttatcattactccgaccgaaatctggccagccaaacgcacagggccgatcttggaaggcgagtcgttctttggtcacgaaattatcatgaaaaaatataaagactccttcgtgaaggtgcagaacatgctggtggttatggatcttgttagcgtgcaaatctttggcgaatttgcgggtggtggcattcagaaaggcgtcgattacggagacaaagatttctatgtgtttgacatcctgtctgatagcgggaacgagaaagtttactgggatgactatcgcgtcgaatcgttttgcaccacgctcggtctgaaattagcgcctctgctgggacgtggtagtttcgctgaactgtcccagtacccaaacgatttcaaaagcattgtgaaccgttataatgaattggttgatacgacgggcctggaacatgccaataaacacgtctttggtccgcaagcgtcttctgaaactggcgtagcagaaggctacgttcttaaacccgtctatccgatcttctttaataccggtacgcgcgtggcgattaaatgcaagaactccaaattttcggagaaagccaagctggactcgccaattaaggcgaaggtggaactgacggagaacgataaacgtctgctcgaaatctttagcgagtatgttacctggaatcgcgtcagtaacgtactgtcacatattggctcagtgaccgcaaaagattttgggcgtgttatgggtctgacgatgaaagacatcattaatgaagcagcacgcgaaggccatgatctgttgttcgctgataacccgtcggcggtgaagaaagagctgaccattctcatccagaacacgattctgtccaaatggcacgaagttcaggag

SEQ ID NO: 652 - protein, 346 aa, synthetic construct
  REGION 1..346: note = variant of RNA ligase 2 from Klebsiella phage KP179
MHHHHHHGGSNTFAYYSSLENHYNNKFIEKIRGAGFLMHTVEWVAREKIHGTNFSVIITPTEIWPAKRTGPILEGESFFGHEIIMKKYKDSFVKVQNMLVVMDLVSVQIFGEFAGGGIQKGVDYGDKDFYVFDILSDSGNEKVYWDDYRVESFCTTLGLKLAPLLGRGSFAELSQYPNDFKSIVNRYNELVDTTGLEHANKHVFGPQASSETGVAEGYVLKPVYPIFFNTGTRVAIKCKNSKFSEKAKLDSPIKAKVELTENDKRLLEIFSEYVTWNRVSNVLSHIGSVTAKDFGRVMGLTMKDIINEAAREGHDLLFADNPSAVKKELTILIQNTILSKWHEVQE

SEQ ID NO: 653 - DNA, 1038 bp, synthetic construct
  misc_feature 1..1038: note = variant of RNA ligase 2 from Klebsiella phage KP179
  source 1..1038: mol_type = other DNA
atgcatcaccatcaccatcacggtggcagcaacacgtttgcgtattattcaagtctggaaaaccattacaataataagttcattgagaagatccgtggtgcaggcttcctgatgcacaccgtggaatgggtagctcgcgagaagattcatggaacgaactttagcgttatcattactccgaccgaaatcgtcccagccaaacgcacagggccgatcttggaaggcgagtcgttctttggtcacgaaattatcatgaaaaaatataaagactccttcgtgaaggtgcagaacatgctgaatgccatggatcttgttagcgtgcaaatctttggcgaatttgcgggtggtggcattcagaaaggcgtcgattacggagacaaagatttctatgtgtttgacatcctgtctgatagcgggaacgagaaagtttactgggatgactatcgcgtcgaatcgttttgcaccacgctcggtctgaaattagcgcctctgctgggacgtggtagtttcgctgaactgtcccagtacccaaacgatttcaaaagcattgtgaaccgttataatgaattggttgatacgacgggcctgtggcatgccaataaacacgtctttggtccgcaagcgtcttctgaaactggcgtagcagaaggctacgttcttaaacccgtctatccgatcttctttaataccggtacgcgcgtggcgattaaatgcaagaactccaaattttcggagaaagccaagctggactcgccaattaaggcgaaggtggaactgacggagaacgataaacgtctgctcgaaatctttagcgagtatgttacctggaatcgcgtcagtaacgtactgtcacatattggctcagtgaccgcaaaagattttgggcgtgttatgggtctgacgatgaaagacatcatcaatgaagcagcacgcgaaggccatgatctgttgttcgctgataacccgtcggcggtgctgaaggagctgaccattctcatccagaacacgattcgttccaaatggcacgaagttctggag

SEQ ID NO: 654 - protein, 346 aa, synthetic construct
  REGION 1..346: note = variant of RNA ligase 2 from Klebsiella phage KP179
MHHHHHHGGSNTFAYYSSLENHYNNKFIEKIRGAGFLMHTVEWVAREKIHGTNFSVIITPTEIVPAKRTGPILEGESFFGHEIIMKKYKDSFVKVQNMLNAMDLVSVQIFGEFAGGGIQKGVDYGDKDFYVFDILSDSGNEKVYWDDYRVESFCTTLGLKLAPLLGRGSFAELSQYPNDFKSIVNRYNELVDTTGLWHANKHVFGPQASSETGVAEGYVLKPVYPIFFNTGTRVAIKCKNSKFSEKAKLDSPIKAKVELTENDKRLLEIFSEYVTWNRVSNVLSHIGSVTAKDFGRVMGLTMKDIINEAAREGHDLLFADNPSAVLKELTILIQNTIRSKWHEVLE

SEQ ID NO: 655 - DNA, 1038 bp, synthetic construct
  misc_feature 1..1038: note = variant of RNA ligase 2 from Klebsiella phage KP179
  source 1..1038: mol_type = other DNA
atgcatcaccatcaccatcacggtggcagcaacacgtttgcgtattattcaagtctggaaaaccattacaataataagttcattgagaagatccgtggtgcaggcttcctgatgcacaccgtggaatgggtagctcgcgagaagattcatggaacgaactttagcgttatcattactccgaccgaaatcgtcccagccaaacgcacagggccgatcttggaaggcgagtcgttctttggtcacgaaattatcatgaaaaaatataaagactccttcgtgaaggtgcagaacatgctgaacgctatggatcttgttagcgtgcaaatctttggcgaatttgcgggtggtggcattcagaaaggcgtcgattacggagacaaagatttctatgtgtttgacatcctgtctgatagcgggaacgagaaagtttactgggatgactatcgcgtcgaatcgttttgcaccacgctcggtctgaaattagcgcctctgctgggacgtggtagtttcgctgaactgtcccagtacccaaacgatttcaaaagcattgtgaaccgttataatgaattggttgatacgacgggcctggagatggccaataaacacgtctttggtccgcaagcgtcttctgaaactggcgtagcagaaggctacgttcttaaacccgtctatccgatcttctttaataccggtacgcgcgtggcgattaaatgcaagaactccaaattttcggagaaagccaagctggactcgccaattaaggcgaaggtggaactgacggagaacgataaacgtctgctcgaaatctttagcgagtatgttacctggaatcgcgtcagtaacgtactgtcacatattggctcagtgaccgcaaaagattttgggcgtgttatgggtctgacgatgaaagacatcattaatgaagcagcacgcgaaggccatgatctgttgttcgctgataacccgtcggcggtgaaaagcgagctgaccattctcatccagaacacgattcgttccaaatggcacgaagttctggag

SEQ ID NO: 656 - protein, 346 aa, synthetic construct
  REGION 1..346: note = variant of RNA ligase 2 from Klebsiella phage KP179
MHHHHHHGGSNTFAYYSSLENHYNNKFIEKIRGAGFLMHTVEWVAREKIHGTNFSVIITPTEIVPAKRTGPILEGESFFGHEIIMKKYKDSFVKVQNMLNAMDLVSVQIFGEFAGGGIQKGVDYGDKDFYVFDILSDSGNEKVYWDDYRVESFCTTLGLKLAPLLGRGSFAELSQYPNDFKSIVNRYNELVDTTGLEMANKHVFGPQASSETGVAEGYVLKPVYPIFFNTGTRVAIKCKNSKFSEKAKLDSPIKAKVELTENDKRLLEIFSEYVTWNRVSNVLSHIGSVTAKDFGRVMGLTMKDIINEAAREGHDLLFADNPSAVKSELTILIQNTIRSKWHEVLE

SEQ ID NO: 657 - DNA, 1038 bp, synthetic construct
  misc_feature 1..1038: note = variant of RNA ligase 2 from Klebsiella phage KP179
  source 1..1038: mol_type = other DNA
atgcatcaccatcaccatcacggtggcagcaacacgtttgcgtattattcaagtctggaaaaccattacaataataagttcattgagaagatccgtggtgcaggcttcctgatgcacaccgtggaatgggtagctcgcgagaagattcatggaacgaactttagcgttatcattactccgaccgaaatcgtcccagccaaacgcacagggccgatcttggaaggcgagtcgttctttggtcacgaaattatcatgaaaaaatataaagactccttcgtgaaggtgcagaacatgctgaacgctatggatcttgttagcgtgcaaatctttggcgaatttgcgggtggtggcattcagaaaggcgtcgattacggagacaaagatttctatgtgtttgacatcctgtctgatagcgggaacgggaaagtttactgggatgactatcgcgtcgaatcgttttgcaccacgctcggtctgaaattagcgcctctgctgggacgtggtagtttcgctgaactgtcccagtacccaaacgatttcaaaagcattgtgaaccgttataatgaattggttgatacgacgggcctggagatggccaataaacacgtctttggtccgcaagcgtcttctgaaactggcgtagcagaaggctacgttcttaaacccgtctatccgatcttctttaataccggtacgcgcgtggcgattaaatgcaagaactccaaattttcggagaaagccaagctggactcgccaattaaggcgaaggtggaactgacggagaacgataaacgtctgctcgaaatctttagcgagtatgttacctggaatcgcgtcagtaacgtactgtcacatattggctcagtgaccgcaaaagattttgggcgtgttatgggtctgacgatgaaagacatcatcaatgaagcagcacgcgaaggccatgatctgttgttcgctgataacccgtcggcggtgaaaagcgagctgaccattctcatccagaacacgattcgttccaaatggcacgaagttctggag

SEQ ID NO: 658 - protein, 346 aa, synthetic construct
  REGION 1..346: note = variant of RNA ligase 2 from Klebsiella phage KP179
MHHHHHHGGSNTFAYYSSLENHYNNKFIEKIRGAGFLMHTVEWVAREKIHGTNFSVIITPTEIVPAKRTGPILEGESFFGHEIIMKKYKDSFVKVQNMLNAMDLVSVQIFGEFAGGGIQKGVDYGDKDFYVFDILSDSGNGKVYWDDYRVESFCTTLGLKLAPLLGRGSFAELSQYPNDFKSIVNRYNELVDTTGLEMANKHVFGPQASSETGVAEGYVLKPVYPIFFNTGTRVAIKCKNSKFSEKAKLDSPIKAKVELTENDKRLLEIFSEYVTWNRVSNVLSHIGSVTAKDFGRVMGLTMKDIINEAAREGHDLLFADNPSAVKSELTILIQNTIRSKWHEVLE

SEQ ID NO: 659 - DNA, 1038 bp, synthetic construct
  misc_feature 1..1038: note = variant of RNA ligase 2 from Klebsiella phage KP179
  source 1..1038: mol_type = other DNA
atgcatcaccatcaccatcacggtggcagcaacacgtttgcgtattattcaagtctggaaaaccattacaataataagttcattgagaagatccgtggtgcaggcttcctgatgcacaccgtggaatgggtagctcgcgagaagattcatggaacgaactttagcgttatcattactccgaccgaaatcgtgccagccaaacgcacagggccgatcttggaaggcgagtcgttctttggtcacgaaattatcatgaaaaaatataaagactccttcgtgaaggtgcagaacatgctggtggctatggatcttgttagcgtgcaaatctttggcgaatttgcgggtggtggcattcagaaaggcgtcgattacggagacaaagatttctatgtgtttgacatcctgtctgatagcgggaacgagaaagtttactgggatgactatcgcgtcgaatcgttttgcaccacgctcggtctgaaattagcgcctctgctgggacgtggtagtttcgctgaactgtcccagtacccaaacgatttcaaaagcattgtgaaccgttataatgaattggttgatacgacgggcctggaacatgccaataaacacgtctttggtccgcaagcgtcttctgaaactggcgtagcagaaggctacgttcttaaacccgtctatccgatcttctttaataccggtacgcgcgtggcgattaaatgcaagaactccaaattttcggagaaagccaagctggactcgccaattaaggcgaaggtggaactgacggagaacgataaacgtctgctcgaaatctttagcgagtatgttacctggaatcgcgtcagtaacgtactgtcacatattggctcagtgaccgcaaaagattttgggcgtgttatgggtctgacgatgaaagacatcattaatgaagcagcacgcgaaggccatgatctgttgttcgctgataacccgtcggcggtgaagaaagagctgaccattctcatccagaacacgattggctccaaatggcacgaagttctggag

SEQ ID NO: 660 - protein, 346 aa, synthetic construct
  REGION 1..346: note = variant of RNA ligase 2 from Klebsiella phage KP179
MHHHHHHGGSNTFAYYSSLENHYNNKFIEKIRGAGFLMHTVEWVAREKIHGTNFSVIITPTEIVPAKRTGPILEGESFFGHEIIMKKYKDSFVKVQNMLVAMDLVSVQIFGEFAGGGIQKGVDYGDKDFYVFDILSDSGNEKVYWDDYRVESFCTTLGLKLAPLLGRGSFAELSQYPNDFKSIVNRYNELVDTTGLEHANKHVFGPQASSETGVAEGYVLKPVYPIFFNTGTRVAIKCKNSKFSEKAKLDSPIKAKVELTENDKRLLEIFSEYVTWNRVSNVLSHIGSVTAKDFGRVMGLTMKDIINEAAREGHDLLFADNPSAVKKELTILIQNTIGSKWHEVLE

SEQ ID NO: 661 - DNA, 1038 bp, synthetic construct
  misc_feature 1..1038: note = variant of RNA ligase 2 from Klebsiella phage KP179
  source 1..1038: mol_type = other DNA
atgcatcaccatcaccatcacggtggcagcaacacgtttgcgtattattcaagtctggaaaaccattacaataataagttcattgagaagatccgtggtgcaggcttcctgatgcacaccgtggaatgggtagctcgcgagaagattcatggaacgaactttagcgttatcattactccgaccgaaatcgtcccagccaaacgcacagggccgatcttggaaggcgagtcgttctttggtcacgaaattatcatgaaaaaatataaagactccttcgtgaaggtgcagaacatgctgaacgctatggatcttgttagcgtgcaaatctttggcgaatttgcgggtggtggcattcagaaaggcgtcgattacggagacaaagatttctatgtgtttgacatcctgtctgatagcgggaacgagaaagtttactgggatgactatcgcgtcgaatcgttttgcaccacgctcggtctgaaattagcgcctctgctgggacgtggtagtttcgctgaactgtcccagtacccaaacgatttcaaaagcattgtgaaccgttataatgaattggttgatacgacgggcctggagatggccaataaacacgtctttggtccgcaagcgtcttctgaaactggcgtagcagaaggctacgttcttaaacccgtctatccgatcttctttaataccggtacgcgcgtggcgattaaatgcaagaactccaaattttcggagaaagccaagctggactcgccaattaaggcgaaggtggaactgacggagaacgataaacgtctgctcgaaatctttagcgagtatgttacctggaatcgcgtcagtaacgtactgtcacatattggctcagtgaccgcaaaagattttgggcgtgttatgggtctgacgatgaaagacatcattaatgaagcagcacgcgaaggccatgatctgttgttcgctgataacccgtcggcggtgctgggcgagctgaccattctcatccagaacacgattcgttccaaatggcacgaagttctggag

SEQ ID NO: 662 - protein, 346 aa, synthetic construct
  REGION 1..346: note = variant of RNA ligase 2 from Klebsiella phage KP179
MHHHHHHGGSNTFAYYSSLENHYNNKFIEKIRGAGFLMHTVEWVAREKIHGTNFSVIITPTEIVPAKRTGPILEGESFFGHEIIMKKYKDSFVKVQNMLNAMDLVSVQIFGEFAGGGIQKGVDYGDKDFYVFDILSDSGNEKVYWDDYRVESFCTTLGLKLAPLLGRGSFAELSQYPNDFKSIVNRYNELVDTTGLEMANKHVFGPQASSETGVAEGYVLKPVYPIFFNTGTRVAIKCKNSKFSEKAKLDSPIKAKVELTENDKRLLEIFSEYVTWNRVSNVLSHIGSVTAKDFGRVMGLTMKDIINEAAREGHDLLFADNPSAVLGELTILIQNTIRSKWHEVLE

SEQ ID NO: 663 - DNA, 1038 bp, synthetic construct
  misc_feature 1..1038: note = variant of RNA ligase 2 from Klebsiella phage KP179
  source 1..1038: mol_type = other DNA
atgcatcaccatcaccatcacggtggcagcaacacgtttgcgtattattcaagtctggaaaaccattacaataataagttcattgagaagatccgtggtgcaggcttcctgatgcacaccgtggaatgggtagctcgcgagaagattcatggaacgaactttagcgttatcattactccgaccgaaatcgtcccagccaaacgcacagggccgatcttggaaggcgagtcgttctttggtcacgaaattatcatgaaaaaatataaagactccttcgtgaaggtgcagaacatgctgaatgccatggatcttgttagcgtgcaaatctttggcgaatttgcgggtggtggcattcagaaaggcgtcgattacggagacaaagatttctatgtgtttgacatcctgtctgatagcgggaacgagaaagtttactgggatgactatcgcgtcgaatcgttttgcaccacgctcggtctgaaattagcgcctctgctgggacgtggtagtttcgctgaactgtcccagtacccaaacgatttcaaaagcattgtgaaccgttataatgaattggttgatacgacgggcctgtggcatgccaataaacacgtctttggtccgcaagcgtcttctgaaactggcgtagcagaaggctacgttcttaaacccgtctatccgatcttctttaataccggtacgcgcgtggcgattaaatgcaagaactccaaattttcggagaaagccaagctggactcgccaattaaggcgaaggtggaactgacggagaacgataaacgtctgctcgaaatctttagcgagtatgttacctggaatcgcgtcagtaacgtactgtcacatattggctcagtgaccgcaaaagattttgggcgtgttatgggtctgacgatgaaagacatcatcaatgaagcagcacgcgaaggccatgatctgttgttcgctgataacccgtcggcggtgctgggcgagctgaccattctcatccagaacacgattcgttccaaatggcacgaagttctggag

SEQ ID NO: 664 - protein, 346 aa, synthetic construct
  REGION 1..346: note = variant of RNA ligase 2 from Klebsiella phage KP179
MHHHHHHGGSNTFAYYSSLENHYNNKFIEKIRGAGFLMHTVEWVAREKIHGTNFSVIITPTEIVPAKRTGPILEGESFFGHEIIMKKYKDSFVKVQNMLNAMDLVSVQIFGEFAGGGIQKGVDYGDKDFYVFDILSDSGNEKVYWDDYRVESFCTTLGLKLAPLLGRGSFAELSQYPNDFKSIVNRYNELVDTTGLWHANKHVFGPQASSETGVAEGYVLKPVYPIFFNTGTRVAIKCKNSKFSEKAKLDSPIKAKVELTENDKRLLEIFSEYVTWNRVSNVLSHIGSVTAKDFGRVMGLTMKDIINEAAREGHDLLFADNPSAVLGELTILIQNTIRSKWHEVLE

SEQ ID NO: 665 - DNA, 1038 bp, synthetic construct
  misc_feature 1..1038: note = variant of RNA ligase 2 from Klebsiella phage KP179
  source 1..1038: mol_type = other DNA
atgcatcaccatcaccatcacggtggcagcaacacgtttgcgtattattcaagtctggaaaaccattacaataataagttcattgagaagatccgtggtgcaggcttcctgatgcacaccgtggaatgggtagctcgcgagaagattcatggaacgaactttagcgttatcattactccgaccgaaatctggccagccaaacgcacagggccgatcttggaaggcgagtcgttctttggtcacgaaattatcatgaaaaaatataaagactccttcgtgaaggtgcagaacatgctggtggctatggatcttgttagcgtgcaaatctttggcgaatttgcgggtggtggcattcagaaaggcgtcgattacggagacaaagatttctatgtgtttgacatcctgtctgatagcgggaacgagaaagtttactgggatgactatcgcgtcgaatcgttttgcaccacgctcggtctgaaattagcgcctctgctgggacgtggtagtttcgctgaactgtcccagtacccaaacgatttcaaaagcattgtgaaccgttataatgaattggttgatacgacgggcctggagcacgccaataaacacgtctttggtccgcaagcgtcttctgaaactggcgtagcagaaggctacgttcttaaacccgtctatccgatcttctttaataccggtacgcgcgtggcgattaaatgcaagaactccaaattttcggagaaagccaagctggactcgccaattaaggcgaaggtggaactgacggagaacgataaacgtctgctcgaaatctttagcgagtatgttacctggaatcgcgtcagtaacgtactgtcacatattggctcagtgaccgcaaaagattttgggcgtgttatgggtctgacgatgaaagacatcattaatgaagcagcacgcgaaggccatgatctgttgttcgctgataacccgtcggcggtgaagaaagagctgaccattctcatccagaacacgattggctccaaatggcacgaagttctggag

SEQ ID NO: 666 - protein, 346 aa, synthetic construct
  REGION 1..346: note = variant of RNA ligase 2 from Klebsiella phage KP179
MHHHHHHGGSNTFAYYSSLENHYNNKFIEKIRGAGFLMHTVEWVAREKIHGTNFSVIITPTEIWPAKRTGPILEGESFFGHEIIMKKYKDSFVKVQNMLVAMDLVSVQIFGEFAGGGIQKGVDYGDKDFYVFDILSDSGNEKVYWDDYRVESFCTTLGLKLAPLLGRGSFAELSQYPNDFKSIVNRYNELVDTTGLEHANKHVFGPQASSETGVAEGYVLKPVYPIFFNTGTRVAIKCKNSKFSEKAKLDSPIKAKVELTENDKRLLEIFSEYVTWNRVSNVLSHIGSVTAKDFGRVMGLTMKDIINEAAREGHDLLFADNPSAVKKELTILIQNTIGSKWHEVLE

SEQ ID NO: 667 - DNA, 1038 bp, synthetic construct
  misc_feature 1..1038: note = variant of RNA ligase 2 from Klebsiella phage KP179
  source 1..1038: mol_type = other DNA
atgcatcaccatcaccatcacggtggcagcaacacgtttgcgtattattcaagtctggaaaaccattacaataataagttcattgagaagatccgtggtgcaggcttcctgatgcacaccgtggaatgggtagctcgcgagaagattcatggaacgaactttagcgttatcattactccgaccgaaatctggccagccaaacgcacagggccgatcttggaaggcgagtcgttctttggtcacgaaattatcatgaaaaaatataaagactccttcgtgaaggtgcagaacatgctggtggttatggatcttgttagcgtgcaaatctttggcgaatttgcgggtggtggcattcagaaaggcgtcgattacggagacaaagatttctatgtgtttgacatcctgtctgatagcgggaacgagaaagtttactgggatgactatcgcgtcgaatcgttttgcacctcgctcggtctgaaattagcgcctctgctgggacgtggtagtttcgctgaactgtcccagtacccaaacgatttcaaaagcattgtgaaccgttataatgaattggttgatacgacgggcctgtggcacgccaataaacacgtctttggtccgcaagcgtcttctgaaactggcgtagcagaaggctacgttcttaaacccgtctatccgatcttctttaataccggtacgcgcgtggcgattaaatgcaagaactccaaattttcggagaaagccaagctggactcgccaattaaggcgaaggtggaactgacggagaacgataaacgtctgctcgaaatctttagcgagtatgttacctggaatcgcgtcagtaacgtactgtcacatattggctcagtgaccgcaaaagattttgggcgtgttatgggtctgacgatgaaagacatcattaatgaagcagcacgcgaaggccatgatctgttgttcgctgataacccgtcggcggtgaagaaagagctgaccattctcatccagaacacgattctgtccaaatggcacgaagttctggag

SEQ ID NO: 668 - protein, 346 aa, synthetic construct
  REGION 1..346: note = variant of RNA ligase 2 from Klebsiella phage KP179
MHHHHHHGGSNTFAYYSSLENHYNNKFIEKIRGAGFLMHTVEWVAREKIHGTNFSVIITPTEIWPAKRTGPILEGESFFGHEIIMKKYKDSFVKVQNMLVVMDLVSVQIFGEFAGGGIQKGVDYGDKDFYVFDILSDSGNEKVYWDDYRVESFCTSLGLKLAPLLGRGSFAELSQYPNDFKSIVNRYNELVDTTGLWHANKHVFGPQASSETGVAEGYVLKPVYPIFFNTGTRVAIKCKNSKFSEKAKLDSPIKAKVELTENDKRLLEIFSEYVTWNRVSNVLSHIGSVTAKDFGRVMGLTMKDIINEAAREGHDLLFADNPSAVKKELTILIQNTILSKWHEVLE

SEQ ID NO: 669 - DNA, 1038 bp, synthetic construct
  misc_feature 1..1038: note = variant of RNA ligase 2 from Klebsiella phage KP179
  source 1..1038: mol_type = other DNA
atgcatcaccatcaccatcacggtggcagcaacacgtttgcgtattattcaagtctggaaaaccattacaataataagttcattgagaagatccgtggtgcaggcttcctgatgcacaccgtggaatgggtagctcgcgagaagattcatggaacgaactttagcgttatcattactccgaccgaaatctggccagccaaacgcacagggccgatcttggaaggcgagtcgttctttggtcacgaaattatcatgaaaaaatataaagactccttcgtgaaggtgcagaacatgctggtggttatggatcttgttagcgtgcaaatctttggcgaatttgcgggtggtggcattcagaaaggcgtcgattacggagacaaagatttctatgtgtttgacatcctgtctgatagcgggaacgagaaagtttactgggatgactatcgcgtcgaatcgttttgcaccacgctcggtctgaaattagcgcctctgctgggacgtggtagtttcgctgaactgtcccagtacccaaacgatttcaaaagcattgtgaaccgttataatgaattggttgatacgacgggcctggagcacgccaataaacacgtctttggtccgcaagcgtcttctgaaactggcgtagcagaaggctacgttcttaaacccgtctatccgatcttctttaataccggtacgcgcgtggcgattaaatgcaagaactccaaattttcggagaaagccaagctggactcgccaattaaggcgaaggtggaactgacggagaacgataaacgtctgctcgaaatctttagcgagtatgttacctggaatcgcgtcagtaacgtactgtcacatattggctcagtgaccgcaaaagattttgggcgtgttatgggtctgacgatgaaagacatcattaatgaagcagcacgcgaaggccatgatctgttgttcgctgataacccgtcggcggtgaagaaagagctgaccattctcatccagaacacgattggctccaaatggcacgaagttctggag

SEQ ID NO: 670 - protein, 346 aa, synthetic construct
  REGION 1..346: note = variant of RNA ligase 2 from Klebsiella phage KP179
MHHHHHHGGSNTFAYYSSLENHYNNKFIEKIRGAGFLMHTVEWVAREKIHGTNFSVIITPTEIWPAKRTGPILEGESFFGHEIIMKKYKDSFVKVQNMLVVMDLVSVQIFGEFAGGGIQKGVDYGDKDFYVFDILSDSGNEKVYWDDYRVESFCTTLGLKLAPLLGRGSFAELSQYPNDFKSIVNRYNELVDTTGLEHANKHVFGPQASSETGVAEGYVLKPVYPIFFNTGTRVAIKCKNSKFSEKAKLDSPIKAKVELTENDKRLLEIFSEYVTWNRVSNVLSHIGSVTAKDFGRVMGLTMKDIINEAAREGHDLLFADNPSAVKKELTILIQNTIGSKWHEVLE

SEQ ID NO: 671 - DNA, 1038 bp, synthetic construct
  misc_feature 1..1038: note = variant of RNA ligase 2 from Klebsiella phage KP179
  source 1..1038: mol_type = other DNA
atgcatcaccatcaccatcacggtggcagcaacacgtttgcgtattattcaagtctggaaaaccattacaataataagttcattgagaagatccgtggtgcaggcttcctgatgcacaccgtggaatgggtagctcgcgagaagattcatggaacgaactttagcgttatcattactccgaccgaaatcgtcccagccaaacgcacagggccgatcttggaaggcgagtcgttctttggtcacgaaattatcatgaaaaaatataaagactccttcgtgaaggtgcagaacatgctggtggctatggatcttgttagcgtgcaaatctttggcgaatttgcgggtggtggcattcagaaaggcgtcgattacggagacaaagatttctatgtgtttgacatcctgtctgatagcgggaacgagaaagtttactgggatgactatcgcgtcgaatcgttttgcaccacgctcggtctgaaattagcgcctctgctgggacgtggtagtttcgctgaactgtcccagtacccaaacgatttcaaaagcattgtgaaccgttataatgaattggttgatacgacgggcctgtggcacgccaataaacacgtctttggtccgcaagcgtcttctgaaactggcgtagcagaaggctacgttcttaaacccgtctatccgatcttctttaataccggtacgcgcgtggcgattaaatgcaagaactccaaattttcggagaaagccaagctggactcgccaattaaggcgaaggtggaactgacggagaacgataaacgtctgctcgaaatctttagcgagtatgttacctggaatcgcgtcagtaacgtactgtcacatattggctcagtgaccgcaaaagattttgggcgtgttatgggtctgacgatgaaagacatcattaatgaagcagcacgcgaaggccatgatctgttgttcgctgataacccgtcggcggtgaagaaagagctgaccattctcatccagaacacgattctgtccaaatggcacgaagttctggag

SEQ ID NO: 672 - protein, 346 aa, synthetic construct
  REGION 1..346: note = variant of RNA ligase 2 from Klebsiella phage KP179
MHHHHHHGGSNTFAYYSSLENHYNNKFIEKIRGAGFLMHTVEWVAREKIHGTNFSVIITPTEIVPAKRTGPILEGESFFGHEIIMKKYKDSFVKVQNMLVAMDLVSVQIFGEFAGGGIQKGVDYGDKDFYVFDILSDSGNEKVYWDDYRVESFCTTLGLKLAPLLGRGSFAELSQYPNDFKSIVNRYNELVDTTGLWHANKHVFGPQASSETGVAEGYVLKPVYPIFFNTGTRVAIKCKNSKFSEKAKLDSPIKAKVELTENDKRLLEIFSEYVTWNRVSNVLSHIGSVTAKDFGRVMGLTMKDIINEAAREGHDLLFADNPSAVKKELTILIQNTILSKWHEVLE

SEQ ID NO: 673 - DNA, 1038 bp, synthetic construct
  misc_feature 1..1038: note = variant of RNA ligase 2 from Klebsiella phage KP179
  source 1..1038: mol_type = other DNA
atgcatcaccatcaccatcacggtggcagcaacacgtttgcgtattattcaagtctggaaaaccattacaataataagttcattgagaagatccgtggtgcaggcttcctgatgcacaccgtggaatgggtagctcgcgagaagattcatggaacgaactttagcgttatcattactccgaccgaaatcgtcccagccaaacgcacagggccgatcttggaaggcgagtcgttctttggtcacgaaattatcatgaaaaaatataaagactccttcgtgaaggtgcagaacatgctgaatgccatggatcttgttagcgtgcaaatctttggcgaatttgcgggtggtggcattcagaaaggcgtcgattacggagacaaagatttctatgtgtttgacatcctgtctgatagcgggaacgagaaagtttactgggatgactatcgcgtcgaatcgttttgcaccacgctcggtctgaaattagcgcctctgctgggacgtggtagtttcgctgaactgtcccagtacccaaacgatttcaaaagcattgtgaaccgttataatgaattggttgatacgacgggcctggagatggccaataaacacgtctttggtccgcaagcgtcttctgaaactggcgtagcagaaggctacgttcttaaacccgtctatccgatcttctttaataccggtacgcgcgtggcgattaaatgcaagaactccaaattttcggagaaagccaagctggactcgccaattaaggcgaaggtggaactgacggagaacgataaacgtctgctcgaaatctttagcgagtatgttacctggaatcgcgtcagtaacgtactgtcacatattggctcagtgaccgcaaaagattttgggcgtgttatgggtctgacgatgaaagacatcatcaatgaagcagcacgcgaaggccatgatctgttgttcgctgataacccgtcggcggtgctgagcgagctgaccattctcatccagaacacgattcgttccaaatggcacgaagttctggag

SEQ ID NO: 674 - protein, 346 aa, synthetic construct
  REGION 1..346: note = variant of RNA ligase 2 from Klebsiella phage KP179
MHHHHHHGGSNTFAYYSSLENHYNNKFIEKIRGAGFLMHTVEWVAREKIHGTNFSVIITPTEIVPAKRTGPILEGESFFGHEIIMKKYKDSFVKVQNMLNAMDLVSVQIFGEFAGGGIQKGVDYGDKDFYVFDILSDSGNEKVYWDDYRVESFCTTLGLKLAPLLGRGSFAELSQYPNDFKSIVNRYNELVDTTGLEMANKHVFGPQASSETGVAEGYVLKPVYPIFFNTGTRVAIKCKNSKFSEKAKLDSPIKAKVELTENDKRLLEIFSEYVTWNRVSNVLSHIGSVTAKDFGRVMGLTMKDIINEAAREGHDLLFADNPSAVLSELTILIQNTIRSKWHEVLE

SEQ ID NO: 675 - DNA, 1038 bp, synthetic construct
  misc_feature 1..1038: note = variant of RNA ligase 2 from Klebsiella phage KP179
  source 1..1038: mol_type = other DNA
atgcatcaccatcaccatcacggtggcagcaacacgtttgcgtattattcaagtctggaaaaccattacaataataagttcattgagaagatccgtggtgcaggcttcctgatgcacaccgtggaatgggtagctcgcgagaagattcatggaacgaactttagcgttatcattactccgaccgaaatcgtgccagccaaacgcacagggccgatcttggaaggcgagtcgttctttggtcacgaaattatcatgaaaaaatataaagactccttcgtgaaggtgcagaacatgctgaatgccatggatcttgttagcgtgcaaatctttggcgaatttgcgggtggtggcattcagaaaggcgtcgattacggagacaaagatttctatgtgtttgacatcctgtctgatagcgggaacgagaaagtttactgggatgactatcgcgtcgaatcgttttgcaccacgctcggtctgaaattagcgcctctgctgggacgtggtagtttcgctgaactgtcccagtacccaaacgatttcaaaagcattgtgaaccgttataatgaattggttgatacgacgggcctgtggcacgccaataaacacgtctttggtccgcaagcgtcttctgaaactggcgtagcagaaggctacgttcttaaacccgtctatccgatcttctttaataccggtacgcgcgtggcgattaaatgcaagaactccaaattttcggagaaagccaagctggactcgccaattaaggcgaaggtggaactgacggagaacgataaacgtctgctcgaaatctttagcgagtatgttacctggaatcgcgtcagtaacgtactgtcacatattggctcagtgaccgcaaaagattttgggcgtgttatgggtctgacgatgaaagacatcattaatgaagcagcacgcgaaggccatgatctgttgttcgctgataacccgtcggcggtgaagaaagagctgaccattctcatccagaacacgattctgtccaaatggcacgaagttctggag

SEQ ID NO: 676 - protein, 346 aa, synthetic construct
  REGION 1..346: note = variant of RNA ligase 2 from Klebsiella phage KP179
MHHHHHHGGSNTFAYYSSLENHYNNKFIEKIRGAGFLMHTVEWVAREKIHGTNFSVIITPTEIVPAKRTGPILEGESFFGHEIIMKKYKDSFVKVQNMLNAMDLVSVQIFGEFAGGGIQKGVDYGDKDFYVFDILSDSGNEKVYWDDYRVESFCTTLGLKLAPLLGRGSFAELSQYPNDFKSIVNRYNELVDTTGLWHANKHVFGPQASSETGVAEGYVLKPVYPIFFNTGTRVAIKCKNSKFSEKAKLDSPIKAKVELTENDKRLLEIFSEYVTWNRVSNVLSHIGSVTAKDFGRVMGLTMKDIINEAAREGHDLLFADNPSAVKKELTILIQNTILSKWHEVLE

SEQ ID NO: 677 - DNA, 1038 bp, synthetic construct
  misc_feature 1..1038: note = variant of RNA ligase 2 from Klebsiella phage KP179
  source 1..1038: mol_type = other DNA
atgcatcaccatcaccatcacggtggcagcaacacgtttgcgtattattcaagtctggaaaaccattacaataataagttcattgagaagatccgtggtgcaggcttcctgatgcacaccgtggaatgggtagctcgcgagaagattcatggaacgaactttagcgttatcattactccgaccgaaatcgtcccagccaaacgcacagggccgatcttggaaggcgagtcgttctttggtcacgaaattatcatgaaaaaatataaagactccttcgtgaaggtgcagaacatgctgaacgttatggatcttgttagcgtgcaaatctttggcgaatttgcgggtggtggcattcagaaaggcgtcgattacggagacaaagatttctatgtgtttgacatcctgtctgatagcgggaacgagaaagtttactgggatgactatcgcgtcgaatcgttttgcaccacgctcggtctgaaattagcgcctctgctgggacgtggtagtttcgctgaactgtcccagtacccaaacgatttcaaaagcattgtgaaccgttataatgaattggttgatacgacgggcctgtggcatgccaataaacacgtctttggtccgcaagcgtcttctgaaactggcgtagcagaaggctacgttcttaaacccgtctatccgatcttctttaataccggtacgcgcgtggcgattaaatgcaagaactccaaattttcggagaaagccaagctggactcgccaattaaggcgaaggtggaactgacggagaacgataaacgtctgctcgaaatctttagcgagtatgttacctggaatcgcgtcagtaacgtactgtcacatattggctcagtgaccgcaaaagattttgggcgtgttatgggtctgacgatgaaagacatcattaatgaagcagcacgcgaaggccatgatctgttgttcgctgataacccgtcggcggtgctgaaggagctgaccattctcatccagaacacgattcgttccaaatggcacgaagttctggag

SEQ ID NO: 678 - protein, 346 aa, synthetic construct
  REGION 1..346: note = variant of RNA ligase 2 from Klebsiella phage KP179
MHHHHHHGGSNTFAYYSSLENHYNNKFIEKIRGAGFLMHTVEWVAREKIHGTNFSVIITPTEIVPAKRTGPILEGESFFGHEIIMKKYKDSFVKVQNMLNVMDLVSVQIFGEFAGGGIQKGVDYGDKDFYVFDILSDSGNEKVYWDDYRVESFCTTLGLKLAPLLGRGSFAELSQYPNDFKSIVNRYNELVDTTGLWHANKHVFGPQASSETGVAEGYVLKPVYPIFFNTGTRVAIKCKNSKFSEKAKLDSPIKAKVELTENDKRLLEIFSEYVTWNRVSNVLSHIGSVTAKDFGRVMGLTMKDIINEAAREGHDLLFADNPSAVLKELTILIQNTIRSKWHEVLE

SEQ ID NO: 679 - DNA, 1038 bp, synthetic construct
  misc_feature 1..1038: note = variant of RNA ligase 2 from Klebsiella phage KP179
  source 1..1038: mol_type = other DNA
atgcatcaccatcaccatcacggtggcagcaacacgtttgcgtattattcaagtctggaaaaccattacaataataagttcattgagaagatccgtggtgcaggcttcctgatgcacaccgtggaatgggtagctcgcgagaagattcatggaacgaactttagcgttatcattactccgaccgaaatctggccagccaaacgcacagggccgatcttggaaggcgagtcgttctttggtcacgaaattatcatgaaaaaatataaagactccttcgtgaaggtgcagaacatgctggtggctatggatcttgttagcgtgcaaatctttggcgaatttgcgggtggtggcattcagaaaggcgtcgattacggagacaaagatttctatgtgtttgacatcctgtctgatagcgggaacgagaaagtttactgggatgactatcgcgtcgaatcgttttgcaccacgctcggtctgaaattagcgcctctgctgggacgtggtagtttcgctgaactgtcccagtacccaaacgatttcaaaagcattgtgaaccgttataatgaattggttgatacgacgggcctgtggcacgccaataaacacgtctttggtccgcaagcgtcttctgaaactggcgtagcagaaggctacgttcttaaacccgtctatccgatcttctttaataccggtacgcgcgtggcgattaaatgcaagaactccaaattttcggagaaagccaagctggactcgccaattaaggcgaaggtggaactgacggagaacgataaacgtctgctcgaaatctttagcgagtatgttacctggaatcgcgtcagtaacgtactgtcacatattggctcagtgaccgcaaaagattttgggcgtgttatgggtctgacgatgaaagacatcattaatgaagcagcacgcgaaggccatgatctgttgttcgctgataacccgtcggcggtgaagaaagagctgaccattctcatccagaacacgattctgtccaaatggcacgaagttctggag

SEQ ID NO: 680 - protein, 346 aa, synthetic construct
  REGION 1..346: note = variant of RNA ligase 2 from Klebsiella phage KP179
MHHHHHHGGSNTFAYYSSLENHYNNKFIEKIRGAGFLMHTVEWVAREKIHGTNFSVIITPTEIWPAKRTGPILEGESFFGHEIIMKKYKDSFVKVQNMLVAMDLVSVQIFGEFAGGGIQKGVDYGDKDFYVFDILSDSGNEKVYWDDYRVESFCTTLGLKLAPLLGRGSFAELSQYPNDFKSIVNRYNELVDTTGLWHANKHVFGPQASSETGVAEGYVLKPVYPIFFNTGTRVAIKCKNSKFSEKAKLDSPIKAKVELTENDKRLLEIFSEYVTWNRVSNVLSHIGSVTAKDFGRVMGLTMKDIINEAAREGHDLLFADNPSAVKKELTILIQNTILSKWHEVLE

SEQ ID NO: 681 - DNA, 1038 bp, synthetic construct
  misc_feature 1..1038: note = variant of RNA ligase 2 from Klebsiella phage KP179
  source 1..1038: mol_type = other DNA
atgcatcaccatcaccatcacggtggcagcaacacgtttgcgtattattcaagtctggaaaaccattacaataataagttcattgagaagatccgtggtgcaggcttcctgatgcacaccgtggaatgggtagctcgcgagaagattcatggaacgaactttagcgttatcattactccgaccgaaatcgtcccagccaaacgcacagggccgatcttggaaggcgagtcgttctttggtcacgaaattatcatgaaaaaatataaagactccttcgtgaaggtgcagaacatgctgaacgttatggatcttgttagcgtgcaaatctttggcgaatttgcgggtggtggcattcagaaaggcgtcgattacggagacaaagatttctatgtgtttgacatcctgtctgatagcgggaacgagaaagtttactgggatgactatcgcgtcgaatcgttttgcaccacgctcggtctgaaattagcgcctctgctgggacgtggtagtttcgctgaactgtcccagtacccaaacgatttcaaaagcattgtgaaccgttataatgaattggttgatacgacgggcctggagatggccaataaacacgtctttggtccgcaagcgtcttctgaaactggcgtagcagaaggctacgttcttaaacccgtctatccgatcttctttaataccggtacgcgcgtggcgattaaatgcaagaactccaaattttcggagaaagccaagctggactcgccaattaaggcgaaggtggaactgacggagaacgataaacgtctgctcgaaatctttagcgagtatgttacctggaatcgcgtcagtaacgtactgtcacatattggctcagtgaccgcaaaagattttgggcgtgttatgggtctgacgatgaaagacatcattaatgaagcagcacgcgaaggccatgatctgttgttcgctgataacccgtcggcggtgaaaaaggagctgaccattctcatccagaacacgattcgttccaaatggcacgaagttctggag

SEQ ID NO: 682 - protein, 346 aa, synthetic construct
  REGION 1..346: note = variant of RNA ligase 2 from Klebsiella phage KP179
MHHHHHHGGSNTFAYYSSLENHYNNKFIEKIRGAGFLMHTVEWVAREKIHGTNFSVIITPTEIVPAKRTGPILEGESFFGHEIIMKKYKDSFVKVQNMLNVMDLVSVQIFGEFAGGGIQKGVDYGDKDFYVFDILSDSGNEKVYWDDYRVESFCTTLGLKLAPLLGRGSFAELSQYPNDFKSIVNRYNELVDTTGLEMANKHVFGPQASSETGVAEGYVLKPVYPIFFNTGTRVAIKCKNSKFSEKAKLDSPIKAKVELTENDKRLLEIFSEYVTWNRVSNVLSHIGSVTAKDFGRVMGLTMKDIINEAAREGHDLLFADNPSAVKKELTILIQNTIRSKWHEVLE

SEQ ID NO: 683 - DNA, 1038 bp, synthetic construct
  misc_feature 1..1038: note = variant of RNA ligase 2 from Klebsiella phage KP179
  source 1..1038: mol_type = other DNA
atgcatcaccatcaccatcacggtggcagcaacacgtttgcgtattattcaagtctggaaaaccattacaataataagttcattgagaagatccgtggtgcaggcttcctgatgcacaccgtggaatgggtagctcgcgagaagattcatggaacgaactttagcgttatcattactccgaccgaaatcgtcccagccaaacgcacagggccgatcttggaaggcgagtcgttctttggtcacgaaattatcatgaaaaaatataaagactccttcgtgaaggtgcagaacatgctgaatgccatggatcttgttagcgtgcaaatctttggcgaatttgcgggtggtggcattcagaaaggcgtcgattacggagacaaagatttctatgtgtttgacatcctgtctgatagcgggaacgggaaagtttactgggatgactatcgcgtcgaatcgttttgcaccacgctcggtctgaaattagcgcctctgctgggacgtggtagtttcgctgaactgtcccagtacccaaacgatttcaaaagcattgtgaaccgttataatgaattggttgatacgacgggcctgtggcatgccaataaacacgtctttggtccgcaagcgtcttctgaaactggcgtagcagaaggctacgttcttaaacccgtctatccgatcttctttaataccggtacgcgcgtggcgattaaatgcaagaactccaaattttcggagaaagccaagctggactcgccaattaaggcgaaggtggaactgacggagaacgataaacgtctgctcgaaatctttagcgagtatgttacctggaatcgcgtcagtaacgtactgtcacatattggctcagtgaccgcaaaagattttgggcgtgttatgggtctgacgatgaaagacatcatcaatgaagcagcacgcgaaggccatgatctgttgttcgctgataacccgtcggcggtgaaaagcgagctgaccattctcatccagaacacgattcgttccaaatggcacgaagttctggag

SEQ ID NO: 684 - protein, 346 aa, synthetic construct
  REGION 1..346: note = variant of RNA ligase 2 from Klebsiella phage KP179
MHHHHHHGGSNTFAYYSSLENHYNNKFIEKIRGAGFLMHTVEWVAREKIHGTNFSVIITPTEIVPAKRTGPILEGESFFGHEIIMKKYKDSFVKVQNMLNAMDLVSVQIFGEFAGGGIQKGVDYGDKDFYVFDILSDSGNGKVYWDDYRVESFCTTLGLKLAPLLGRGSFAELSQYPNDFKSIVNRYNELVDTTGLWHANKHVFGPQASSETGVAEGYVLKPVYPIFFNTGTRVAIKCKNSKFSEKAKLDSPIKAKVELTENDKRLLEIFSEYVTWNRVSNVLSHIGSVTAKDFGRVMGLTMKDIINEAAREGHDLLFADNPSAVKSELTILIQNTIRSKWHEVLE

SEQ ID NO: 685 - DNA, 1038 bp, synthetic construct
  misc_feature 1..1038: note = variant of RNA ligase 2 from Klebsiella phage KP179
  source 1..1038: mol_type = other DNA
atgcatcaccatcaccatcacggtggcagcaacacgtttgcgtattattcaagtctggaaaaccattacaataataagttcattgagaagatccgtggtgcaggcttcctgatgcacaccgtggaatgggtagctcgcgagaagattcatggaacgaactttagcgttatcattactccgaccgaaatcgtcccagccaaacgcacagggccgatcttggaaggcgagtcgttctttggtcacgaaattatcatgaaaaaatataaagactccttcgtgaaggtgcagaacatgctgaacgctatggatcttgttagcgtgcaaatctttggcgaatttgcgggtggtggcattcagaaaggcgtcgattacggagacaaagatttctatgtgtttgacatcctgtctgatagcgggaacgagaaagtttactgggatgactatcgcgtcgaatcgttttgcaccacgctcggtctgaaattagcgcctctgctgggacgtggtagtttcgctgaactgtcccagtacccaaacgatttcaaaagcattgtgaaccgttataatgaattggttgatacgacgggcctggagatggccaataaacacgtctttggtccgcaagcgtcttctgaaactggcgtagcagaaggctacgttcttaaacccgtctatccgatcttctttaataccggtacgcgcgtggcgattaaatgcaagaactccaaattttcggagaaagccaagctggactcgccaattaaggcgaaggtggaactgacggagaacgataaacgtctgctcgaaatctttagcgagtatgttacctggaatcgcgtcagtaacgtactgtcacatattggctcagtgaccgcaaaagattttgggcgtgttatgggtctgacgatgaaagacatcattaatgaagcagcacgcgaaggccatgatctgttgttcgctgataacccgtcggcggtgaaaggcgagctgaccattctcatccagaacacgattcgttccaaatggcacgaagttctggag

SEQ ID NO: 686 - protein, 346 aa, synthetic construct
  REGION 1..346: note = variant of RNA ligase 2 from Klebsiella phage KP179
MHHHHHHGGSNTFAYYSSLENHYNNKFIEKIRGAGFLMHTVEWVAREKIHGTNFSVIITPTEIVPAKRTGPILEGESFFGHEIIMKKYKDSFVKVQNMLNAMDLVSVQIFGEFAGGGIQKGVDYGDKDFYVFDILSDSGNEKVYWDDYRVESFCTTLGLKLAPLLGRGSFAELSQYPNDFKSIVNRYNELVDTTGLEMANKHVFGPQASSETGVAEGYVLKPVYPIFFNTGTRVAIKCKNSKFSEKAKLDSPIKAKVELTENDKRLLEIFSEYVTWNRVSNVLSHIGSVTAKDFGRVMGLTMKDIINEAAREGHDLLFADNPSAVKGELTILIQNTIRSKWHEVLE

SEQ ID NO: 687 - DNA, 1038 bp, synthetic construct
  misc_feature 1..1038: note = variant of RNA ligase 2 from Klebsiella phage KP179
  source 1..1038: mol_type = other DNA
atgcatcaccatcaccatcacggtggcagcaacacgtttgcgtattattcaagtctggaaaaccattacaataataagttcattgagaagatccgtggtgcaggcttcctgatgcacaccgtggaatgggtagctcgcgagaagattcatggaacgaactttagcgttatcattactccgaccgaaatcgtcccagccaaacgcacagggccgatcttggaaggcgagtcgttctttggtcacgaaattatcatgaaaaaatataaagactccttcgtgaaggtgcagaacatgctgaatgccatggatcttgttagcgtgcaaatctttggcgaatttgcgggtggtggcattcagaaaggcgtcgattacggagacaaagatttctatgtgtttgacatcctgtctgatagcgggaacgagaaagtttactgggatgactatcgcgtcgaatcgttttgcaccacgctcggtctgaaattagcgcctctgctgggacgtggtagtttcgctgaactgtcccagtacccaaacgatttcaaaagcattgtgaaccgttataatgaattggttgatacgacgggcctggagatggccaataaacacgtctttggtccgcaagcgtcttctgaaactggcgtagcagaaggctacgttcttaaacccgtctatccgatcttctttaataccggtacgcgcgtggcgattaaatgcaagaactccaaattttcggagaaagccaagctggactcgccaattaaggcgaaggtggaactgacggagaacgataaacgtctgctcgaaatctttagcgagtatgttacctggaatcgcgtcagtaacgtactgtcacatattggctcagtgaccgcaaaagattttgggcgtgttatgggtctgacgatgaaagacatcatcaatgaagcagcacgcgaaggccatgatctgttgttcgctgataacccgtcggcggtgtgtagcgagctgaccattctcatccagaacacgattcgttccaaatggcacgaagttctggag

SEQ ID NO: 688 - protein, 346 aa, synthetic construct
  REGION 1..346: note = variant of RNA ligase 2 from Klebsiella phage KP179
MHHHHHHGGSNTFAYYSSLENHYNNKFIEKIRGAGFLMHTVEWVAREKIHGTNFSVIITPTEIVPAKRTGPILEGESFFGHEIIMKKYKDSFVKVQNMLNAMDLVSVQIFGEFAGGGIQKGVDYGDKDFYVFDILSDSGNEKVYWDDYRVESFCTTLGLKLAPLLGRGSFAELSQYPNDFKSIVNRYNELVDTTGLEMANKHVFGPQASSETGVAEGYVLKPVYPIFFNTGTRVAIKCKNSKFSEKAKLDSPIKAKVELTENDKRLLEIFSEYVTWNRVSNVLSHIGSVTAKDFGRVMGLTMKDIINEAAREGHDLLFADNPSAVCSELTILIQNTIRSKWHEVLE

SEQ ID NO: 689 - DNA, 1038 bp, synthetic construct
  misc_feature 1..1038: note = variant of RNA ligase 2 from Klebsiella phage KP179
  source 1..1038: mol_type = other DNA
atgcatcaccatcaccatcacggtggcagcaacacgtttgcgtattattcaagtctggaaaaccattacaataataagttcattgagaagatccgtggtgcaggcttcctgatgcacaccgtggaatgggtagctcgcgagaagattcatggaacgaactttagcgttatcattactccgaccgaaatctggccagccaaacgcacagggccgatcttggaaggcgagtcgttctttggtcacgaaattatcatgaaaaaatataaagactccttcgtgaaggtgcagaacatgctggtggttatggatcttgttagcgtgcaaatctttggcgaatttgcgggtggtggcattcagaaaggcgtcgattacggagacaaagatttctatgtgtttgacatcctgtctgatagcgggaacgagaaagtttactgggatgactatcgcgtcgaatcgttttgcaccacgctcggtctgaaattagcgcctctgctgggacgtggtagtttcgctgaactgtcccagtacccaaacgatttcaaaagcattgtgaaccgttataatgaattggttgatacgacgggcctgtggcacgccaataaacacgtctttggtccgcaagcgtcttctgaaactggcgtagcagaaggctacgttcttaaacccgtctatccgatcttctttaataccggtacgcgcgtggcgattaaatgcaagaactccaaattttcggagaaagccaagctggactcgccaattaaggcgaaggtggaactgacggagaacgataaacgtctgctcgaaatctttagcgagtatgttacctggaatcgcgtcagtaacgtactgtcacatattggctcagtgaccgcaaaagattttgggcgtgttatgggtctgacgatgaaagacatcattaatgaagcagcacgcgaaggccatgatctgttgttcgctgataacccgtcggcggtgaagaaagagctgaccattctcatccagaacacgattggctccaaatggcacgaagttctggag

SEQ ID NO: 690 - protein, 346 aa, synthetic construct
  REGION 1..346: note = variant of RNA ligase 2 from Klebsiella phage KP179
MHHHHHHGGSNTFAYYSSLENHYNNKFIEKIRGAGFLMHTVEWVAREKIHGTNFSVIITPTEIWPAKRTGPILEGESFFGHEIIMKKYKDSFVKVQNMLVVMDLVSVQIFGEFAGGGIQKGVDYGDKDFYVFDILSDSGNEKVYWDDYRVESFCTTLGLKLAPLLGRGSFAELSQYPNDFKSIVNRYNELVDTTGLWHANKHVFGPQASSETGVAEGYVLKPVYPIFFNTGTRVAIKCKNSKFSEKAKLDSPIKAKVELTENDKRLLEIFSEYVTWNRVSNVLSHIGSVTAKDFGRVMGLTMKDIINEAAREGHDLLFADNPSAVKKELTILIQNTIGSKWHEVLE

SEQ ID NO: 691 - DNA, 1038 bp, synthetic construct
  misc_feature 1..1038: note = variant of RNA ligase 2 from Klebsiella phage KP179
  source 1..1038: mol_type = other DNA
atgcatcaccatcaccatcacggtggcagcaacacgtttgcgtattattcaagtctggaaaaccattacaataataagttcattgagaagatccgtggtgcaggcttcctgatgcacaccgtggaatgggtagctcgcgagaagattcatggaacgaactttagcgttatcattactccgaccgaaatcgtcccagccaaacgcacagggccgatcttggaaggcgagtcgttctttggtcacgaaattatcatgaaaaaatataaagactccttcgtgaaggtgcagaacatgctgaacgttatggatcttgttagcgtgcaaatctttggcgaatttgcgggtggtggcattcagaaaggcgtcgattacggagacaaagatttctatgtgtttgacatcctgtctgatagcgggaacgagaaagtttactgggatgactatcgcgtcgaatcgttttgcaccacgctcggtctgaaattagcgcctctgctgggacgtggtagtttcgctgaactgtcccagtacccaaacgatttcaaaagcattgtgaaccgttataatgaattggttgatacgacgggcctggaacatgccaataaacacgtctttggtccgcaagcgtcttctgaaactggcgtagcagaaggctacgttcttaaacccgtctatccgatcttctttaataccggtacgcgcgtggcgattaaatgcaagaactccaaattttcggagaaagccaagctggactcgccaattaaggcgaaggtggaactgacggagaacgataaacgtctgctcgaaatctttagcgagtatgttacctggaatcgcgtcagtaacgtactgtcacatattggctcagtgaccgcaaaagattttgggcgtgttatgggtctgacgatgaaagacatcattaatgaagcagcacgcgaaggccatgatctgttgttcgctgataacccgtcggcggtgctgaaggagctgaccattctcatccagaacacgattcgttccaaatggcacgaagttctggag

SEQ ID NO: 692 - protein, 346 aa, synthetic construct
  REGION 1..346: note = variant of RNA ligase 2 from Klebsiella phage KP179
MHHHHHHGGSNTFAYYSSLENHYNNKFIEKIRGAGFLMHTVEWVAREKIHGTNFSVIITPTEIVPAKRTGPILEGESFFGHEIIMKKYKDSFVKVQNMLNVMDLVSVQIFGEFAGGGIQKGVDYGDKDFYVFDILSDSGNEKVYWDDYRVESFCTTLGLKLAPLLGRGSFAELSQYPNDFKSIVNRYNELVDTTGLEHANKHVFGPQASSETGVAEGYVLKPVYPIFFNTGTRVAIKCKNSKFSEKAKLDSPIKAKVELTENDKRLLEIFSEYVTWNRVSNVLSHIGSVTAKDFGRVMGLTMKDIINEAAREGHDLLFADNPSAVLKELTILIQNTIRSKWHEVLE

SEQ ID NO: 693 - DNA, 1038 bp, synthetic construct
  misc_feature 1..1038: note = variant of RNA ligase 2 from Klebsiella phage KP179
  source 1..1038: mol_type = other DNA
atgcatcaccatcaccatcacggtggcagcaacacgtttgcgtattattcaagtctggaaaaccattacaataataagttcattgagaagatccgtggtgcaggcttcctgatgcacaccgtggaatgggtagctcgcgagaagattcatggaacgaactttagcgttatcattactccgaccgaaatcgtcccagccaaacgcacagggccgatcttggaaggcgagtcgttctttggtcacgaaattatcatgaaaaaatataaagactccttcgtgaaggtgcagaacatgctgaacgttatggatcttgttagcgtgcaaatctttggcgaatttgcgggtggtggcattcagaaaggcgtcgattacggagacaaagatttctatgtgtttgacatcctgtctgatagcgggaacgagaaagtttactgggatgactatcgcgtcgaatcgttttgcaccacgctcggtctgaaattagcgcctctgctgggacgtggtagtttcgctgaactgtcccagtacccaaacgatttcaaaagcattgtgaaccgttataatgaattggttgatacgacgggcctgtggcatgccaataaacacgtctttggtccgcaagcgtcttctgaaactggcgtagcagaaggctacgttcttaaacccgtctatccgatcttctttaataccggtacgcgcgtggcgattaaatgcaagaactccaaattttcggagaaagccaagctggactcgccaattaaggcgaaggtggaactgacggagaacgataaacgtctgctcgaaatctttagcgagtatgttacctggaatcgcgtcagtaacgtactgtcacatattggctcagtgaccgcaaaagattttgggcgtgttatgggtctgacgatgaaagacatcatcaatgaagcagcacgcgaaggccatgatctgttgttcgctgataacccgtcggcggtgctgggcgagctgaccattctcatccagaacacgattcgttccaaatggcacgaagttctggag

SEQ ID NO: 694 - protein, 346 aa, synthetic construct
  REGION 1..346: note = variant of RNA ligase 2 from Klebsiella phage KP179
MHHHHHHGGSNTFAYYSSLENHYNNKFIEKIRGAGFLMHTVEWVAREKIHGTNFSVIITPTEIVPAKRTGPILEGESFFGHEIIMKKYKDSFVKVQNMLNVMDLVSVQIFGEFAGGGIQKGVDYGDKDFYVFDILSDSGNEKVYWDDYRVESFCTTLGLKLAPLLGRGSFAELSQYPNDFKSIVNRYNELVDTTGLWHANKHVFGPQASSETGVAEGYVLKPVYPIFFNTGTRVAIKCKNSKFSEKAKLDSPIKAKVELTENDKRLLEIFSEYVTWNRVSNVLSHIGSVTAKDFGRVMGLTMKDIINEAAREGHDLLFADNPSAVLGELTILIQNTIRSKWHEVLE

SEQ ID NO: 695 - DNA, 1038 bp, synthetic construct
  misc_feature 1..1038: note = variant of RNA ligase 2 from Klebsiella phage KP179
  source 1..1038: mol_type = other DNA
atgcatcaccatcaccatcacggtggcagcaacacgtttgcgtattattcaagtctggaaaaccattacaataataagttcattgagaagatccgtggtgcaggcttcctgatgcacaccgtggaatgggtagctcgcgagaagattcatggaacgaactttagcgttatcattactccgaccgaaatcgtcccagccaaacgcacagggccgatcttggaaggcgagtcgttctttggtcacgaaattatcatgaaaaaatataaagactccttcgtgaaggtgcagaacatgctgaacgctatggatcttgttagcgtgcaaatctttggcgaatttgcgggtggtggcattcagaaaggcgtcgattacggagacaaagatttctatgtgtttgacatcctgtctgatagcgggaacgggaaagtttactgggatgactatcgcgtcgaatcgttttgcaccacgctcggtctgaaattagcgcctctgctgggacgtggtagtttcgctgaactgtcccagtacccaaacgatttcaaaagcattgtgaaccgttataatgaattggttgatacgacgggcctgtggcatgccaataaacacgtctttggtccgcaagcgtcttctgaaactggcgtagcagaaggctacgttcttaaacccgtctatccgatcttctttaataccggtacgcgcgtggcgattaaatgcaagaactccaaattttcggagaaagccaagctggactcgccaattaaggcgaaggtggaactgacggagaacgataaacgtctgctcgaaatctttagcgagtatgttacctggaatcgcgtcagtaacgtactgtcacatattggctcagtgaccgcaaaagattttgggcgtgttatgggtctgacgatgaaagacatcattaatgaagcagcacgcgaaggccatgatctgttgttcgctgataacccgtcggcggtgctgggcgagctgaccattctcatccagaacacgattcgttccaaatggcacgaagttctggag

SEQ ID NO: 696 - protein, 346 aa, synthetic construct
  REGION 1..346: note = variant of RNA ligase 2 from Klebsiella phage KP179
MHHHHHHGGSNTFAYYSSLENHYNNKFIEKIRGAGFLMHTVEWVAREKIHGTNFSVIITPTEIVPAKRTGPILEGESFFGHEIIMKKYKDSFVKVQNMLNAMDLVSVQIFGEFAGGGIQKGVDYGDKDFYVFDILSDSGNGKVYWDDYRVESFCTTLGLKLAPLLGRGSFAELSQYPNDFKSIVNRYNELVDTTGLWHANKHVFGPQASSETGVAEGYVLKPVYPIFFNTGTRVAIKCKNSKFSEKAKLDSPIKAKVELTENDKRLLEIFSEYVTWNRVSNVLSHIGSVTAKDFGRVMGLTMKDIINEAAREGHDLLFADNPSAVLGELTILIQNTIRSKWHEVLE

SEQ ID NO: 697 - DNA, 1038 bp, synthetic construct
  misc_feature 1..1038: note = variant of RNA ligase 2 from Klebsiella phage KP179
  source 1..1038: mol_type = other DNA
atgcatcaccatcaccatcacggtggcagcaacacgtttgcgtattattcaagtctggaaaaccattacaataataagttcattgagaagatccgtggtgcaggcttcctgatgcacaccgtggaatgggtagctcgcgagaagattcatggaacgaactttagcgttatcattactccgaccgaaatcgtgccagccaaacgcacagggccgatcttggaaggcgagtcgttctttggtcacgaaattatcatgaaaaaatataaagactccttcgtgaaggtgcagaacatgctggtgtggatggatcttgttagcgtgcaaatctttggcgaatttgcgggtggtggcattcagaaaggcgtcgattacggagacaaagatttctatgtgtttgacatcctgtctgatagcgggaacgagaaagtttactgggatgactatcgcgtcgaatcgttttgcaccacgctcggtctgaaattagcgcctctgctgggacgtggtagtttcgctgaactgtcccagtacccaaacgatttcaaaagcattgtgaaccgttataatgaattggttgatacgacgggcctggaacatgccaataaacacgtctttggtccgcaagcgtcttctgaaactggcgtagcagaaggctacgttcttaaacccgtctatccgatcttctttaataccggtacgcgcgtggcgattaaatgcaagaactccaaattttcggagaaagccaagctggactcgccaattaaggcgaaggtggaactgacggagaacgataaacgtctgctcgaaatctttagcgagtatgttacctggaatcgcgtcagtaacgtactgtcacatattggctcagtgaccgcaaaagattttgggcgtgttatgggtctgacgatgaaagacatcattaatgaagcagcacgcgaaggccatgatctgttgttcgctgataacccgtcggcggtgaagaaagagctgaccattctcatccagaacacgattggctccaaatggcacgaagttctggag

SEQ ID NO: 698 - protein, 346 aa, synthetic construct
  REGION 1..346: note = variant of RNA ligase 2 from Klebsiella phage KP179
MHHHHHHGGSNTFAYYSSLENHYNNKFIEKIRGAGFLMHTVEWVAREKIHGTNFSVIITPTEIVPAKRTGPILEGESFFGHEIIMKKYKDSFVKVQNMLVWMDLVSVQIFGEFAGGGIQKGVDYGDKDFYVFDILSDSGNEKVYWDDYRVESFCTTLGLKLAPLLGRGSFAELSQYPNDFKSIVNRYNELVDTTGLEHANKHVFGPQASSETGVAEGYVLKPVYPIFFNTGTRVAIKCKNSKFSEKAKLDSPIKAKVELTENDKRLLEIFSEYVTWNRVSNVLSHIGSVTAKDFGRVMGLTMKDIINEAAREGHDLLFADNPSAVKKELTILIQNTIGSKWHEVLE

SEQ ID NO: 699 - DNA, 1038 bp, synthetic construct
  misc_feature 1..1038: note = variant of RNA ligase 2 from Klebsiella phage KP179
  source 1..1038: mol_type = other DNA
atgcatcaccatcaccatcacggtggcagcaacacgtttgcgtattattcaagtctggaaaaccattacaataataagttcattgagaagatccgtggtgcaggcttcctgatgcacaccgtggaatgggtagctcgcgagaagattcatggaacgaactttagcgttatcattactccgaccgaaatcgtcccagccaaacgcacagggccgatcttggaaggcgagtcgttctttggtcacgaaattatcatgaaaaaatataaagactccttcgtgaaggtgcagaacatgctgaatgccatggatcttgttagcgtgcaaatctttggcgaatttgcgggtggtggcattcagaaaggcgtcgattacggagacaaagatttctatgtgtttgacatcctgtctgatagcgggaacgagaaagtttactgggatgactatcgcgtcgaatcgttttgcaccacgctcggtctgaaattagcgcctctgctgggacgtggtagtttcgctgaactgtcccagtacccaaacgatttcaaaagcattgtgaaccgttataatgaattggttgatacgacgggcctgtggcatgccaataaacacgtctttggtccgcaagcgtcttctgaaactggcgtagcagaaggctacgttcttaaacccgtctatccgatcttctttaataccggtacgcgcgtggcgattaaatgcaagaactccaaattttcggagaaagccaagctggactcgccaattaaggcgaaggtggaactgacggagaacgataaacgtctgctcgaaatctttagcgagtatgttacctggaatcgcgtcagtaacgtactgtcacatattggctcagtgaccgcaaaagattttgggcgtgttatgggtctgacgatgaaagacatcattaatgaagcagcacgcgaaggccatgatctgttgttcgctgataacccgtcggcggtgaaaagcgagctgaccattctcatccagaacacgattcgttccaaatggcacgaagttctggag

SEQ ID NO: 700 - protein, 346 aa, synthetic construct
  REGION 1..346: note = variant of RNA ligase 2 from Klebsiella phage KP179
MHHHHHHGGSNTFAYYSSLENHYNNKFIEKIRGAGFLMHTVEWVAREKIHGTNFSVIITPTEIVPAKRTGPILEGESFFGHEIIMKKYKDSFVKVQNMLNAMDLVSVQIFGEFAGGGIQKGVDYGDKDFYVFDILSDSGNEKVYWDDYRVESFCTTLGLKLAPLLGRGSFAELSQYPNDFKSIVNRYNELVDTTGLWHANKHVFGPQASSETGVAEGYVLKPVYPIFFNTGTRVAIKCKNSKFSEKAKLDSPIKAKVELTENDKRLLEIFSEYVTWNRVSNVLSHIGSVTAKDFGRVMGLTMKDIINEAAREGHDLLFADNPSAVKSELTILIQNTIRSKWHEVLE

SEQ ID NO: 701 - DNA, 1038 bp, synthetic construct
  misc_feature 1..1038: note = variant of RNA ligase 2 from Klebsiella phage KP179
  source 1..1038: mol_type = other DNA
atgcatcaccatcaccatcacggtggcagcaacacgtttgcgtattattcaagtctggaaaaccattacaataataagttcattgagaagatccgtggtgcaggcttcctgatgcacaccgtggaatgggtagctcgcgagaagattcatggaacgaactttagcgttatcattactccgaccgaaatcgtcccagccaaacgcacagggccgatcttggaaggcgagtcgttctttggtcacgaaattatcatgaaaaaatataaagactccttcgtgaaggtgcagaacatgctgaatgccatggatcttgttagcgtgcaaatctttggcgaatttgcgggtggtggcattcagaaaggcgtcgattacggagacaaagatttctatgtgtttgacatcctgtctgatagcgggaacgagaaagtttactgggatgactatcgcgtcgaatcgttttgcaccacgctcggtctgaaattagcgcctctgctgggacgtggtagtttcgctgaactgtcccagtacccaaacgatttcaaaagcattgtgaaccgttataatgaattggttgatacgacgggcctgtggcacgccaataaacacgtctttggtccgcaagcgtcttctgaaactggcgtagcagaaggctacgttcttaaacccgtctatccgatcttctttaataccggtacgcgcgtggcgattaaatgcaagaactccaaattttcggagaaagccaagctggactcgccaattaaggcgaaggtggaactgacggagaacgataaacgtctgctcgaaatctttagcgagtatgttacctggaatcgcgtcagtaacgtactgtcacatattggctcagtgaccgcaaaagattttgggcgtgttatgggtctgacgatgaaagacatcattaatgaagcagcacgcgaaggccatgatctgttgttcgctgataacccgtcggcggtgaagaaagagctgaccattctcatccagaacacgattcgttccaaatggcacgaagttctggag

SEQ ID NO: 702 - protein, 346 aa, synthetic construct
  REGION 1..346: note = variant of RNA ligase 2 from Klebsiella phage KP179
MHHHHHHGGSNTFAYYSSLENHYNNKFIEKIRGAGFLMHTVEWVAREKIHGTNFSVIITPTEIVPAKRTGPILEGESFFGHEIIMKKYKDSFVKVQNMLNAMDLVSVQIFGEFAGGGIQKGVDYGDKDFYVFDILSDSGNEKVYWDDYRVESFCTTLGLKLAPLLGRGSFAELSQYPNDFKSIVNRYNELVDTTGLWHANKHVFGPQASSETGVAEGYVLKPVYPIFFNTGTRVAIKCKNSKFSEKAKLDSPIKAKVELTENDKRLLEIFSEYVTWNRVSNVLSHIGSVTAKDFGRVMGLTMKDIINEAAREGHDLLFADNPSAVKKELTILIQNTIRSKWHEVLE

SEQ ID NO: 703 - DNA, 1038 bp, synthetic construct
  misc_feature 1..1038: note = variant of RNA ligase 2 from Klebsiella phage KP179
  source 1..1038: mol_type = other DNA
atgcatcaccatcaccatcacggtggcagcaacacgtttgcgtattattcaagtctggaaaaccattacaataataagttcattgagaagatccgtggtgcaggcttcctgatgcacaccgtggaatgggtagctcgcgagaagattcatggaacgaactttagcgttatcattactccgaccgaaatcgtcccagccaaacgcacagggccgatcttggaaggcgagtcgttctttggtcacgaaattatcatgaaaaaatataaagactccttcgtgaaggtgcagaacatgctgaatgccatggatcttgttagcgtgcaaatctttggcgaatttgcgggtggtggcattcagaaaggcgtcgattacggagacaaagatttctatgtgtttgacatcctgtctgatagcgggaacgggaaagtttactgggatgactatcgcgtcgaatcgttttgcaccacgctcggtctgaaattagcgcctctgctgggacgtggtagtttcgctgaactgtcccagtacccaaacgatttcaaaagcattgtgaaccgttataatgaattggttgatacgacgggcctgtggcatgccaataaacacgtctttggtccgcaagcgtcttctgaaactggcgtagcagaaggctacgttcttaaacccgtctatccgatcttctttaataccggtacgcgcgtggcgattaaatgcaagaactccaaattttcggagaaagccaagctggactcgccaattaaggcgaaggtggaactgacggagaacgataaacgtctgctcgaaatctttagcgagtatgttacctggaatcgcgtcagtaacgtactgtcacatattggctcagtgaccgcaaaagattttgggcgtgttatgggtctgacgatgaaagacatcatcaatgaagcagcacgcgaaggccatgatctgttgttcgctgataacccgtcggcggtgaagaaagagctgaccattctcatccagaacacgattcgttccaaatggcacgaagttctggag

SEQ ID NO: 704 - protein, 346 aa, synthetic construct
  REGION 1..346: note = variant of RNA ligase 2 from Klebsiella phage KP179
MHHHHHHGGSNTFAYYSSLENHYNNKFIEKIRGAGFLMHTVEWVAREKIHGTNFSVIITPTEIVPAKRTGPILEGESFFGHEIIMKKYKDSFVKVQNMLNAMDLVSVQIFGEFAGGGIQKGVDYGDKDFYVFDILSDSGNGKVYWDDYRVESFCTTLGLKLAPLLGRGSFAELSQYPNDFKSIVNRYNELVDTTGLWHANKHVFGPQASSETGVAEGYVLKPVYPIFFNTGTRVAIKCKNSKFSEKAKLDSPIKAKVELTENDKRLLEIFSEYVTWNRVSNVLSHIGSVTAKDFGRVMGLTMKDIINEAAREGHDLLFADNPSAVKKELTILIQNTIRSKWHEVLE

SEQ ID NO: 705 - DNA, 1038 bp, synthetic construct
  misc_feature 1..1038: note = variant of RNA ligase 2 from Klebsiella phage KP179
  source 1..1038: mol_type = other DNA
atgcatcaccatcaccatcacggtggcagcaacacgtttgcgtattattcaagtctggaaaaccattacaataataagttcattgagaagatccgtggtgcaggcttcctgatgcacaccgtggaatgggtagctcgcgagaagattcatggaacgaactttagcgttatcattactccgaccgaaatcgtcccagccaaacgcacagggccgatcttggaaggcgagtcgttctttggtcacgaaattatcatgaaaaaatataaagactccttcgtgaaggtgcagaacatgctgaacgttatggatcttgttagcgtgcaaatctttggcgaatttgcgggtggtggcattcagaaaggcgtcgattacggagacaaagatttctatgtgtttgacatcctgtctgatagcgggaacgagaaagtttactgggatgactatcgcgtcgaatcgttttgcaccacgctcggtctgaaattagcgcctctgctgggacgtggtagtttcgctgaactgtcccagtacccaaacgatttcaaaagcattgtgaaccgttataatgaattggttgatacgacgggcctggaacatgccaataaacacgtctttggtccgcaagcgtcttctgaaactggcgtagcagaaggctacgttcttaaacccgtctatccgatcttctttaataccggtacgcgcgtggcgattaaatgcaagaactccaaattttcggagaaagccaagctggactcgccaattaaggcgaaggtggaactgacggagaacgataaacgtctgctcgaaatctttagcgagtatgttacctggaatcgcgtcagtaacgtactgtcacatattggctcagtgaccgcaaaagattttgggcgtgttatgggtctgacgatgaaagacatcattaatgaagcagcacgcgaaggccatgatctgttgttcgctgataacccgtcggcggtgaagaaagagctgaccattctcatccagaacacgattcgttccaaatggcacgaagttctggag

SEQ ID NO: 706 - protein, 346 aa, synthetic construct
  REGION 1..346: note = variant of RNA ligase 2 from Klebsiella phage KP179
MHHHHHHGGSNTFAYYSSLENHYNNKFIEKIRGAGFLMHTVEWVAREKIHGTNFSVIITPTEIVPAKRTGPILEGESFFGHEIIMKKYKDSFVKVQNMLNVMDLVSVQIFGEFAGGGIQKGVDYGDKDFYVFDILSDSGNEKVYWDDYRVESFCTTLGLKLAPLLGRGSFAELSQYPNDFKSIVNRYNELVDTTGLEHANKHVFGPQASSETGVAEGYVLKPVYPIFFNTGTRVAIKCKNSKFSEKAKLDSPIKAKVELTENDKRLLEIFSEYVTWNRVSNVLSHIGSVTAKDFGRVMGLTMKDIINEAAREGHDLLFADNPSAVKKELTILIQNTIRSKWHEVLE

SEQ ID NO: 707 - DNA, 1038 bp, synthetic construct
  misc_feature 1..1038: note = variant of RNA ligase 2 from Klebsiella phage KP179
  source 1..1038: mol_type = other DNA
atgcatcaccatcaccatcacggtggcagcaacacgtttgcgtattattcaagtctggaaaaccattacaataataagttcattgagaagatccgtggtgcaggcttcctgatgcacaccgtggaatgggtagctcgcgagaagattcatggaacgaactttagcgttatcattactccgaccgaaatcgtcccagccaaacgcacagggccgatcttggaaggcgagtcgttctttggtcacgaaattatcatgaaaaaatataaagactccttcgtgaaggtgcagaacatgctgaacgttatggatcttgttagcgtgcaaatctttggcgaatttgcgggtggtggcattcagaaaggcgtcgattacggagacaaagatttctatgtgtttgacatcctgtctgatagcgggaacgagaaagtttactgggatgactatcgcgtcgaatcgttttgcaccacgctcggtctgaaattagcgcctctgctgggacgtggtagtttcgctgaactgtcccagtacccaaacgatttcaaaagcattgtgaaccgttataatgaattggttgatacgacgggcctggagatggccaataaacacgtctttggtccgcaagcgtcttctgaaactggcgtagcagaaggctacgttcttaaacccgtctatccgatcttctttaataccggtacgcgcgtggcgattaaatgcaagaactccaaattttcggagaaagccaagctggactcgccaattaaggcgaaggtggaactgacggagaacgataaacgtctgctcgaaatctttagcgagtatgttacctggaatcgcgtcagtaacgtactgtcacatattggctcagtgaccgcaaaagattttgggcgtgttatgggtctgacgatgaaagacatcatcaatgaagcagcacgcgaaggccatgatctgttgttcgctgataacccgtcggcggtgtgtaaggagctgaccattctcatccagaacacgattcgttccaaatggcacgaagttctggag

SEQ ID NO: 708 - protein, 346 aa, synthetic construct
  REGION 1..346: note = variant of RNA ligase 2 from Klebsiella phage KP179
MHHHHHHGGSNTFAYYSSLENHYNNKFIEKIRGAGFLMHTVEWVAREKIHGTNFSVIITPTEIVPAKRTGPILEGESFFGHEIIMKKYKDSFVKVQNMLNVMDLVSVQIFGEFAGGGIQKGVDYGDKDFYVFDILSDSGNEKVYWDDYRVESFCTTLGLKLAPLLGRGSFAELSQYPNDFKSIVNRYNELVDTTGLEMANKHVFGPQASSETGVAEGYVLKPVYPIFFNTGTRVAIKCKNSKFSEKAKLDSPIKAKVELTENDKRLLEIFSEYVTWNRVSNVLSHIGSVTAKDFGRVMGLTMKDIINEAAREGHDLLFADNPSAVCKELTILIQNTIRSKWHEVLE

SEQ ID NO: 709 - DNA, 1038 bp, synthetic construct
  misc_feature 1..1038: note = variant of RNA ligase 2 from Klebsiella phage KP179
  source 1..1038: mol_type = other DNA
atgcatcaccatcaccatcacggtggcagcaacacgtttgcgtattattcaagtctggaaaaccattacaataataagttcattgagaagatccgtggtgcaggcttcctgatgcacaccgtggaatgggtagctcgcgagaagattcatggaacgaactttagcgttatcattactccgaccgaaatctggccagccaaacgcacagggccgatcttggaaggcgagtcgttctttggtcacgaaattatcatgaaaaaatataaagactccttcgtgaaggtgcagaacatgctgaatgccatggatcttgttagcgtgcaaatctttggcgaatttgcgggtggtggcattcagaaaggcgtcgattacggagacaaagatttctatgtgtttgacatcctgtctgatagcgggaacgagaaagtttactgggatgactatcgcgtcgaatcgttttgcaccacgctcggtctgaaattagcgcctctgctgggacgtggtagtttcgctgaactgtcccagtacccaaacgatttcaaaagcattgtgaaccgttataatgaattggttgatacgacgggcctgtggatggccaataaacacgtctttggtccgcaagcgtcttctgaaactggcgtagcagaaggctacgttcttaaacccgtctatccgatcttctttaataccggtacgcgcgtggcgattaaatgcaagaactccaaattttcggagaaagccaagctggactcgccaattaaggcgaaggtggaactgacggagaacgataaacgtctgctcgaaatctttagcgagtatgttacctggaatcgcgtcagtaacgtactgtcacatattggctcagtgaccgcaaaagattttgggcgtgttatgggtctgacgatgaaagacatcattaatgaagcagcacgcgaaggccatgatctgttgttcgctgataacccgtcggcggtgaagaaagagctgaccattctcatccagaacacgattggctccaaatggcacgaagttctggag

SEQ ID NO: 710 - protein, 346 aa, synthetic construct
  REGION 1..346: note = variant of RNA ligase 2 from Klebsiella phage KP179
MHHHHHHGGSNTFAYYSSLENHYNNKFIEKIRGAGFLMHTVEWVAREKIHGTNFSVIITPTEIWPAKRTGPILEGESFFGHEIIMKKYKDSFVKVQNMLNAMDLVSVQIFGEFAGGGIQKGVDYGDKDFYVFDILSDSGNEKVYWDDYRVESFCTTLGLKLAPLLGRGSFAELSQYPNDFKSIVNRYNELVDTTGLWMANKHVFGPQASSETGVAEGYVLKPVYPIFFNTGTRVAIKCKNSKFSEKAKLDSPIKAKVELTENDKRLLEIFSEYVTWNRVSNVLSHIGSVTAKDFGRVMGLTMKDIINEAAREGHDLLFADNPSAVKKELTILIQNTIGSKWHEVLE

SEQ ID NO: 711 - DNA, 1038 bp, synthetic construct
  misc_feature 1..1038: note = variant of RNA ligase 2 from Klebsiella phage KP179
  source 1..1038: mol_type = other DNA
atgcatcaccatcaccatcacggtggcagcaacacgtttgcgtattattcaagtctggaaaaccattacaataataagttcattgagaagatccgtggtgcaggcttcctgatgcacaccgtggaatgggtagctcgcgagaagattcatggaacgaactttagcgttatcattactccgaccgaaatcgtcccagccaaacgcacagggccgatcttggaaggcgagtcgttctttggtcacgaaattatcatgaaaaaatataaagactccttcgtgaaggtgcagaacatgctgaacgctatggatcttgttagcgtgcaaatctttggcgaatttgcgggtggtggcattcagaaaggcgtcgattacggagacaaagatttctatgtgtttgacatcctgtctgatagcgggaacgggaaagtttactgggatgactatcgcgtcgaatcgttttgcaccacgctcggtctgaaattagcgcctctgctgggacgtggtagtttcgctgaactgtcccagtacccaaacgatttcaaaagcattgtgaaccgttataatgaattggttgatacgacgggcctggagcatgccaataaacacgtctttggtccgcaagcgtcttctgaaactggcgtagcagaaggctacgttcttaaacccgtctatccgatcttctttaataccggtacgcgcgtggcgattaaatgcaagaactccaaattttcggagaaagccaagctggactcgccaattaaggcgaaggtggaactgacggagaacgataaacgtctgctcgaaatctttagcgagtatgttacctggaatcgcgtcagtaacgtactgtcacatattggctcagtgaccgcaaaagattttgggcgtgttatgggtctgacgatgaaagacatcattaatgaagcagcacgcgaaggccatgatctgttgttcgctgataacccgtcggcggtgaaaaaggagctgaccattctcatccagaacacgattcgttccaaatggcacgaagttctggag

SEQ ID NO: 712 - protein, 346 aa, synthetic construct
  REGION 1..346: note = variant of RNA ligase 2 from Klebsiella phage KP179
MHHHHHHGGSNTFAYYSSLENHYNNKFIEKIRGAGFLMHTVEWVAREKIHGTNFSVIITPTEIVPAKRTGPILEGESFFGHEIIMKKYKDSFVKVQNMLNAMDLVSVQIFGEFAGGGIQKGVDYGDKDFYVFDILSDSGNGKVYWDDYRVESFCTTLGLKLAPLLGRGSFAELSQYPNDFKSIVNRYNELVDTTGLEHANKHVFGPQASSETGVAEGYVLKPVYPIFFNTGTRVAIKCKNSKFSEKAKLDSPIKAKVELTENDKRLLEIFSEYVTWNRVSNVLSHIGSVTAKDFGRVMGLTMKDIINEAAREGHDLLFADNPSAVKKELTILIQNTIRSKWHEVLE

SEQ ID NO: 713 - DNA, 1038 bp, synthetic construct
  misc_feature 1..1038: note = variant of RNA ligase 2 from Klebsiella phage KP179
  source 1..1038: mol_type = other DNA
atgcatcaccatcaccatcacggtggcagcaacacgtttgcgtattattcaagtctggaaaaccattacaataataagttcattgagaagatccgtggtgcaggcttcctgatgcacaccgtggaatgggtagctcgcgagaagattcatggaacgaactttagcgttatcattactccgaccgaaatctggccagccaaacgcacagggccgatcttggaaggcgagtcgttctttggtcacgaaattatcatgaaaaaatataaagactccttcgtgaaggtgcagaacatgctggtgtggatggatcttgttagcgtgcaaatctttggcgaatttgcgggtggtggcattcagaaaggcgtcgattacggagacaaagatttctatgtgtttgacatcctgtctgatagcgggaacgagaaagtttactgggatgactatcgcgtcgaatcgttttgcaccacgctcggtctgaaattagcgcctctgctgggacgtggtagtttcgctgaactgtcccagtacccaaacgatttcaaaagcattgtgaaccgttataatgaattggttgatacgacgggcctggagcacgccaataaacacgtctttggtccgcaagcgtcttctgaaactggcgtagcagaaggctacgttcttaaacccgtctatccgatcttctttaataccggtacgcgcgtggcgattaaatgcaagaactccaaattttcggagaaagccaagctggactcgccaattaaggcgaaggtggaactgacggagaacgataaacgtctgctcgaaatctttagcgagtatgttacctggaatcgcgtcagtaacgtactgtcacatattggctcagtgaccgcaaaagattttgggcgtgttatgggtctgacgatgaaagacatcattaatgaagcagcacgcgaaggccatgatctgttgttcgctgataacccgtcggcggtgaagaaagagctgaccattctcatccagaacacgattggctccaaatggcacgaagttctggag

SEQ ID NO: 714 - protein, 346 aa, synthetic construct
  REGION 1..346: note = variant of RNA ligase 2 from Klebsiella phage KP179
MHHHHHHGGSNTFAYYSSLENHYNNKFIEKIRGAGFLMHTVEWVAREKIHGTNFSVIITPTEIWPAKRTGPILEGESFFGHEIIMKKYKDSFVKVQNMLVWMDLVSVQIFGEFAGGGIQKGVDYGDKDFYVFDILSDSGNEKVYWDDYRVESFCTTLGLKLAPLLGRGSFAELSQYPNDFKSIVNRYNELVDTTGLEHANKHVFGPQASSETGVAEGYVLKPVYPIFFNTGTRVAIKCKNSKFSEKAKLDSPIKAKVELTENDKRLLEIFSEYVTWNRVSNVLSHIGSVTAKDFGRVMGLTMKDIINEAAREGHDLLFADNPSAVKKELTILIQNTIGSKWHEVLE

SEQ ID NO: 715 - DNA, 1038 bp, synthetic construct
  misc_feature 1..1038: note = variant of RNA ligase 2 from Klebsiella phage KP179
  source 1..1038: mol_type = other DNA
atgcatcaccatcaccatcacggtggcagcaacacgtttgcgtattattcaagtctggaaaaccattacaataataagttcattgagaagatccgtggtgcaggcttcctgatgcacaccgtggaatgggtagctcgcgagaagattcatggaacgaactttagcgttatcattactccgaccgaaatcgtcccagccaaacgcacagggccgatcttggaaggcgagtcgttctttggtcacgaaattatcatgaaaaaatataaagactccttcgtgaaggtgcagaacatgctgaacgttatggatcttgttagcgtgcaaatctttggcgaatttgcgggtggtggcattcagaaaggcgtcgattacggagacaaagatttctatgtgtttgacatcctgtctgatagcgggaacgggaaagtttactgggatgactatcgcgtcgaatcgttttgcaccacgctcggtctgaaattagcgcctctgctgggacgtggtagtttcgctgaactgtcccagtacccaaacgatttcaaaagcattgtgaaccgttataatgaattggttgatacgacgggcctggagcatgccaataaacacgtctttggtccgcaagcgtcttctgaaactggcgtagcagaaggctacgttcttaaacccgtctatccgatcttctttaataccggtacgcgcgtggcgattaaatgcaagaactccaaattttcggagaaagccaagctggactcgccaattaaggcgaaggtggaactgacggagaacgataaacgtctgctcgaaatctttagcgagtatgttacctggaatcgcgtcagtaacgtactgtcacatattggctcagtgaccgcaaaagattttgggcgtgttatgggtctgacgatgaaagacatcattaatgaagcagcacgcgaaggccatgatctgttgttcgctgataacccgtcggcggtgaagaaagagctgaccattctcatccagaacacgattcgttccaaatggcacgaagttctggag

SEQ ID NO: 716 - protein, 346 aa, synthetic construct
  REGION 1..346: note = variant of RNA ligase 2 from Klebsiella phage KP179
MHHHHHHGGSNTFAYYSSLENHYNNKFIEKIRGAGFLMHTVEWVAREKIHGTNFSVIITPTEIVPAKRTGPILEGESFFGHEIIMKKYKDSFVKVQNMLNVMDLVSVQIFGEFAGGGIQKGVDYGDKDFYVFDILSDSGNGKVYWDDYRVESFCTTLGLKLAPLLGRGSFAELSQYPNDFKSIVNRYNELVDTTGLEHANKHVFGPQASSETGVAEGYVLKPVYPIFFNTGTRVAIKCKNSKFSEKAKLDSPIKAKVELTENDKRLLEIFSEYVTWNRVSNVLSHIGSVTAKDFGRVMGLTMKDIINEAAREGHDLLFADNPSAVKKELTILIQNTIRSKWHEVLE

SEQ ID NO: 717 - DNA, 1038 bp, synthetic construct
  misc_feature 1..1038: note = variant of RNA ligase 2 from Klebsiella phage KP179
  source 1..1038: mol_type = other DNA
atgcatcaccatcaccatcacggtggcagcaacacgtttgcgtattattcaagtctggaaaaccattacaataataagttcattgagaagatccgtggtgcaggcttcctgatgcacaccgtggaatgggtagctcgcgagaagattcatggaacgaactttagcgttatcattactccgaccgaaatcgtcccagccaaacgcacagggccgatcttggaaggcgagtcgttctttggtcacgaaattatcatgaaaaaatataaagactccttcgtgaaggtgcagaacatgctggtggttatggatcttgttagcgtgcaaatctttggcgaatttgcgggtggtggcattcagaaaggcgtcgattacggagacaaagatttctatgtgtttgacatcctgtctgatagcgggaacgagaaagtttactgggatgactatcgcgtcgaatcgttttgcaccacgctcggtctgaaattagcgcctctgctgggacgtggtagtttcgctgaactgtcccagtacccaaacgatttcaaaagcattgtgaaccgttataatgaattggttgatacgacgggcctgtggcacgccaataaacacgtctttggtccgcaagcgtcttctgaaactggcgtagcagaaggctacgttcttaaacccgtctatccgatcttctttaataccggtacgcgcgtggcgattaaatgcaagaactccaaattttcggagaaagccaagctggactcgccaattaaggcgaaggtggaactgacggagaacgataaacgtctgctcgaaatctttagcgagtatgttacctggaatcgcgtcagtaacgtactgtcacatattggctcagtgaccgcaaaagattttgggcgtgttatgggtctgacgatgaaagacatcattaatgaagcagcacgcgaaggccatgatctgttgttcgctgataacccgtcggcggtgaagaaagagctgaccattctcatccagaacacgattctgtccaaatggcacgaagttctggag

SEQ ID NO: 718 - protein, 346 aa, synthetic construct
  REGION 1..346: note = variant of RNA ligase 2 from Klebsiella phage KP179
MHHHHHHGGSNTFAYYSSLENHYNNKFIEKIRGAGFLMHTVEWVAREKIHGTNFSVIITPTEIVPAKRTGPILEGESFFGHEIIMKKYKDSFVKVQNMLVVMDLVSVQIFGEFAGGGIQKGVDYGDKDFYVFDILSDSGNEKVYWDDYRVESFCTTLGLKLAPLLGRGSFAELSQYPNDFKSIVNRYNELVDTTGLWHANKHVFGPQASSETGVAEGYVLKPVYPIFFNTGTRVAIKCKNSKFSEKAKLDSPIKAKVELTENDKRLLEIFSEYVTWNRVSNVLSHIGSVTAKDFGRVMGLTMKDIINEAAREGHDLLFADNPSAVKKELTILIQNTILSKWHEVLE

SEQ ID NO: 719 - DNA, 1038 bp, synthetic construct
  misc_feature 1..1038: note = variant of RNA ligase 2 from Klebsiella phage KP179
  source 1..1038: mol_type = other DNA
atgcatcaccatcaccatcacggtggcagcaacacgtttgcgtattattcaagtctggaaaaccattacaataataagttcattgagaagatccgtggtgcaggcttcctgatgcacaccgtggaatgggtagctcgcgagaagattcatggaacgaactttagcgttatcattactccgaccgaaatcgtcccagccaaacgcacagggccgatcttggaaggcgagtcgttctttggtcacgaaattatcatgaaaaaatataaagactccttcgtgaaggtgcagaacatgctgaacgctatggatcttgttagcgtgcaaatctttggcgaatttgcgggtggtggcattcagaaaggcgtcgattacggagacaaagatttctatgtgtttgacatcctgtctgatagcgggaacgggaaagtttactgggatgactatcgcgtcgaatcgttttgcaccacgctcggtctgaaattagcgcctctgctgggacgtggtagtttcgctgaactgtcccagtacccaaacgatttcaaaagcattgtgaaccgttataatgaattggttgatacgacgggcctggaacatgccaataaacacgtctttggtccgcaagcgtcttctgaaactggcgtagcagaaggctacgttcttaaacccgtctatccgatcttctttaataccggtacgcgcgtggcgattaaatgcaagaactccaaattttcggagaaagccaagctggactcgccaattaaggcgaaggtggaactgacggagaacgataaacgtctgctcgaaatctttagcgagtatgttacctggaatcgcgtcagtaacgtactgtcacatattggctcagtgaccgcaaaagattttgggcgtgttatgggtctgacgatgaaagacatcattaatgaagcagcacgcgaaggccatgatctgttgttcgctgataacccgtcggcggtgtgtaaggagctgaccattctcatccagaacacgattcgttccaaatggcacgaagttctggag

SEQ ID NO: 720 - protein, 346 aa, synthetic construct
  REGION 1..346: note = variant of RNA ligase 2 from Klebsiella phage KP179
MHHHHHHGGSNTFAYYSSLENHYNNKFIEKIRGAGFLMHTVEWVAREKIHGTNFSVIITPTEIVPAKRTGPILEGESFFGHEIIMKKYKDSFVKVQNMLNAMDLVSVQIFGEFAGGGIQKGVDYGDKDFYVFDILSDSGNGKVYWDDYRVESFCTTLGLKLAPLLGRGSFAELSQYPNDFKSIVNRYNELVDTTGLEHANKHVFGPQASSETGVAEGYVLKPVYPIFFNTGTRVAIKCKNSKFSEKAKLDSPIKAKVELTENDKRLLEIFSEYVTWNRVSNVLSHIGSVTAKDFGRVMGLTMKDIINEAAREGHDLLFADNPSAVCKELTILIQNTIRSKWHEVLE

SEQ ID NO: 721 - DNA, 1038 bp, synthetic construct
  misc_feature 1..1038: note = variant of RNA ligase 2 from Klebsiella phage KP179
  source 1..1038: mol_type = other DNA
atgcatcaccatcaccatcacggtggcagcaacacgtttgcgtattattcaagtctggaaaaccattacaataataagttcattgagaagatccgtggtgcaggcttcctgatgcacaccgtggaatgggtagctcgcgagaagattcatggaacgaactttagcgttatcattactccgaccgaaatcgtgccagccaaacgcacagggccgatcttggaaggcgagtcgttctttggtcacgaaattatcatgaaaaaatataaagactccttcgtgaaggtgcagaacatgctgaatgccatggatcttgttagcgtgcaaatctttggcgaatttgcgggtggtggcattcagaaaggcgtcgattacggagacaaagatttctatgtgtttgacatcctgtctgatagcgggaacgagaaagtttactgggatgactatcgcgtcgaatcgttttgcaccacgctcggtctgaaattagcgcctctgctgggacgtggtagtttcgctgaactgtcccagtacccaaacgatttcaaaagcattgtgaaccgttataatgaattggttgatacgacgggcctggagcacgccaataaacacgtctttggtccgcaagcgtcttctgaaactggcgtagcagaaggctacgttcttaaacccgtctatccgatcttctttaataccggtacgcgcgtggcgattaaatgcaagaactccaaattttcggagaaagccaagctggactcgccaattaaggcgaaggtggaactgacggagaacgataaacgtctgctcgaaatctttagcgagtatgttacctggaatcgcgtcagtaacgtactgtcacatattggctcagtgaccgcaaaagattttgggcgtgttatgggtctgacgatgaaagacatcattaatgaagcagcacgcgaaggccatgatctgttgttcgctgataacccgtcggcggtgaagaaagagctgaccattctcatccagaacacgattctgtccaaatggcacgaagttctggag

SEQ ID NO: 722 - protein, 346 aa, synthetic construct
  REGION 1..346: note = variant of RNA ligase 2 from Klebsiella phage KP179
MHHHHHHGGSNTFAYYSSLENHYNNKFIEKIRGAGFLMHTVEWVAREKIHGTNFSVIITPTEIVPAKRTGPILEGESFFGHEIIMKKYKDSFVKVQNMLNAMDLVSVQIFGEFAGGGIQKGVDYGDKDFYVFDILSDSGNEKVYWDDYRVESFCTTLGLKLAPLLGRGSFAELSQYPNDFKSIVNRYNELVDTTGLEHANKHVFGPQASSETGVAEGYVLKPVYPIFFNTGTRVAIKCKNSKFSEKAKLDSPIKAKVELTENDKRLLEIFSEYVTWNRVSNVLSHIGSVTAKDFGRVMGLTMKDIINEAAREGHDLLFADNPSAVKKELTILIQNTILSKWHEVLE

SEQ ID NO: 723 - DNA, 1038 bp, synthetic construct
  misc_feature 1..1038: note = variant of RNA ligase 2 from Klebsiella phage KP179
  source 1..1038: mol_type = other DNA
atgcatcaccatcaccatcacggtggcagcaacacgtttgcgtattattcaagtctggaaaaccattacaataataagttcattgagaagatccgtggtgcaggcttcctgatgcacaccgtggaatgggtagctcgcgagaagattcatggaacgaactttagcgttatcattactccgaccgaaatcgtcccagccaaacgcacagggccgatcttggaaggcgagtcgttctttggtcacgaaattatcatgaaaaaatataaagactccttcgtgaaggtgcagaacatgctgaatgccatggatcttgttagcgtgcaaatctttggcgaatttgcgggtggtggcattcagaaaggcgtcgattacggagacaaagatttctatgtgtttgacatcctgtctgatagcgggaacgagaaagtttactgggatgactatcgcgtcgaatcgttttgcaccacgctcggtctgaaattagcgcctctgctgggacgtggtagtttcgctgaactgtcccagtacccaaacgatttcaaaagcattgtgaaccgttataatgaattggttgatacgacgggcctgtggcacgccaataaacacgtctttggtccgcaagcgtcttctgaaactggcgtagcagaaggctacgttcttaaacccgtctatccgatcttctttaataccggtacgcgcgtggcgattaaatgcaagaactccaaattttcggagaaagccaagctggactcgccaattaaggcgaaggtggaactgacggagaacgataaacgtctgctcgaaatctttagcgagtatgttacctggaatcgcgtcagtaacgtactgtcacatattggctcagtgaccgcaaaagattttgggcgtgttatgggtctgacgatgaaagacatcattaatgaagcagcacgcgaaggccatgatctgttgttcgctgataacccgtcggcggtgaagaaagagctgaccattctcatccagaacacgattggctccaaatggcacgaagttctggag

SEQ ID NO: 724 - protein, 346 aa, synthetic construct
  REGION 1..346: note = variant of RNA ligase 2 from Klebsiella phage KP179
MHHHHHHGGSNTFAYYSSLENHYNNKFIEKIRGAGFLMHTVEWVAREKIHGTNFSVIITPTEIVPAKRTGPILEGESFFGHEIIMKKYKDSFVKVQNMLNAMDLVSVQIFGEFAGGGIQKGVDYGDKDFYVFDILSDSGNEKVYWDDYRVESFCTTLGLKLAPLLGRGSFAELSQYPNDFKSIVNRYNELVDTTGLWHANKHVFGPQASSETGVAEGYVLKPVYPIFFNTGTRVAIKCKNSKFSEKAKLDSPIKAKVELTENDKRLLEIFSEYVTWNRVSNVLSHIGSVTAKDFGRVMGLTMKDIINEAAREGHDLLFADNPSAVKKELTILIQNTIGSKWHEVLE

SEQ ID NO: 725 - DNA, 1038 bp, synthetic construct
  misc_feature 1..1038: note = variant of RNA ligase 2 from Klebsiella phage KP179
  source 1..1038: mol_type = other DNA
atgcatcaccatcaccatcacggtggcagcaacacgtttgcgtattattcaagtctggaaaaccattacaataataagttcattgagaagatccgtggtgcaggcttcctgatgcacaccgtggaatgggtagctcgcgagaagattcatggaacgaactttagcgttatcattactccgaccgaaatcgtcccagccaaacgcacagggccgatcttggaaggcgagtcgttctttggtcacgaaattatcatgaaaaaatataaagactccttcgtgaaggtgcagaacatgctgaatgctatggatcttgttagcgtgcaaatctttggcgaatttgcgggtggtggcattcagaaaggcgtcgattacggagacaaagatttctatgtgtttgacatcctgtctgatagcgggaacgagaaagtttactgggatgactatcgcgtcgaatcgttttgcaccacgctcggtctgaaattagcgcctctgctgggacgtggtagtttcgctgaactgtcccagtacccaaacgatttcaaaagcattgtgaaccgttataatgaattggttgatacgacgggcctggagcatgccaataaacacgtctttggtccgcaagcgtcttctgaaactggcgtagcagaaggctacgttcttaaacccgtctatccgatcttctttaataccggtacgcgcgtggcgattaaatgcaagaactccaaattttcggagaaagccaagctggactcgccaattaaggcgaaggtggaactgacggagaacgataaacgtctgctcgaaatctttagcgagtatgttacctggaatcgcgtcagtaacgtactgtcacatattggctcagtgaccgcaaaagattttgggcgtgttatgggtctgacgatgaaagacatcattaatgaagcagcacgcgaaggccatgatctgttgttcgctgataacccgtcggcggtgctgaaggagctgaccattctcatccagaacacgattcgttccaaatggcacgaagttctggag

SEQ ID NO: 726 - protein, 346 aa, synthetic construct
  REGION 1..346: note = variant of RNA ligase 2 from Klebsiella phage KP179
MHHHHHHGGSNTFAYYSSLENHYNNKFIEKIRGAGFLMHTVEWVAREKIHGTNFSVIITPTEIVPAKRTGPILEGESFFGHEIIMKKYKDSFVKVQNMLNAMDLVSVQIFGEFAGGGIQKGVDYGDKDFYVFDILSDSGNEKVYWDDYRVESFCTTLGLKLAPLLGRGSFAELSQYPNDFKSIVNRYNELVDTTGLEHANKHVFGPQASSETGVAEGYVLKPVYPIFFNTGTRVAIKCKNSKFSEKAKLDSPIKAKVELTENDKRLLEIFSEYVTWNRVSNVLSHIGSVTAKDFGRVMGLTMKDIINEAAREGHDLLFADNPSAVLKELTILIQNTIRSKWHEVLE

SEQ ID NO: 727 - DNA, 1038 bp, synthetic construct
  misc_feature 1..1038: note = variant of RNA ligase 2 from Klebsiella phage KP179
  source 1..1038: mol_type = other DNA
atgcatcaccatcaccatcacggtggcagcaacacgtttgcgtattattcaagtctggaaaaccattacaataataagttcattgagaagatccgtggtgcaggcttcctgatgcacaccgtggaatgggtagctcgcgagaagattcatggaacgaactttagcgttatcattactccgaccgaaatcgtgccagccaaacgcacagggccgatcttggaaggcgagtcgttctttggtcacgaaattatcatgaaaaaatataaagactccttcgtgaaggtgcagaacatgctgaatgccatggatcttgttagcgtgcaaatctttggcgaatttgcgggtggtggcattcagaaaggcgtcgattacggagacaaagatttctatgtgtttgacatcctgtctgatagcgggaacgagaaagtttactgggatgactatcgcgtcgaatcgttttgcaccacgctcggtctgaaattagcgcctctgctgggacgtggtagtttcgctgaactgtcccagtacccaaacgatttcaaaagcattgtgaaccgttataatgaattggttgatacgacgggcctgtggatggccaataaacacgtctttggtccgcaagcgtcttctgaaactggcgtagcagaaggctacgttcttaaacccgtctatccgatcttctttaataccggtacgcgcgtggcgattaaatgcaagaactccaaattttcggagaaagccaagctggactcgccaattaaggcgaaggtggaactgacggagaacgataaacgtctgctcgaaatctttagcgagtatgttacctggaatcgcgtcagtaacgtactgtcacatattggctcagtgaccgcaaaagattttgggcgtgttatgggtctgacgatgaaagacatcattaatgaagcagcacgcgaaggccatgatctgttgttcgctgataacccgtcggcggtgaagaaagagctgaccattctcatccagaacacgattggctccaaatggcacgaagttctggag

SEQ ID NO: 728 - protein, 346 aa, synthetic construct
  REGION 1..346: note = variant of RNA ligase 2 from Klebsiella phage KP179
MHHHHHHGGSNTFAYYSSLENHYNNKFIEKIRGAGFLMHTVEWVAREKIHGTNFSVIITPTEIVPAKRTGPILEGESFFGHEIIMKKYKDSFVKVQNMLNAMDLVSVQIFGEFAGGGIQKGVDYGDKDFYVFDILSDSGNEKVYWDDYRVESFCTTLGLKLAPLLGRGSFAELSQYPNDFKSIVNRYNELVDTTGLWMANKHVFGPQASSETGVAEGYVLKPVYPIFFNTGTRVAIKCKNSKFSEKAKLDSPIKAKVELTENDKRLLEIFSEYVTWNRVSNVLSHIGSVTAKDFGRVMGLTMKDIINEAAREGHDLLFADNPSAVKKELTILIQNTIGSKWHEVLE

SEQ ID NO: 729 - DNA, 1038 bp, synthetic construct
  misc_feature 1..1038: note = variant of RNA ligase 2 from Klebsiella phage KP179
  source 1..1038: mol_type = other DNA
atgcatcaccatcaccatcacggtggcagcaacacgtttgcgtattattcaagtctggaaaaccattacaataataagttcattgagaagatccgtggtgcaggcttcctgatgcacaccgtggaatgggtagctcgcgagaagattcatggaacgaactttagcgttatcattactccgaccgaaatcgtcccagccaaacgcacagggccgatcttggaaggcgagtcgttctttggtcacgaaattatcatgaaaaaatataaagactccttcgtgaaggtgcagaacatgctgaatgccatggatcttgttagcgtgcaaatctttggcgaatttgcgggtggtggcattcagaaaggcgtcgattacggagacaaagatttctatgtgtttgacatcctgtctgatagcgggaacgagaaagtttactgggatgactatcgcgtcgaatcgttttgcaccacgctcggtctgaaattagcgcctctgctgggacgtggtagtttcgctgaactgtcccagtacccaaacgatttcaaaagcattgtgaaccgttataatgaattggttgatacgacgggcctgtggatggccaataaacacgtctttggtccgcaagcgtcttctgaaactggcgtagcagaaggctacgttcttaaacccgtctatccgatcttctttaataccggtacgcgcgtggcgattaaatgcaagaactccaaattttcggagaaagccaagctggactcgccaattaaggcgaaggtggaactgacggagaacgataaacgtctgctcgaaatctttagcgagtatgttacctggaatcgcgtcagtaacgtactgtcacatattggctcagtgaccgcaaaagattttgggcgtgttatgggtctgacgatgaaagacatcattaatgaagcagcacgcgaaggccatgatctgttgttcgctgataacccgtcggcggtgaagaaagagctgaccattctcatccagaacacgattctgtccaaatggcacgaagttctggag

SEQ ID NO: 730 - protein, 346 aa, synthetic construct
  REGION 1..346: note = variant of RNA ligase 2 from Klebsiella phage KP179
MHHHHHHGGSNTFAYYSSLENHYNNKFIEKIRGAGFLMHTVEWVAREKIHGTNFSVIITPTEIVPAKRTGPILEGESFFGHEIIMKKYKDSFVKVQNMLNAMDLVSVQIFGEFAGGGIQKGVDYGDKDFYVFDILSDSGNEKVYWDDYRVESFCTTLGLKLAPLLGRGSFAELSQYPNDFKSIVNRYNELVDTTGLWMANKHVFGPQASSETGVAEGYVLKPVYPIFFNTGTRVAIKCKNSKFSEKAKLDSPIKAKVELTENDKRLLEIFSEYVTWNRVSNVLSHIGSVTAKDFGRVMGLTMKDIINEAAREGHDLLFADNPSAVKKELTILIQNTILSKWHEVLE

SEQ ID NO: 731 - DNA, 1038 bp, synthetic construct
  misc_feature 1..1038: note = variant of RNA ligase 2 from Klebsiella phage KP179
  source 1..1038: mol_type = other DNA
atgcatcaccatcaccatcacggtggcagcaacacgtttgcgtattattcaagtctggaaaaccattacaataataagttcattgagaagatccgtggtgcaggcttcctgatgcacaccgtggaatgggtagctcgcgagaagattcatggaacgaactttagcgttatcattactccgaccgaaatctggccagccaaacgcacagggccgatcttggaaggcgagtcgttctttggtcacgaaattatcatgaaaaaatataaagactccttcgtgaaggtgcagaacatgctgaactggatggatcttgttagcgtgcaaatctttggcgaatttgcgggtggtggcattcagaaaggcgtcgattacggagacaaagatttctatgtgtttgacatcctgtctgatagcgggaacgagaaagtttactgggatgactatcgcgtcgaatcgttttgcaccacgctcggtctgaaattagcgcctctgctgggacgtggtagtttcgctgaactgtcccagtacccaaacgatttcaaaagcattgtgaaccgttataatgaattggttgatacgacgggcctggagcacgccaataaacacgtctttggtccgcaagcgtcttctgaaactggcgtagcagaaggctacgttcttaaacccgtctatccgatcttctttaataccggtacgcgcgtggcgattaaatgcaagaactccaaattttcggagaaagccaagctggactcgccaattaaggcgaaggtggaactgacggagaacgataaacgtctgctcgaaatctttagcgagtatgttacctggaatcgcgtcagtaacgtactgtcacatattggctcagtgaccgcaaaagattttgggcgtgttatgggtctgacgatgaaagacatcattaatgaagcagcacgcgaaggccatgatctgttgttcgctgataacccgtcggcggtgaagaaagagctgaccattctcatccagaacacgattctgtccaaatggcacgaagttctggag

SEQ ID NO: 732 - protein, 346 aa, synthetic construct
  REGION 1..346: note = variant of RNA ligase 2 from Klebsiella phage KP179
MHHHHHHGGSNTFAYYSSLENHYNNKFIEKIRGAGFLMHTVEWVAREKIHGTNFSVIITPTEIWPAKRTGPILEGESFFGHEIIMKKYKDSFVKVQNMLNWMDLVSVQIFGEFAGGGIQKGVDYGDKDFYVFDILSDSGNEKVYWDDYRVESFCTTLGLKLAPLLGRGSFAELSQYPNDFKSIVNRYNELVDTTGLEHANKHVFGPQASSETGVAEGYVLKPVYPIFFNTGTRVAIKCKNSKFSEKAKLDSPIKAKVELTENDKRLLEIFSEYVTWNRVSNVLSHIGSVTAKDFGRVMGLTMKDIINEAAREGHDLLFADNPSAVKKELTILIQNTILSKWHEVLE

SEQ ID NO: 733 - DNA, 1038 bp, synthetic construct
  misc_feature 1..1038: note = variant of RNA ligase 2 from Klebsiella phage KP179
  source 1..1038: mol_type = other DNA
atgcatcaccatcaccatcacggtggcagcaacacgtttgcgtattattcaagtctggaaaaccattacaataataagttcattgagaagatccgtggtgcaggcttcctgatgcacaccgtggaatgggtagctcgcgagaagattcatggaacgaactttagcgttatcattactccgaccgaaatctggccagccaaacgcacagggccgatcttggaaggcgagtcgttctttggtcacgaaattatcatgaaaaaatataaagactccttcgtgaaggtgcagaacatgctgaatgccatggatcttgttagcgtgcaaatctttggcgaatttgcgggtggtggcattcagaaaggcgtcgattacggagacaaagatttctatgtgtttgacatcctgtctgatagcgggaacgagaaagtttactgggatgactatcgcgtcgaatcgttttgcaccacgctcggtctgaaattagcgcctctgctgggacgtggtagtttcgctgaactgtcccagtacccaaacgatttcaaaagcattgtgaaccgttataatgaattggttgatacgacgggcctgtggatggccaataaacacgtctttggtccgcaagcgtcttctgaaactggcgtagcagaaggctacgttcttaaacccgtctatccgatcttctttaataccggtacgcgcgtggcgattaaatgcaagaactccaaattttcggagaaagccaagctggactcgccaattaaggcgaaggtggaactgacggagaacgataaacgtctgctcgaaatctttagcgagtatgttacctggaatcgcgtcagtaacgtactgtcacatattggctcagtgaccgcaaaagattttgggcgtgttatgggtctgacgatgaaagacatcattaatgaagcagcacgcgaaggccatgatctgttgttcgctgataacccgtcggcggtgaagaaagagctgaccattctcatccagaacacgattcgctccaaatggcacgaagttctggag

SEQ ID NO: 734 - protein, 346 aa, synthetic construct
  REGION 1..346: note = variant of RNA ligase 2 from Klebsiella phage KP179
MHHHHHHGGSNTFAYYSSLENHYNNKFIEKIRGAGFLMHTVEWVAREKIHGTNFSVIITPTEIWPAKRTGPILEGESFFGHEIIMKKYKDSFVKVQNMLNAMDLVSVQIFGEFAGGGIQKGVDYGDKDFYVFDILSDSGNEKVYWDDYRVESFCTTLGLKLAPLLGRGSFAELSQYPNDFKSIVNRYNELVDTTGLWMANKHVFGPQASSETGVAEGYVLKPVYPIFFNTGTRVAIKCKNSKFSEKAKLDSPIKAKVELTENDKRLLEIFSEYVTWNRVSNVLSHIGSVTAKDFGRVMGLTMKDIINEAAREGHDLLFADNPSAVKKELTILIQNTIRSKWHEVLE

SEQ ID NO: 735 - DNA, 1038 bp, synthetic construct
  misc_feature 1..1038: note = variant of RNA ligase 2 from Klebsiella phage KP179
  source 1..1038: mol_type = other DNA
atgcatcaccatcaccatcacggtggcagcaacacgtttgcgtattattcaagtctggaaaaccattacaataataagttcattgagaagatccgtggtgcaggcttcctgatgcacaccgtggaatgggtagctcgcgagaagattcatggaacgaactttagcgttatcattactccgaccgaaatcgtcccagccaaacgcacagggccgatcttggaaggcgagtcgttctttggtcacgaaattatcatgaaaaaatataaagactccttcgtgaaggtgcagaacatgctgaacgttatggatcttgttagcgtgcaaatctttggcgaatttgcgggtggtggcattcagaaaggcgtcgattacggagacaaagatttctatgtgtttgacatcctgtctgatagcgggaacgagaaagtttactgggatgactatcgcgtcgaatcgttttgcaccacgctcggtctgaaattagcgcctctgctgggacgtggtagtttcgctgaactgtcccagtacccaaacgatttcaaaagcattgtgaaccgttataatgaattggttgatacgacgggcctgtggcatgccaataaacacgtctttggtccgcaagcgtcttctgaaactggcgtagcagaaggctacgttcttaaacccgtctatccgatcttctttaataccggtacgcgcgtggcgattaaatgcaagaactccaaattttcggagaaagccaagctggactcgccaattaaggcgaaggtggaactgacggagaacgataaacgtctgctcgaaatctttagcgagtatgttacctggaatcgcgtcagtaacgtactgtcacatattggctcagtgaccgcaaaagattttgggcgtgttatgggtctgacgatgaaagacatcattaatgaagcagcacgcgaaggccatgatctgttgttcgctgataacccgtcggcggtgaagaaagagctgaccattctcatccagaacacgattcgttccaaatggcacgaagttctggag

SEQ ID NO: 736 - protein, 346 aa, synthetic construct
  REGION 1..346: note = variant of RNA ligase 2 from Klebsiella phage KP179
MHHHHHHGGSNTFAYYSSLENHYNNKFIEKIRGAGFLMHTVEWVAREKIHGTNFSVIITPTEIVPAKRTGPILEGESFFGHEIIMKKYKDSFVKVQNMLNVMDLVSVQIFGEFAGGGIQKGVDYGDKDFYVFDILSDSGNEKVYWDDYRVESFCTTLGLKLAPLLGRGSFAELSQYPNDFKSIVNRYNELVDTTGLWHANKHVFGPQASSETGVAEGYVLKPVYPIFFNTGTRVAIKCKNSKFSEKAKLDSPIKAKVELTENDKRLLEIFSEYVTWNRVSNVLSHIGSVTAKDFGRVMGLTMKDIINEAAREGHDLLFADNPSAVKKELTILIQNTIRSKWHEVLE

SEQ ID NO: 737 - DNA, 1038 bp, synthetic construct
  misc_feature 1..1038: note = variant of RNA ligase 2 from Klebsiella phage KP179
  source 1..1038: mol_type = other DNA
atgcatcaccatcaccatcacggtggcagcaacacgtttgcgtattattcaagtctggaaaaccattacaataataagttcattgagaagatccgtggtgcaggcttcctgatgcacaccgtggaatgggtagctcgcgagaagattcatggaacgaactttagcgttatcattactccgaccgaaatcgtgccagccaaacgcacagggccgatcttggaaggcgagtcgttctttggtcacgaaattatcatgaaaaaatataaagactccttcgtgaaggtgcagaacatgctggtggttatggatcttgttagcgtgcaaatctttggcgaatttgcgggtggtggcattcagaaaggcgtcgattacggagacaaagatttctatgtgtttgacatcctgtctgatagcgggaacgagaaagtttactgggatgactatcgcgtcgaatcgttttgcaccacgctcggtctgaaattagcgcctctgctgggacgtggtagtttcgctgaactgtcccagtacccaaacgatttcaaaagcattgtgaaccgttataatgaattggttgatacgacgggcctggagcacgccaataaacacgtctttggtccgcaagcgtcttctgaaactggcgtagcagaaggctacgttcttaaacccgtctatccgatcttctttaataccggtacgcgcgtggcgattaaatgcaagaactccaaattttcggagaaagccaagctggactcgccaattaaggcgaaggtggaactgacggagaacgataaacgtctgctcgaaatctttagcgagtatgttacctggaatcgcgtcagtaacgtactgtcacatattggctcagtgaccgcaaaagattttgggcgtgttatgggtctgacgatgaaagacatcattaatgaagcagcacgcgaaggccatgatctgttgttcgctgataacccgtcggcggtgaagaaagagctgaccattctcatccagaacacgattcgttccaaatggcacgaagttctggag

SEQ ID NO: 738 - protein, 346 aa, synthetic construct
  REGION 1..346: note = variant of RNA ligase 2 from Klebsiella phage KP179
MHHHHHHGGSNTFAYYSSLENHYNNKFIEKIRGAGFLMHTVEWVAREKIHGTNFSVIITPTEIVPAKRTGPILEGESFFGHEIIMKKYKDSFVKVQNMLVVMDLVSVQIFGEFAGGGIQKGVDYGDKDFYVFDILSDSGNEKVYWDDYRVESFCTTLGLKLAPLLGRGSFAELSQYPNDFKSIVNRYNELVDTTGLEHANKHVFGPQASSETGVAEGYVLKPVYPIFFNTGTRVAIKCKNSKFSEKAKLDSPIKAKVELTENDKRLLEIFSEYVTWNRVSNVLSHIGSVTAKDFGRVMGLTMKDIINEAAREGHDLLFADNPSAVKKELTILIQNTIRSKWHEVLE

SEQ ID NO: 739 - DNA, 1038 bp, synthetic construct
  misc_feature 1..1038: note = variant of RNA ligase 2 from Klebsiella phage KP179
  source 1..1038: mol_type = other DNA
atgcatcaccatcaccatcacggtggcagcaacacgtttgcgtattattcaagtctggaaaaccattacaataataagttcattgagaagatccgtggtgcaggcttcctgatgcacaccgtggaatgggtagctcgcgagaagattcatggaacgaactttagcgttatcattactccgaccgaaatcgtcccagccaaacgcacagggccgatcttggaaggcgagtcgttctttggtcacgaaattatcatgaaaaaatataaagactccttcgtgaaggtgcagaacatgctgaacgctatggatcttgttagcgtgcaaatctttggcgaatttgcgggtggtggcattcagaaaggcgtcgattacggagacaaagatttctatgtgtttgacatcctgtctgatagcgggaacgggaaagtttactgggatgactatcgcgtcgaatcgttttgcaccacgctcggtctgaaattagcgcctctgctgggacgtggtagtttcgctgaactgtcccagtacccaaacgatttcaaaagcattgtgaaccgttataatgaattggttgatacgacgggcctggaacatgccaataaacacgtctttggtccgcaagcgtcttctgaaactggcgtagcagaaggctacgttcttaaacccgtctatccgatcttctttaataccggtacgcgcgtggcgattaaatgcaagaactccaaattttcggagaaagccaagctggactcgccaattaaggcgaaggtggaactgacggagaacgataaacgtctgctcgaaatctttagcgagtatgttacctggaatcgcgtcagtaacgtactgtcacatattggctcagtgaccgcaaaagattttgggcgtgttatgggtctgacgatgaaagacatcattaatgaagcagcacgcgaaggccatgatctgttgttcgctgataacccgtcggcggtgctgaaggagctgaccattctcatccagaacacgattcgttccaaatggcacgaagttctggag

SEQ ID NO: 740 - protein, 346 aa, synthetic construct
  REGION 1..346: note = variant of RNA ligase 2 from Klebsiella phage KP179
MHHHHHHGGSNTFAYYSSLENHYNNKFIEKIRGAGFLMHTVEWVAREKIHGTNFSVIITPTEIVPAKRTGPILEGESFFGHEIIMKKYKDSFVKVQNMLNAMDLVSVQIFGEFAGGGIQKGVDYGDKDFYVFDILSDSGNGKVYWDDYRVESFCTTLGLKLAPLLGRGSFAELSQYPNDFKSIVNRYNELVDTTGLEHANKHVFGPQASSETGVAEGYVLKPVYPIFFNTGTRVAIKCKNSKFSEKAKLDSPIKAKVELTENDKRLLEIFSEYVTWNRVSNVLSHIGSVTAKDFGRVMGLTMKDIINEAAREGHDLLFADNPSAVLKELTILIQNTIRSKWHEVLE

SEQ ID NO: 741 - DNA, 1038 bp, synthetic construct
  misc_feature 1..1038: note = variant of RNA ligase 2 from Klebsiella phage KP179
  source 1..1038: mol_type = other DNA
atgcatcaccatcaccatcacggtggcagcaacacgtttgcgtattattcaagtctggaaaaccattacaataataagttcattgagaagatccgtggtgcaggcttcctgatgcacaccgtggaatgggtagctcgcgagaagattcatggaacgaactttagcgttatcattactccgaccgaaatcgtcccagccaaacgcacagggccgatcttggaaggcgagtcgttctttggtcacgaaattatcatgaaaaaatataaagactccttcgtgaaggtgcagaacatgctggtggctatggatcttgttagcgtgcaattctttggcgaatttgcgggtggtggcattcagaaaggcgtcgattacggagacaaagatttctatgtgtttgacatcctgtctgatagcgggaacgagaaagtttactgggatgactatcgcgtcgaatcgttttgcaccacgctcggtctgaaattagcgcctctgctgggacgtggtagtttcgctgaactgtcccagtacccaaacgatttcaaaagcattgtgaaccgttataatgaattggttgatacgacgggcctgtggcacgccaataaacacgtctttggtccgcaagcgtcttctgaaactggcgtagcagaaggctacgttcttaaacccgtctatccgatcttctttaataccggtacgcgcgtggcgattaaatgcaagaactccaaattttcggagaaagccaagctggactcgccaattaaggcgaaggtggaactgacggagaacgataaacgtctgctcgaaatctttagcgagtatgttacctggaatcgcgtcagtaacgtactgtcacatattggctcagtgaccgcaaaagattttgggcgtgttatgggtctgacgatgaaagacatcattaatgaagcagcacgcgaaggccatgatctgttgttcgctgataacccgtcggcggtgaagaaagagctgaccattctcatccagaacacgattctgtccaaatggcacgaagttctggag

SEQ ID NO: 742 - protein, 346 aa, synthetic construct
  REGION 1..346: note = variant of RNA ligase 2 from Klebsiella phage KP179
MHHHHHHGGSNTFAYYSSLENHYNNKFIEKIRGAGFLMHTVEWVAREKIHGTNFSVIITPTEIVPAKRTGPILEGESFFGHEIIMKKYKDSFVKVQNMLVAMDLVSVQFFGEFAGGGIQKGVDYGDKDFYVFDILSDSGNEKVYWDDYRVESFCTTLGLKLAPLLGRGSFAELSQYPNDFKSIVNRYNELVDTTGLWHANKHVFGPQASSETGVAEGYVLKPVYPIFFNTGTRVAIKCKNSKFSEKAKLDSPIKAKVELTENDKRLLEIFSEYVTWNRVSNVLSHIGSVTAKDFGRVMGLTMKDIINEAAREGHDLLFADNPSAVKKELTILIQNTILSKWHEVLE

SEQ ID NO: 743 - DNA, 1038 bp, synthetic construct
  misc_feature 1..1038: note = variant of RNA ligase 2 from Klebsiella phage KP179
  source 1..1038: mol_type = other DNA
atgcatcaccatcaccatcacggtggcagcaacacgtttgcgtattattcaagtctggaaaaccattacaataataagttcattgagaagatccgtggtgcaggcttcctgatgcacaccgtggaatgggtagctcgcgagaagattcatggaacgaactttagcgttatcattactccgaccgaaatcgtgccagccaaacgcacagggccgatcttggaaggcgagtcgttctttggtcacgaaattatcatgaaaaaatataaagactccttcgtgaaggtgcagaacatgctgaactggatggatcttgttagcgtgcaaatctttggcgaatttgcgggtggtggcattcagaaaggcgtcgattacggagacaaagatttctatgtgtttgacatcctgtctgatagcgggaacgagaaagtttactgggatgactatcgcgtcgaatcgttttgcaccacgctcggtctgaaattagcgcctctgctgggacgtggtagtttcgctgaactgtcccagtacccaaacgatttcaaaagcattgtgaaccgttataatgaattggttgatacgacgggcctgtggcacgccaataaacacgtctttggtccgcaagcgtcttctgaaactggcgtagcagaaggctacgttcttaaacccgtctatccgatcttctttaataccggtacgcgcgtggcgattaaatgcaagaactccaaattttcggagaaagccaagctggactcgccaattaaggcgaaggtggaactgacggagaacgataaacgtctgctcgaaatctttagcgagtatgttacctggaatcgcgtcagtaacgtactgtcacatattggctcagtgaccgcaaaagattttgggcgtgttatgggtctgacgatgaaagacatcattaatgaagcagcacgcgaaggccatgatctgttgttcgctgataacccgtcggcggtgaagaaagagctgaccattctcatccagaacacgattctgtccaaatggcacgaagttctggag

SEQ ID NO: 744 - protein, 346 aa, synthetic construct
  REGION 1..346: note = variant of RNA ligase 2 from Klebsiella phage KP179
MHHHHHHGGSNTFAYYSSLENHYNNKFIEKIRGAGFLMHTVEWVAREKIHGTNFSVIITPTEIVPAKRTGPILEGESFFGHEIIMKKYKDSFVKVQNMLNWMDLVSVQIFGEFAGGGIQKGVDYGDKDFYVFDILSDSGNEKVYWDDYRVESFCTTLGLKLAPLLGRGSFAELSQYPNDFKSIVNRYNELVDTTGLWHANKHVFGPQASSETGVAEGYVLKPVYPIFFNTGTRVAIKCKNSKFSEKAKLDSPIKAKVELTENDKRLLEIFSEYVTWNRVSNVLSHIGSVTAKDFGRVMGLTMKDIINEAAREGHDLLFADNPSAVKKELTILIQNTILSKWHEVLE

SEQ ID NO: 745 - DNA, 1038 bp, synthetic construct
  misc_feature 1..1038: note = variant of RNA ligase 2 from Klebsiella phage KP179
  source 1..1038: mol_type = other DNA
atgcatcaccatcaccatcacggtggcagcaacacgtttgcgtattattcaagtctggaaaaccattacaataataagttcattgagaagatccgtggtgcaggcttcctgatgcacaccgtggaatgggtagctcgcgagaagattcatggaacgaactttagcgttatcattactccgaccgaaatctggccagccaaacgcacagggccgatcttggaaggcgagtcgttctttggtcacgaaattatcatgaaaaaatataaagactccttcgtgaaggtgcagaacatgctggtgtggatggatcttgttagcgtgcaaatctttggcgaatttgcgggtggtggcattcagaaaggcgtcgattacggagacaaagatttctatgtgtttgacatcctgtctgatagcgggaacgagaaagtttactgggatgactatcgcgtcgaatcgttttgcaccacgctcggtctgaaattagcgcctctgctgggacgtggtagtttcgctgaactgtcccagtacccaaacgatttcaaaagcattgtgaaccgttataatgaattggttgatacgacgggcctggagcacgccaataaacacgtctttggtccgcaagcgtcttctgaaactggcgtagcagaaggctacgttcttaaacccgtctatccgatcttctttaataccggtacgcgcgtggcgattaaatgcaagaactccaaattttcggagaaagccaagctggactcgccaattaaggcgaaggtggaactgacggagaacgataaacgtctgctcgaaatctttagcgagtatgttacctggaatcgcgtcagtaacgtactgtcacatattggctcagtgaccgcaaaagattttgggcgtgttatgggtctgacgatgaaagacatcattaatgaagcagcacgcgaaggccatgatctgttgttcgctgataacccgtcggcggtgaagaaagagctgaccattctcatccagaacacgattcgttccaaatggcacgaagttctggag

SEQ ID NO: 746 - protein, 346 aa, synthetic construct
  REGION 1..346: note = variant of RNA ligase 2 from Klebsiella phage KP179
MHHHHHHGGSNTFAYYSSLENHYNNKFIEKIRGAGFLMHTVEWVAREKIHGTNFSVIITPTEIWPAKRTGPILEGESFFGHEIIMKKYKDSFVKVQNMLVWMDLVSVQIFGEFAGGGIQKGVDYGDKDFYVFDILSDSGNEKVYWDDYRVESFCTTLGLKLAPLLGRGSFAELSQYPNDFKSIVNRYNELVDTTGLEHANKHVFGPQASSETGVAEGYVLKPVYPIFFNTGTRVAIKCKNSKFSEKAKLDSPIKAKVELTENDKRLLEIFSEYVTWNRVSNVLSHIGSVTAKDFGRVMGLTMKDIINEAAREGHDLLFADNPSAVKKELTILIQNTIRSKWHEVLE

SEQ ID NO: 747 - DNA, 1038 bp, synthetic construct
  misc_feature 1..1038: note = variant of RNA ligase 2 from Klebsiella phage KP179
  source 1..1038: mol_type = other DNA
atgcatcaccatcaccatcacggtggcagcaacacgtttgcgtattattcaagtctggaaaaccattacaataataagttcattgagaagatccgtggtgcaggcttcctgatgcacaccgtggaatgggtagctcgcgagaagattcatggaacgaactttagcgttatcattactccgaccgaaatcgtcccagccaaacgcacagggccgatcttggaaggcgagtcgttctttggtcacgaaattatcatgaaaaaatataaagactccttcgtgaaggtgcagaacatgctgaatgccatggatcttgttagcgtgcaaatctttggcgaatttgcgggtggtggcattcagaaaggcgtcgattacggagacaaagatttctatgtgtttgacatcctgtctgatagcgggaacgagaaagtttactgggatgactatcgcgtcgaatcgttttgcaccacgctcggtctgaaattagcgcctctgctgggacgtggtagtttcgctgaactgtcccagtacccaaacgatttcaaaagcattgtgaaccgttataatgaattggttgatacgacgggcctgtggatggccaataaacacgtctttggtccgcaagcgtcttctgaaactggcgtagcagaaggctacgttcttaaacccgtctatccgatcttctttaataccggtacgcgcgtggcgattaaatgcaagaactccaaattttcggagaaagccaagctggactcgccaattaaggcgaaggtggaactgacggagaacgataaacgtctgctcgaaatctttagcgagtatgttacctggaatcgcgtcagtaacgtactgtcacatattggctcagtgaccgcaaaagattttgggcgtgttatgggtctgacgatgaaagacatcattaatgaagcagcacgcgaaggccatgatctgttgttcgctgataacccgtcggcggtgaagaaagagctgaccattctcatccagaacacgattcgttccaaatggcacgaagttctggag

SEQ ID NO: 748 - protein, 346 aa, synthetic construct
  REGION 1..346: note = variant of RNA ligase 2 from Klebsiella phage KP179
MHHHHHHGGSNTFAYYSSLENHYNNKFIEKIRGAGFLMHTVEWVAREKIHGTNFSVIITPTEIVPAKRTGPILEGESFFGHEIIMKKYKDSFVKVQNMLNAMDLVSVQIFGEFAGGGIQKGVDYGDKDFYVFDILSDSGNEKVYWDDYRVESFCTTLGLKLAPLLGRGSFAELSQYPNDFKSIVNRYNELVDTTGLWMANKHVFGPQASSETGVAEGYVLKPVYPIFFNTGTRVAIKCKNSKFSEKAKLDSPIKAKVELTENDKRLLEIFSEYVTWNRVSNVLSHIGSVTAKDFGRVMGLTMKDIINEAAREGHDLLFADNPSAVKKELTILIQNTIRSKWHEVLE

SEQ ID NO: 749 - DNA, 1038 bp, synthetic construct
  misc_feature 1..1038: note = variant of RNA ligase 2 from Klebsiella phage KP179
  source 1..1038: mol_type = other DNA
atgcatcaccatcaccatcacggtggcagcaacacgtttgcgtattattcaagtctggaaaaccattacaataataagttcattgagaagatccgtggtgcaggcttcctgatgcacaccgtggaatgggtagctcgcgagaagattcatggaacgaactttagcgttatcattactccgaccgaaatcgtcccagccaaacgcacagggccgatcttggaaggcgagtcgttctttggtcacgaaattatcatgaaaaaatataaagactccttcgtgaaggtgcagaacatgctggtgtggatggatcttgttagcgtgcaaatctttggcgaatttgcgggtggtggcattcagaaaggcgtcgattacggagacaaagatttctatgtgtttgacatcctgtctgatagcgggaacgagaaagtttactgggatgactatcgcgtcgaatcgttttgcaccacgctcggtctgaaattagcgcctctgctgggacgtggtagtttcgctgaactgtcccagtacccaaacgatttcaaaagcattgtgaaccgttataatgaattggttgatacgacgggcctggaacatgccaataaacacgtctttggtccgcaagcgtcttctgaaactggcgtagcagaaggctacgttcttaaacccgtctatccgatcttctttaataccggtacgcgcgtggcgattaaatgcaagaactccaaattttcggagaaagccaagctggactcgccaattaaggcgaaggtggaactgacggagaacgataaacgtctgctcgaaatctttagcgagtatgttacctggaatcgcgtcagtaacgtactgtcacatattggctcagtgaccgcaaaagattttgggcgtgttatgggtctgacgatgaaagacatcattaatgaagcagcacgcgaaggccatgatctgttgttcgctgataacccgtcggcggtgaagaaagagctgaccattctcatccagaacacgattctgtccaaatggcacgaagttctggag

SEQ ID NO: 750 - protein, 346 aa, synthetic construct
  REGION 1..346: note = variant of RNA ligase 2 from Klebsiella phage KP179
MHHHHHHGGSNTFAYYSSLENHYNNKFIEKIRGAGFLMHTVEWVAREKIHGTNFSVIITPTEIVPAKRTGPILEGESFFGHEIIMKKYKDSFVKVQNMLVWMDLVSVQIFGEFAGGGIQKGVDYGDKDFYVFDILSDSGNEKVYWDDYRVESFCTTLGLKLAPLLGRGSFAELSQYPNDFKSIVNRYNELVDTTGLEHANKHVFGPQASSETGVAEGYVLKPVYPIFFNTGTRVAIKCKNSKFSEKAKLDSPIKAKVELTENDKRLLEIFSEYVTWNRVSNVLSHIGSVTAKDFGRVMGLTMKDIINEAAREGHDLLFADNPSAVKKELTILIQNTILSKWHEVLE

SEQ ID NO: 751 - DNA, 1038 bp, synthetic construct
  misc_feature 1..1038: note = variant of RNA ligase 2 from Klebsiella phage KP179
  source 1..1038: mol_type = other DNA
atgcatcaccatcaccatcacggtggcagcaacacgtttgcgtattattcaagtctggaaaaccattacaataataagttcattgagaagatccgtggtgcaggcttcctgatgcacaccgtggaatgggtagctcgcgagaagattcatggaacgaactttagcgttatcattactccgaccgaaatcgtcccagccaaacgcacagggccgatcttggaaggcgagtcgttctttggtcacgaaattatcatgaaaaaatataaagactccttcgtgaaggtgcagaacatgctgaacgctatggatcttgttagcgtgcaaatctttggcgaatttgcgggtggtggcattcagaaaggcgtcgattacggagacaaagatttctatgtgtttgacatcctgtctgatagcgggaacgggaaagtttactgggatgactatcgcgtcgaatcgttttgcaccacgctcggtctgaaattagcgcctctgctgggacgtggtagtttcgctgaactgtcccagtacccaaacgatttcaaaagcattgtgaaccgttataatgaattggttgatacgacgggcctggagcatgccaataaacacgtctttggtccgcaagcgtcttctgaaactggcgtagcagaaggctacgttcttaaacccgtctatccgatcttctttaataccggtacgcgcgtggcgattaaatgcaagaactccaaattttcggagaaagccaagctggactcgccaattaaggcgaaggtggaactgacggagaacgataaacgtctgctcgaaatctttagcgagtatgttacctggaatcgcgtcagtaacgtactgtcacatattggctcagtgaccgcaaaagattttgggcgtgttatgggtctgacgatgaaagacatcattaatgaagcagcacgcgaaggccatgatctgttgttcgctgataacccgtcggcggtgtgtagcgagctgaccattctcatccagaacacgattcgttccaaatggcacgaagttctggag

SEQ ID NO: 752 - protein, 346 aa, synthetic construct
  REGION 1..346: note = variant of RNA ligase 2 from Klebsiella phage KP179
MHHHHHHGGSNTFAYYSSLENHYNNKFIEKIRGAGFLMHTVEWVAREKIHGTNFSVIITPTEIVPAKRTGPILEGESFFGHEIIMKKYKDSFVKVQNMLNAMDLVSVQIFGEFAGGGIQKGVDYGDKDFYVFDILSDSGNGKVYWDDYRVESFCTTLGLKLAPLLGRGSFAELSQYPNDFKSIVNRYNELVDTTGLEHANKHVFGPQASSETGVAEGYVLKPVYPIFFNTGTRVAIKCKNSKFSEKAKLDSPIKAKVELTENDKRLLEIFSEYVTWNRVSNVLSHIGSVTAKDFGRVMGLTMKDIINEAAREGHDLLFADNPSAVCSELTILIQNTIRSKWHEVLE

SEQ ID NO: 753 - DNA, 1038 bp, synthetic construct
  misc_feature 1..1038: note = variant of RNA ligase 2 from Klebsiella phage KP179
  source 1..1038: mol_type = other DNA
atgcatcaccatcaccatcacggtggcagcaacacgtttgcgtattattcaagtctggaaaaccattacaataataagttcattgagaagatccgtggtgcaggcttcctgatgcacaccgtggaatgggtagctcgcgagaagattcatggaacgaactttagcgttatcattactccgaccgaaatcgtgccagccaaacgcacagggccgatcttggaaggcgagtcgttctttggtcacgaaattatcatgaaaaaatataaagactccttcgtgaaggtgcagaacatgctggtggctatggatcttgttagcgtgcaaatctttggcgaatttgcgggtggtggcattcagaaaggcgtcgattacggagacaaagatttctatgtgtttgacatcctgtctgatagcgggaacgagaaagtttactgggatgactatcgcgtcgaatcgttttgcaccacgctcggtctgaaattagcgcctctgctgggacgtggtagtttcgctgaactgtcccagtacccaaacgatttcaaaagcattgtgaaccgttataatgaattggttgatacgacgggcctgtggcacgccaataaacacgtctttggtccgcaagcgtcttctgaaactggcgtagcagaaggctacgttcttaaacccgtctatccgatcttctttaataccggtacgcgcgtggcgattaaatgcaagaactccaaattttcggagaaagccaagctggactcgccaattaaggcgaaggtggaactgacggagaacgataaacgtctgctcgaaatctttagcgagtatgttacctggaatcgcgtcagtaacgtactgtcacatattggctcagtgaccgcaaaagattttgggcgtgttatgggtctgacgatgaaagacatcattaatgaagcagcacgcgaaggccatgatctgttgttcgctgataacccgtcggcggtgaagaaagagctgaccattctcatccagaacacgattcgttccaaatggcacgaagttctggag

SEQ ID NO: 754 - protein, 346 aa, synthetic construct
  REGION 1..346: note = variant of RNA ligase 2 from Klebsiella phage KP179
MHHHHHHGGSNTFAYYSSLENHYNNKFIEKIRGAGFLMHTVEWVAREKIHGTNFSVIITPTEIVPAKRTGPILEGESFFGHEIIMKKYKDSFVKVQNMLVAMDLVSVQIFGEFAGGGIQKGVDYGDKDFYVFDILSDSGNEKVYWDDYRVESFCTTLGLKLAPLLGRGSFAELSQYPNDFKSIVNRYNELVDTTGLWHANKHVFGPQASSETGVAEGYVLKPVYPIFFNTGTRVAIKCKNSKFSEKAKLDSPIKAKVELTENDKRLLEIFSEYVTWNRVSNVLSHIGSVTAKDFGRVMGLTMKDIINEAAREGHDLLFADNPSAVKKELTILIQNTIRSKWHEVLE

SEQ ID NO: 755 - DNA, 1038 bp, synthetic construct
  misc_feature 1..1038: note = variant of RNA ligase 2 from Klebsiella phage KP179
  source 1..1038: mol_type = other DNA
atgcatcaccatcaccatcacggtggcagcaacacgtttgcgtattattcaagtctggaaaaccattacaataataagttcattgagaagatccgtggtgcaggcttcctgatgcacaccgtggaatgggtagctcgcgagaagattcatggaacgaactttagcgttatcattactccgaccgaaatcgtcccagccaaacgcacagggccgatcttggaaggcgagtcgttctttggtcacgaaattatcatgaaaaaatataaagactccttcgtgaaggtgcagaacatgctgaacgctatggatcttgttagcgtgcaaatctttggcgaatttgcgggtggtggcattcagaaaggcgtcgattacggagacaaagatttctatgtgtttgacatcctgtctgatagcgggaacgagaaagtttactgggatgactatcgcgtcgaatcgttttgcaccacgctcggtctgaaattagcgcctctgctgggacgtggtagtttcgctgaactgtcccagtacccaaacgatttcaaaagcattgtgaaccgttataatgaattggttgatacgacgggcctgtggcatgccaataaacacgtctttggtccgcaagcgtcttctgaaactggcgtagcagaaggctacgttcttaaacccgtctatccgatcttctttaataccggtacgcgcgtggcgattaaatgcaagaactccaaattttcggagaaagccaagctggactcgccaattaaggcgaaggtggaactgacggagaacgataaacgtctgctcgaaatctttagcgagtatgttacctggaatcgcgtcagtaacgtactgtcacatattggctcagtgaccgcaaaagattttgggcgtgttatgggtctgacgatgaaagacatcatcaatgaagcagcacgcgaaggccatgatctgttgttcgctgataacccgtcggcggtgtgtggcgagctgaccattctcatccagaacacgattcgttccaaatggcacgaagttctggag

SEQ ID NO: 756 - protein, 346 aa, synthetic construct
  REGION 1..346: note = variant of RNA ligase 2 from Klebsiella phage KP179
MHHHHHHGGSNTFAYYSSLENHYNNKFIEKIRGAGFLMHTVEWVAREKIHGTNFSVIITPTEIVPAKRTGPILEGESFFGHEIIMKKYKDSFVKVQNMLNAMDLVSVQIFGEFAGGGIQKGVDYGDKDFYVFDILSDSGNEKVYWDDYRVESFCTTLGLKLAPLLGRGSFAELSQYPNDFKSIVNRYNELVDTTGLWHANKHVFGPQASSETGVAEGYVLKPVYPIFFNTGTRVAIKCKNSKFSEKAKLDSPIKAKVELTENDKRLLEIFSEYVTWNRVSNVLSHIGSVTAKDFGRVMGLTMKDIINEAAREGHDLLFADNPSAVCGELTILIQNTIRSKWHEVLE

SEQ ID NO: 757 - DNA, 1038 bp, synthetic construct
  misc_feature 1..1038: note = variant of RNA ligase 2 from Klebsiella phage KP179
  source 1..1038: mol_type = other DNA
atgcatcaccatcaccatcacggtggcagcaacacgtttgcgtattattcaagtctggaaaaccattacaataataagttcattgagaagatccgtggtgcaggcttcctgatgcacaccgtggaatgggtagctcgcgagaagattcatggaacgaactttagcgttatcattactccgaccgaaatctggccagccaaacgcacagggccgatcttggaaggcgagtcgttctttggtcacgaaattatcatgaaaaaatataaagactccttcgtgaaggtgcagaacatgctggtggctatggatcttgttagcgtgcaaatctttggcgaatttgcgggtggtggcattcagaaaggcgtcgattacggagacaaagatttctatgtgtttgacatcctgtctgatagcgggaacgagaaagtttactgggatgactatcgcgtcgaatcgttttgcaccacgctcggtctgaaattagcgcctctgctgggacgtggtagtttcgctgaactgtcccagtacccaaacgatttcaaaagcattgtgaaccgttataatgaattggttgatacgacgggcctggagcacgccaataaacacgtctttggtccgcaagcgtcttctgaaactggcgtagcagaaggctacgttcttaaacccgtctatccgatcttctttaataccggtacgcgcgtggcgattaaatgcaagaactccaaattttcggagaaagccaagctggactcgccaattaaggcgaaggtggaactgacggagaacgataaacgtctgctcgaaatctttagcgagtatgttacctggaatcgcgtcagtaacgtactgtcacatattggctcagtgaccgcaaaagattttgggcgtgttatgggtctgacgatgaaagacatcattaatgaagcagcacgcgaaggccatgatctgttgttcgctgataacccgtcggcggtgaagaaagagctgaccattctcatccagaacacgattcgttccaaatggcacgaagttctggag

SEQ ID NO: 758 - protein, 346 aa, synthetic construct
  REGION 1..346: note = variant of RNA ligase 2 from Klebsiella phage KP179
MHHHHHHGGSNTFAYYSSLENHYNNKFIEKIRGAGFLMHTVEWVAREKIHGTNFSVIITPTEIWPAKRTGPILEGESFFGHEIIMKKYKDSFVKVQNMLVAMDLVSVQIFGEFAGGGIQKGVDYGDKDFYVFDILSDSGNEKVYWDDYRVESFCTTLGLKLAPLLGRGSFAELSQYPNDFKSIVNRYNELVDTTGLEHANKHVFGPQASSETGVAEGYVLKPVYPIFFNTGTRVAIKCKNSKFSEKAKLDSPIKAKVELTENDKRLLEIFSEYVTWNRVSNVLSHIGSVTAKDFGRVMGLTMKDIINEAAREGHDLLFADNPSAVKKELTILIQNTIRSKWHEVLE

SEQ ID NO: 759 - DNA, 1038 bp, synthetic construct
  misc_feature 1..1038: note = variant of RNA ligase 2 from Klebsiella phage KP179
  source 1..1038: mol_type = other DNA
atgcatcaccatcaccatcacggtggcagcaacacgtttgcgtattattcaagtctggaaaaccattacaataataagttcattgagaagatccgtggtgcaggcttcctgatgcacaccgtggaatgggtagctcgcgagaagattcatggaacgaactttagcgttatcattactccgaccgaaatcgtcccagccaaacgcacagggccgatcttggaaggcgagtcgttctttggtcacgaaattatcatgaaaaaatataaagactccttcgtgaaggtgcagaacatgctgaacgttatggatcttgttagcgtgcaaatctttggcgaatttgcgggtggtggcattcagaaaggcgtcgattacggagacaaagatttctatgtgtttgacatcctgtctgatagcgggaacgagaaagtttactgggatgactatcgcgtcgaatcgttttgcaccacgctcggtctgaaattagcgcctctgctgggacgtggtagtttcgctgaactgtcccagtacccaaacgatttcaaaagcattgtgaaccgttataatgaattggttgatacgacgggcctggagcatgccaataaacacgtctttggtccgcaagcgtcttctgaaactggcgtagcagaaggctacgttcttaaacccgtctatccgatcttctttaataccggtacgcgcgtggcgattaaatgcaagaactccaaattttcggagaaagccaagctggactcgccaattaaggcgaaggtggaactgacggagaacgataaacgtctgctcgaaatctttagcgagtatgttacctggaatcgcgtcagtaacgtactgtcacatattggctcagtgaccgcaaaagattttgggcgtgttatgggtctgacgatgaaagacatcattaatgaagcagcacgcgaaggccatgatctgttgttcgctgataacccgtcggcggtgtgtaaggagctgaccattctcatccagaacacgattcgttccaaatggcacgaagttctggag

SEQ ID NO: 760 - protein, 346 aa, synthetic construct
  REGION 1..346: note = variant of RNA ligase 2 from Klebsiella phage KP179
MHHHHHHGGSNTFAYYSSLENHYNNKFIEKIRGAGFLMHTVEWVAREKIHGTNFSVIITPTEIVPAKRTGPILEGESFFGHEIIMKKYKDSFVKVQNMLNVMDLVSVQIFGEFAGGGIQKGVDYGDKDFYVFDILSDSGNEKVYWDDYRVESFCTTLGLKLAPLLGRGSFAELSQYPNDFKSIVNRYNELVDTTGLEHANKHVFGPQASSETGVAEGYVLKPVYPIFFNTGTRVAIKCKNSKFSEKAKLDSPIKAKVELTENDKRLLEIFSEYVTWNRVSNVLSHIGSVTAKDFGRVMGLTMKDIINEAAREGHDLLFADNPSAVCKELTILIQNTIRSKWHEVLE

SEQ ID NO: 761 - DNA, 1038 bp, synthetic construct
  misc_feature 1..1038: note = variant of RNA ligase 2 from Klebsiella phage KP179
  source 1..1038: mol_type = other DNA
atgcatcaccatcaccatcacggtggcagcaacacgtttgcgtattattcaagtctggaaaaccattacaataataagttcattgagaagatccgtggtgcaggcttcctgatgcacaccgtggaatgggtagctcgcgagaagattcatggaacgaactttagcgttatcattactccgaccgaaatcgtcccagccaaacgcacagggccgatcttggaaggcgagtcgttctttggtcacgaaattatcatgaaaaaatataaagactccttcgtgaaggtgcagaacatgctggtgtggatggatcttgttagcgtgcaaatctttggcgaatttgcgggtggtggcattcagaaaggcgtcgattacggagacaaagatttctatgtgtttgacatcctgtctgatagcgggaacgagaaagtttactgggatgactatcgcgtcgaatcgttttgcaccacgctcggtctgaaattagcgcctctgctgggacgtggtagtttcgctgaactgtcccagtacccaaacgatttcaaaagcattgtgaaccgttataatgaattggttgatacgacgggcctggaacatgccaataaacacgtctttggtccgcaagcgtcttctgaaactggcgtagcagaaggctacgttcttaaacccgtctatccgatcttctttaataccggtacgcgcgtggcgattaaatgcaagaactccaaattttcggagaaagccaagctggactcgccaattaaggcgaaggtggaactgacggagaacgataaacgtctgctcgaaatctttagcgagtatgttacctggaatcgcgtcagtaacgtactgtcacatattggctcagtgaccgcaaaagattttgggcgtgttatgggtctgacgatgaaagacatcattaatgaagcagcacgcgaaggccatgatctgttgttcgctgataacccgtcggcggtgaagaaagagctgaccattctcatccagaacacgattcgctccaaatggcacgaagttctggag

SEQ ID NO: 762 - protein, 346 aa, synthetic construct
  REGION 1..346: note = variant of RNA ligase 2 from Klebsiella phage KP179
MHHHHHHGGSNTFAYYSSLENHYNNKFIEKIRGAGFLMHTVEWVAREKIHGTNFSVIITPTEIVPAKRTGPILEGESFFGHEIIMKKYKDSFVKVQNMLVWMDLVSVQIFGEFAGGGIQKGVDYGDKDFYVFDILSDSGNEKVYWDDYRVESFCTTLGLKLAPLLGRGSFAELSQYPNDFKSIVNRYNELVDTTGLEHANKHVFGPQASSETGVAEGYVLKPVYPIFFNTGTRVAIKCKNSKFSEKAKLDSPIKAKVELTENDKRLLEIFSEYVTWNRVSNVLSHIGSVTAKDFGRVMGLTMKDIINEAAREGHDLLFADNPSAVKKELTILIQNTIRSKWHEVLE

SEQ ID NO: 763 - DNA, 1038 bp, synthetic construct
  misc_feature 1..1038: note = variant of RNA ligase 2 from Klebsiella phage KP179
  source 1..1038: mol_type = other DNA
atgcatcaccatcaccatcacggtggcagcaacacgtttgcgtattattcaagtctggaaaaccattacaataataagttcattgagaagatccgtggtgcaggcttcctgatgcacaccgtggaatgggtagctcgcgagaagattcatggaacgaactttagcgttatcattactccgaccgaaatctggccagccaaacgcacagggccgatcttggaaggcgagtcgttctttggtcacgaaattatcatgaaaaaatataaagactccttcgtgaaggtgcagaacatgctgaatgccatggatcttgttagcgtgcaaatctttggcgaatttgcgggtggtggcattcagaaaggcgtcgattacggagacaaagatttctatgtgtttgacatcctgtctgatagcgggaacgagaaagtttactgggatgactatcgcgtcgaatcgttttgcaccacgctcggtctgaaattagcgcctctgctgggacgtggtagtttcgctgaactgtcccagtacccaaacgatttcaaaagcattgtgaaccgttataatgaattggttgatacgacgggcctgtggcacgccaataaacacgtctttggtccgcaagcgtcttctgaaactggcgtagcagaaggctacgttcttaaacccgtctatccgatcttctttaataccggtacgcgcgtggcgattaaatgcaagaactccaaattttcggagaaagccaagctggactcgccaattaaggcgaaggtggaactgacggagaacgataaacgtctgctcgaaatctttagcgagtatgttacctggaatcgcgtcagtaacgtactgtcacatattggctcagtgaccgcaaaagattttgggcgtgttatgggtctgacgatgaaagacatcattaatgaagcagcacgcgaaggccatgatctgttgttcgctgataacccgtcggcggtgaagaaagagctgaccattctcatccagaacacgattctgtccaaatggcacgaagttctggag

SEQ ID NO: 764 - protein, 346 aa, synthetic construct
  REGION 1..346: note = variant of RNA ligase 2 from Klebsiella phage KP179
MHHHHHHGGSNTFAYYSSLENHYNNKFIEKIRGAGFLMHTVEWVAREKIHGTNFSVIITPTEIWPAKRTGPILEGESFFGHEIIMKKYKDSFVKVQNMLNAMDLVSVQIFGEFAGGGIQKGVDYGDKDFYVFDILSDSGNEKVYWDDYRVESFCTTLGLKLAPLLGRGSFAELSQYPNDFKSIVNRYNELVDTTGLWHANKHVFGPQASSETGVAEGYVLKPVYPIFFNTGTRVAIKCKNSKFSEKAKLDSPIKAKVELTENDKRLLEIFSEYVTWNRVSNVLSHIGSVTAKDFGRVMGLTMKDIINEAAREGHDLLFADNPSAVKKELTILIQNTILSKWHEVLE

SEQ ID NO: 765 - DNA, 1038 bp, synthetic construct
  misc_feature 1..1038: note = variant of RNA ligase 2 from Klebsiella phage KP179
  source 1..1038: mol_type = other DNA
atgcatcaccatcaccatcacggtggcagcaacacgtttgcgtattattcaagtctggaaaaccattacaataataagttcattgagaagatccgtggtgcaggcttcctgatgcacaccgtggaatgggtagctcgcgagaagattcatggaacgaactttagcgttatcattactccgaccgaaatcgtgccagccaaacgcacagggccgatcttggaaggcgagtcgttctttggtcacgaaattatcatgaaaaaatataaagactccttcgtgaaggtgcagaacatgctggtggctatggatcttgttagcgtgcaaatctttggcgaatttgcgggtggtggcattcagaaaggcgtcgattacggagacaaagatttctatgtgtttgacatcctgtctgatagcgggaacgagaaagtttactgggatgactatcgcgtcgaatcgttttgcaccacgctcggtctgaaattagcgcctctgctgggacgtggtagtttcgctgaactgtcccagtacccaaacgatttcaaaagcattgtgaaccgttataatgaattggttgatacgacgggcctgtggatggccaataaacacgtctttggtccgcaagcgtcttctgaaactggcgtagcagaaggctacgttcttaaacccgtctatccgatcttctttaataccggtacgcgcgtggcgattaaatgcaagaactccaaattttcggagaaagccaagctggactcgccaattaaggcgaaggtggaactgacggagaacgataaacgtctgctcgaaatctttagcgagtatgttacctggaatcgcgtcagtaacgtactgtcacatattggctcagtgaccgcaaaagattttgggcgtgttatgggtctgacgatgaaagacatcattaatgaagcagcacgcgaaggccatgatctgttgttcgctgataacccgtcggcggtgaagaaagagctgaccattctcatccagaacacgattcgttccaaatggcacgaagttctggag

SEQ ID NO: 766 - protein, 346 aa, synthetic construct
  REGION 1..346: note = variant of RNA ligase 2 from Klebsiella phage KP179
MHHHHHHGGSNTFAYYSSLENHYNNKFIEKIRGAGFLMHTVEWVAREKIHGTNFSVIITPTEIVPAKRTGPILEGESFFGHEIIMKKYKDSFVKVQNMLVAMDLVSVQIFGEFAGGGIQKGVDYGDKDFYVFDILSDSGNEKVYWDDYRVESFCTTLGLKLAPLLGRGSFAELSQYPNDFKSIVNRYNELVDTTGLWMANKHVFGPQASSETGVAEGYVLKPVYPIFFNTGTRVAIKCKNSKFSEKAKLDSPIKAKVELTENDKRLLEIFSEYVTWNRVSNVLSHIGSVTAKDFGRVMGLTMKDIINEAAREGHDLLFADNPSAVKKELTILIQNTIRSKWHEVLE

SEQ ID NO: 767 - DNA, 1038 bp, synthetic construct
  misc_feature 1..1038: note = variant of RNA ligase 2 from Klebsiella phage KP179
  source 1..1038: mol_type = other DNA
atgcatcaccatcaccatcacggtggcagcaacacgtttgcgtattattcaagtctggaaaaccattacaataataagttcattgagaagatccgtggtgcaggcttcctgatgcacaccgtggaatgggtagctcgcgagaagattcatggaacgaactttagcgttatcattactccgaccgaaatcgtgccagccaaacgcacagggccgatcttggaaggcgagtcgttctttggtcacgaaattatcatgaaaaaatataaagactccttcgtgaaggtgcagaacatgctgaactggatggatcttgttagcgtgcaaatctttggcgaatttgcgggtggtggcattcagaaaggcgtcgattacggagacaaagatttctatgtgtttgacatcctgtctgatagcgggaacgagaaagtttactgggatgactatcgcgtcgaatcgttttgcaccacgctcggtctgaaattagcgcctctgctgggacgtggtagtttcgctgaactgtcccagtacccaaacgatttcaaaagcattgtgaaccgttataatgaattggttgatacgacgggcctggaacatgccaataaacacgtctttggtccgcaagcgtcttctgaaactggcgtagcagaaggctacgttcttaaacccgtctatccgatcttctttaataccggtacgcgcgtggcgattaaatgcaagaactccaaattttcggagaaagccaagctggactcgccaattaaggcgaaggtggaactgacggagaacgataaacgtctgctcgaaatctttagcgagtatgttacctggaatcgcgtcagtaacgtactgtcacatattggctcagtgaccgcaaaagattttgggcgtgttatgggtctgacgatgaaagacatcattaatgaagcagcacgcgaaggccatgatctgttgttcgctgataacccgtcggcggtgaagaaagagctgaccattctcatccagaacacgattcgctccaaatggcacgaagttctggag

SEQ ID NO: 768 - protein, 346 aa, synthetic construct
  REGION 1..346: note = variant of RNA ligase 2 from Klebsiella phage KP179
MHHHHHHGGSNTFAYYSSLENHYNNKFIEKIRGAGFLMHTVEWVAREKIHGTNFSVIITPTEIVPAKRTGPILEGESFFGHEIIMKKYKDSFVKVQNMLNWMDLVSVQIFGEFAGGGIQKGVDYGDKDFYVFDILSDSGNEKVYWDDYRVESFCTTLGLKLAPLLGRGSFAELSQYPNDFKSIVNRYNELVDTTGLEHANKHVFGPQASSETGVAEGYVLKPVYPIFFNTGTRVAIKCKNSKFSEKAKLDSPIKAKVELTENDKRLLEIFSEYVTWNRVSNVLSHIGSVTAKDFGRVMGLTMKDIINEAAREGHDLLFADNPSAVKKELTILIQNTIRSKWHEVLE

SEQ ID NO: 769 - DNA, 1038 bp, synthetic construct
  misc_feature 1..1038: note = variant of RNA ligase 2 from Klebsiella phage KP179
  source 1..1038: mol_type = other DNA
atgcatcaccatcaccatcacggtggcagcaacacgtttgcgtattattcaagtctggaaaaccattacaataataagttcattgagaagatccgtggtgcaggcttcctgatgcacaccgtggaatgggtagctcgcgagaagattcatggaacgaactttagcgttatcattactccgaccgaaatcgtgccagccaaacgcacagggccgatcttggaaggcgagtcgttctttggtcacgaaattatcatgaaaaaatataaagactccttcgtgaaggtgcagaacatgctgaactggatggatcttgttagcgtgcaaatctttggcgaatttgcgggtggtggcattcagaaaggcgtcgattacggagacaaagatttctatgtgtttgacatcctgtctgatagcgggaacgagaaagtttactgggatgactatcgcgtcgaatcgttttgcaccacgctcggtctgaaattagcgcctctgctgggacgtggtagtttcgctgaactgtcccagtacccaaacgatttcaaaagcattgtgaaccgttataatgaattggttgatacgacgggcctggagcacgccaataaacacgtctttggtccgcaagcgtcttctgaaactggcgtagcagaaggctacgttcttaaacccgtctatccgatcttctttaataccggtacgcgcgtggcgattaaatgcaagaactccaaattttcggagaaagccaagctggactcgccaattaaggcgaaggtggaactgacggagaacgataaacgtctgctcgaaatctttagcgagtatgttacctggaatcgcgtcagtaacgtactgtcacatattggctcagtgaccgcaaaagattttgggcgtgttatgggtctgacgatgaaagacatcattaatgaagcagcacgcgaaggccatgatctgttgttcgctgataacccgtcggcggtgaagaaagagctgaccattctcatccagaacacgattctgtccaaatggcacgaagttctggag

SEQ ID NO: 770 - protein, 346 aa, synthetic construct
  REGION 1..346: note = variant of RNA ligase 2 from Klebsiella phage KP179
MHHHHHHGGSNTFAYYSSLENHYNNKFIEKIRGAGFLMHTVEWVAREKIHGTNFSVIITPTEIVPAKRTGPILEGESFFGHEIIMKKYKDSFVKVQNMLNWMDLVSVQIFGEFAGGGIQKGVDYGDKDFYVFDILSDSGNEKVYWDDYRVESFCTTLGLKLAPLLGRGSFAELSQYPNDFKSIVNRYNELVDTTGLEHANKHVFGPQASSETGVAEGYVLKPVYPIFFNTGTRVAIKCKNSKFSEKAKLDSPIKAKVELTENDKRLLEIFSEYVTWNRVSNVLSHIGSVTAKDFGRVMGLTMKDIINEAAREGHDLLFADNPSAVKKELTILIQNTILSKWHEVLE

SEQ ID NO: 771 - DNA, 1038 bp, synthetic construct
  misc_feature 1..1038: note = variant of RNA ligase 2 from Klebsiella phage KP179
  source 1..1038: mol_type = other DNA
atgcatcaccatcaccatcacggtggcagcaacacgtttgcgtattattcaagtctggaaaaccattacaataataagttcattgagaagatccgtggtgcaggcttcctgatgcacaccgtggaatgggtagctcgcgagaagattcatggaacgaactttagcgttatcattactccgaccgaaatcgtcccagccaaacgcacagggccgatcttggaaggcgagtcgttctttggtcacgaaattatcatgaaaaaatataaagactccttcgtgaaggtgcagaacatgctgaacgctatggatcttgttagcgtgcaaatctttggcgaatttgcgggtggtggcattcagaaaggcgtcgattacggagacaaagatttctatgtgtttgacatcctgtctgatagcgggaacgggaaagtttactgggatgactatcgcgtcgaatcgttttgcaccacgctcggtctgaaattagcgcctctgctgggacgtggtagtttcgctgaactgtcccagtacccaaacgatttcaaaagcattgtgaaccgttataatgaattggttgatacgacgggcctggaacatgccaataaacacgtctttggtccgcaagcgtcttctgaaactggcgtagcagaaggctacgttcttaaacccgtctatccgatcttctttaataccggtacgcgcgtggcgattaaatgcaagaactccaaattttcggagaaagccaagctggactcgccaattaaggcgaaggtggaactgacggagaacgataaacgtctgctcgaaatctttagcgagtatgttacctggaatcgcgtcagtaacgtactgtcacatattggctcagtgaccgcaaaagattttgggcgtgttatgggtctgacgatgaaagacatcatcaatgaagcagcacgcgaaggccatgatctgttgttcgctgataacccgtcggcggtgaaaagcgagctgaccattctcatccagaacacgattcgttccaaatggcacgaagttctggag

SEQ ID NO: 772 - protein, 346 aa, synthetic construct
  REGION 1..346: note = variant of RNA ligase 2 from Klebsiella phage KP179
MHHHHHHGGSNTFAYYSSLENHYNNKFIEKIRGAGFLMHTVEWVAREKIHGTNFSVIITPTEIVPAKRTGPILEGESFFGHEIIMKKYKDSFVKVQNMLNAMDLVSVQIFGEFAGGGIQKGVDYGDKDFYVFDILSDSGNGKVYWDDYRVESFCTTLGLKLAPLLGRGSFAELSQYPNDFKSIVNRYNELVDTTGLEHANKHVFGPQASSETGVAEGYVLKPVYPIFFNTGTRVAIKCKNSKFSEKAKLDSPIKAKVELTENDKRLLEIFSEYVTWNRVSNVLSHIGSVTAKDFGRVMGLTMKDIINEAAREGHDLLFADNPSAVKSELTILIQNTIRSKWHEVLE

SEQ ID NO: 773 - DNA, 1038 bp, synthetic construct
  misc_feature 1..1038: note = variant of RNA ligase 2 from Klebsiella phage KP179
  source 1..1038: mol_type = other DNA
atgcatcaccatcaccatcacggtggcagcaacacgtttgcgtattattcaagtctggaaaaccattacaataataagttcattgagaagatccgtggtgcaggcttcctgatgcacaccgtggaatgggtagctcgcgagaagattcatggaacgaactttagcgttatcattactccgaccgaaatcgtcccagccaaacgcacagggccgatcttggaaggcgagtcgttctttggtcacgaaattatcatgaaaaaatataaagactccttcgtgaaggtgcagaacatgctgaacgttatggatcttgttagcgtgcaaatctttggcgaatttgcgggtggtggcattcagaaaggcgtcgattacggagacaaagatttctatgtgtttgacatcctgtctgatagcgggaacgagaaagtttactgggatgactatcgcgtcgaatcgttttgcaccacgctcggtctgaaattagcgcctctgctgggacgtggtagtttcgctgaactgtcccagtacccaaacgatttcaaaagcattgtgaaccgttataatgaattggttgatacgacgggcctggagcatgccaataaacacgtctttggtccgcaagcgtcttctgaaactggcgtagcagaaggctacgttcttaaacccgtctatccgatcttctttaataccggtacgcgcgtggcgattaaatgcaagaactccaaattttcggagaaagccaagctggactcgccaattaaggcgaaggtggaactgacggagaacgataaacgtctgctcgaaatctttagcgagtatgttacctggaatcgcgtcagtaacgtactgtcacatattggctcagtgaccgcaaaagattttgggcgtgttatgggtctgacgatgaaagacatcggtaatgaagcagcacgcgaaggccatgatctgttgttcgctgataacccgtcggcggtgaaaaaggagctgaccattctcatccagaacacgattcgttccaaatggcacgaagttctggag

SEQ ID NO: 774 - protein, 346 aa, synthetic construct
  REGION 1..346: note = variant of RNA ligase 2 from Klebsiella phage KP179
MHHHHHHGGSNTFAYYSSLENHYNNKFIEKIRGAGFLMHTVEWVAREKIHGTNFSVIITPTEIVPAKRTGPILEGESFFGHEIIMKKYKDSFVKVQNMLNVMDLVSVQIFGEFAGGGIQKGVDYGDKDFYVFDILSDSGNEKVYWDDYRVESFCTTLGLKLAPLLGRGSFAELSQYPNDFKSIVNRYNELVDTTGLEHANKHVFGPQASSETGVAEGYVLKPVYPIFFNTGTRVAIKCKNSKFSEKAKLDSPIKAKVELTENDKRLLEIFSEYVTWNRVSNVLSHIGSVTAKDFGRVMGLTMKDIGNEAAREGHDLLFADNPSAVKKELTILIQNTIRSKWHEVLE

SEQ ID NO: 775 - DNA, 1038 bp, synthetic construct
  misc_feature 1..1038: note = variant of RNA ligase 2 from Klebsiella phage KP179
  source 1..1038: mol_type = other DNA
atgcatcaccatcaccatcacggtggcagcaacacgtttgcgtattattcaagtctggaaaaccattacaataataagttcattgagaagatccgtggtgcaggcttcctgatgcacaccgtggaatgggtagctcgcgagaagattcatggaacgaactttagcgttatcattactccgaccgaaatctggccagccaaacgcacagggccgatcttggaaggcgagtcgttctttggtcacgaaattatcatgaaaaaatataaagactccttcgtgaaggtgcagaacatgctggtgtggatggatcttgttagcgtgcaaatctttggcgaatttgcgggtggtggcattcagaaaggcgtcgattacggagacaaagatttctatgtgtttgacatcctgtctgatagcgggaacgagaaagtttactgggatgactatcgcgtcgaatcgttttgcaccacgctcggtctgaaattagcgcctctgctgggacgtggtagtttcgctgaactgtcccagtacccaaacgatttcaaaagcattgtgaaccgttataatgaattggttgatacgacgggcctgtggcacgccaataaacacgtctttggtccgcaagcgtcttctgaaactggcgtagcagaaggctacgttcttaaacccgtctatccgatcttctttaataccggtacgcgcgtggcgattaaatgcaagaactccaaattttcggagaaagccaagctggactcgccaattaaggcgaaggtggaactgacggagaacgataaacgtctgctcgaaatctttagcgagtatgttacctggaatcgcgtcagtaacgtactgtcacatattggctcagtgaccgcaaaagattttgggcgtgttatgggtctgacgatgaaagacatcattaatgaagcagcacgcgaaggccatgatctgttgttcgctgataacccgtcggcggtgaagaaagagctgaccattctcatccagaacacgattcgttccaaatggcacgaagttctggag

SEQ ID NO: 776 - protein, 346 aa, synthetic construct
  REGION 1..346: note = variant of RNA ligase 2 from Klebsiella phage KP179
MHHHHHHGGSNTFAYYSSLENHYNNKFIEKIRGAGFLMHTVEWVAREKIHGTNFSVIITPTEIWPAKRTGPILEGESFFGHEIIMKKYKDSFVKVQNMLVWMDLVSVQIFGEFAGGGIQKGVDYGDKDFYVFDILSDSGNEKVYWDDYRVESFCTTLGLKLAPLLGRGSFAELSQYPNDFKSIVNRYNELVDTTGLWHANKHVFGPQASSETGVAEGYVLKPVYPIFFNTGTRVAIKCKNSKFSEKAKLDSPIKAKVELTENDKRLLEIFSEYVTWNRVSNVLSHIGSVTAKDFGRVMGLTMKDIINEAAREGHDLLFADNPSAVKKELTILIQNTIRSKWHEVLE

SEQ ID NO: 777 - DNA, 1038 bp, synthetic construct
  misc_feature 1..1038: note = variant of RNA ligase 2 from Klebsiella phage KP179
  source 1..1038: mol_type = other DNA
atgcatcaccatcaccatcacggtggcagcaacacgtttgcgtattattcaagtctggaaaaccattacaataataagttcattgagaagatccgtggtgcaggcttcctgatgcacaccgtggaatgggtagctcgcgagaagattcatggaacgaactttagcgttatcattactccgaccgaaatcgtcccagccaaacgcacagggccgatcttggaaggcgagtcgttctttggtcacgaaattatcatgaaaaaatataaagactccttcgtgaaggtgcagaacatgctgaacgttatggatcttgttagcgtgcaaatctttggcgaatttgcgggtggtggcattcagaaaggcgtcgattacggagacaaagatttctatgtgtttgacatcctgtctgatagcgggaacgagaaagtttactgggatgactatcgcgtcgaatcgttttgcaccacgctcggtctgaaattagcgcctctgctgggacgtggtagtttcgctgaactgtcccagtacccaaacgatttcaaaagcattgtgaaccgttataatgaattggttgatacgacgggcctggaacatgccaataaacacgtctttggtccgcaagcgtcttctgaaactggcgtagcagaaggctacgttcttaaacccgtctatccgatcttctttaataccggtacgcgcgtggcgattaaatgcaagaactccaaattttcggagaaagccaagctggactcgccaattaaggcgaaggtggaactgacggagaacgataaacgtctgctcgaaatctttagcgagtatgttacctggaatcgcgtcagtaacgtactgtcacatattggctcagtgaccgcaaaagattttgggcgtgttatgggtctgacgatgaaagacatcatcaatgaagcagcacgcgaaggccatgatctgttgttcgctgataacccgtcggcggtgctgggcgagctgaccattctcatccagaacacgattcgttccaaatggcacgaagttctggag

SEQ ID NO: 778 - protein, 346 aa, synthetic construct
  REGION 1..346: note = variant of RNA ligase 2 from Klebsiella phage KP179
MHHHHHHGGSNTFAYYSSLENHYNNKFIEKIRGAGFLMHTVEWVAREKIHGTNFSVIITPTEIVPAKRTGPILEGESFFGHEIIMKKYKDSFVKVQNMLNVMDLVSVQIFGEFAGGGIQKGVDYGDKDFYVFDILSDSGNEKVYWDDYRVESFCTTLGLKLAPLLGRGSFAELSQYPNDFKSIVNRYNELVDTTGLEHANKHVFGPQASSETGVAEGYVLKPVYPIFFNTGTRVAIKCKNSKFSEKAKLDSPIKAKVELTENDKRLLEIFSEYVTWNRVSNVLSHIGSVTAKDFGRVMGLTMKDIINEAAREGHDLLFADNPSAVLGELTILIQNTIRSKWHEVLE

SEQ ID NO: 779 - DNA, 1038 bp, synthetic construct
  misc_feature 1..1038: note = variant of RNA ligase 2 from Klebsiella phage KP179
  source 1..1038: mol_type = other DNA
atgcatcaccatcaccatcacggtggcagcaacacgtttgcgtattattcaagtctggaaaaccattacaataataagttcattgagaagatccgtggtgcaggcttcctgatgcacaccgtggaatgggtagctcgcgagaagattcatggaacgaactttagcgttatcattactccgaccgaaatcgtcccagccaaacgcacagggccgatcttggaaggcgagtcgttctttggtcacgaaattatcatgaaaaaatataaagactccttcgtgaaggtgcagaacatgctggtggctatggatcttgttagcgtgcaaatctttggcgaatttgcgggtggtggcattcagaaaggcgtcgattacggagacaaagatttctatgtgtttgacatcctgtctgatagcgggaacgagaaagtttactgggatgactatcgcgtcgaatcgttttgcaccacgctcggtctgaaattagcgcctctgctgggacgtggtagtttcgctgaactgtcccagtacccaaacgatttcaaaagcattgtgaaccgttataatgaattggttgatacgacgggcctggaacatgccaataaacacgtctttggtccgcaagcgtcttctgaaactggcgtagcagaaggctacgttcttaaacccgtctatccgatcttctttaataccggtacgcgcgtggcgattaaatgcaagaactccaaattttcggagaaagccaagctggactcgccaattaaggcgaaggtggaactgacggagaacgataaacgtctgctcgaaatctttagcgagtatgttacctggaatcgcgtcagtaacgtactgtcacatattggctcagtgaccgcaaaagattttgggcgtgttatgggtctgacgatgaaagacatcattaatgaagcagcacgcgaaggccatgatctgttgttcgctgataacccgtcggcggtgaagaaagagctgaccattctcatccagaacacgattcgttccaaatggcacgaagttctggag

SEQ ID NO: 780 - protein, 346 aa, synthetic construct
  REGION 1..346: note = variant of RNA ligase 2 from Klebsiella phage KP179
MHHHHHHGGSNTFAYYSSLENHYNNKFIEKIRGAGFLMHTVEWVAREKIHGTNFSVIITPTEIVPAKRTGPILEGESFFGHEIIMKKYKDSFVKVQNMLVAMDLVSVQIFGEFAGGGIQKGVDYGDKDFYVFDILSDSGNEKVYWDDYRVESFCTTLGLKLAPLLGRGSFAELSQYPNDFKSIVNRYNELVDTTGLEHANKHVFGPQASSETGVAEGYVLKPVYPIFFNTGTRVAIKCKNSKFSEKAKLDSPIKAKVELTENDKRLLEIFSEYVTWNRVSNVLSHIGSVTAKDFGRVMGLTMKDIINEAAREGHDLLFADNPSAVKKELTILIQNTIRSKWHEVLE

SEQ ID NO: 781 - DNA, 1038 bp, synthetic construct
  misc_feature 1..1038: note = variant of RNA ligase 2 from Klebsiella phage KP179
  source 1..1038: mol_type = other DNA
atgcatcaccatcaccatcacggtggcagcaacacgtttgcgtattattcaagtctggaaaaccattacaataataagttcattgagaagatccgtggtgcaggcttcctgatgcacaccgtggaatgggtagctcgcgagaagattcatggaacgaactttagcgttatcattactccgaccgaaatcgtcccagccaaacgcacagggccgatcttggaaggcgagtcgttctttggtcacgaaattatcatgaaaaaatataaagactccttcgtgaaggtgcagaacatgctgaatgccatggatcttgttagcgtgcaaatctttggcgaatttgcgggtggtggcattcagaaaggcgtcgattacggagacaaagatttctatgtgtttgacatcctgtctgatagcgggaacgagaaagtttactgggatgactatcgcgtcgaatcgttttgcaccacgctcggtctgaaattagcgcctctgctgggacgtggtagtttcgctgaactgtcccagtacccaaacgatttcaaaagcattgtgaaccgttataatgaattggttgatacgacgggcctggaacatgccaataaacacgtctttggtccgcaagcgtcttctgaaactggcgtagcagaaggctacgttcttaaacccgtctatccgatcttctttaataccggtacgcgcgtggcgattaaatgcaagaactccaaattttcggagaaagccaagctggactcgccaattaaggcgaaggtggaactgacggagaacgataaacgtctgctcgaaatctttagcgagtatgttacctggaatcgcgtcagtaacgtactgtcacatattggctcagtgaccgcaaaagattttgggcgtgttatgggtctgacgatgaaagacatcattaatgaagcagcacgcgaaggccatgatctgttgttcgctgataacccgtcggcggtgaaaggcgagctgaccattctcatccagaacacgattcgttccaaatggcacgaagttctggag

SEQ ID NO: 782 - protein, 346 aa, synthetic construct
  REGION 1..346: note = variant of RNA ligase 2 from Klebsiella phage KP179
MHHHHHHGGSNTFAYYSSLENHYNNKFIEKIRGAGFLMHTVEWVAREKIHGTNFSVIITPTEIVPAKRTGPILEGESFFGHEIIMKKYKDSFVKVQNMLNAMDLVSVQIFGEFAGGGIQKGVDYGDKDFYVFDILSDSGNEKVYWDDYRVESFCTTLGLKLAPLLGRGSFAELSQYPNDFKSIVNRYNELVDTTGLEHANKHVFGPQASSETGVAEGYVLKPVYPIFFNTGTRVAIKCKNSKFSEKAKLDSPIKAKVELTENDKRLLEIFSEYVTWNRVSNVLSHIGSVTAKDFGRVMGLTMKDIINEAAREGHDLLFADNPSAVKGELTILIQNTIRSKWHEVLE

SEQ ID NO: 783 - DNA, 1038 bp, synthetic construct
  misc_feature 1..1038: note = variant of RNA ligase 2 from Klebsiella phage KP179
  source 1..1038: mol_type = other DNA
atgcatcaccatcaccatcacggtggcagcaacacgtttgcgtattattcaagtctggaaaaccattacaataataagttcattgagaagatccgtggtgcaggcttcctgatgcacaccgtggaatgggtagctcgcgagaagattcatggaacgaactttagcgttatcattactccgaccgaaatcgtcccagccaaacgcacagggccgatcttggaaggcgagtcgttctttggtcacgaaattatcatgaaaaaatataaagactccttcgtgaaggtgcagaacatgctgaatgccatggatcttgttagcgtgcaaatctttggcgaatttgcgggtggtggcattcagaaaggcgtcgattacggagacaaagatttctatgtgtttgacatcctgtctgatagcgggaacgagaaagtttactgggatgactatcgcgtcgaatcgttttgcaccacgctcggtctgaaattagcgcctctgctgggacgtggtagtttcgctgaactgtcccagtacccaaacgatttcaaaagcattgtgaaccgttataatgaattggttgatacgacgggcctggagcatgccaataaacacgtctttggtccgcaagcgtcttctgaaactggcgtagcagaaggctacgttcttaaacccgtctatccgatcttctttaataccggtacgcgcgtggcgattaaatgcaagaactccaaattttcggagaaagccaagctggactcgccaattaaggcgaaggtggaactgacggagaacgataaacgtctgctcgaaatctttagcgagtatgttacctggaatcgcgtcagtaacgtactgtcacatattggctcagtgaccgcaaaagattttgggcgtgttatgggtctgacgatgaaagacatcattaatgaagcagcacgcgaaggccatgatctgttgttcgctgataacccgtcggcggtgtgtaaggagctgaccattctcatccagaacacgattcgttccaaatggcacgaagtttcggag

SEQ ID NO: 784 - protein, 346 aa, synthetic construct
  REGION 1..346: note = variant of RNA ligase 2 from Klebsiella phage KP179
MHHHHHHGGSNTFAYYSSLENHYNNKFIEKIRGAGFLMHTVEWVAREKIHGTNFSVIITPTEIVPAKRTGPILEGESFFGHEIIMKKYKDSFVKVQNMLNAMDLVSVQIFGEFAGGGIQKGVDYGDKDFYVFDILSDSGNEKVYWDDYRVESFCTTLGLKLAPLLGRGSFAELSQYPNDFKSIVNRYNELVDTTGLEHANKHVFGPQASSETGVAEGYVLKPVYPIFFNTGTRVAIKCKNSKFSEKAKLDSPIKAKVELTENDKRLLEIFSEYVTWNRVSNVLSHIGSVTAKDFGRVMGLTMKDIINEAAREGHDLLFADNPSAVCKELTILIQNTIRSKWHEVSE

SEQ ID NO: 785 - DNA, 1038 bp, synthetic construct
  misc_feature 1..1038: note = variant of RNA ligase 2 from Klebsiella phage KP179
  source 1..1038: mol_type = other DNA
atgcatcaccatcaccatcacggtggcagcaacacgtttgcgtattattcaagtctggaaaaccattacaataataagttcattgagaagatccgtggtgcaggcttcctgatgcacaccgtggaatgggtagctcgcgagaagattcatggaacgaactttagcgttatcattactccgaccgaaatctggccagccaaacgcacagggccgatcttggaaggcgagtcgttctttggtcacgaaattatcatgaaaaaatataaagactccttcgtgaaggtgcagaacatgctggtggttatggatcttgttagcgtgcaaatctttggcgaatttgcgggtggtggcattcagaaaggcgtcgattacggagacaaagatttctatgtgtttgacatcctgtctgatagcgggaacgagaaagtttactgggatgactatcgcgtcgaatcgttttgcaccacgctcggtctgaaattagcgcctctgctgggacgtggtagtttcgctgaactgtcccagtacccaaacgatttcaaaagcattgtgaaccgttataatgaattggttgatacgacgggcctgtggatggccaataaacacgtctttggtccgcaagcgtcttctgaaactggcgtagcagaaggctacgttcttaaacccgtctatccgatcttctttaataccggtacgcgcgtggcgattaaatgcaagaactccaaattttcggagaaagccaagctggactcgccaattaaggcgaaggtggaactgacggagaacgataaacgtctgctcgaaatctttagcgagtatgttacctggaatcgcgtcagtaacgtactgtcacatattggctcagtgaccgcaaaagattttgggcgtgttatgggtctgacgatgaaagacatcattaatgaagcagcacgcgaaggccatgatctgttgttcgctgataacccgtcggcggtgaagaaagagctgaccattctcatccagaacacgattcgctccaaatggcacgaagttctggag

SEQ ID NO: 786 - protein, 346 aa, synthetic construct
  REGION 1..346: note = variant of RNA ligase 2 from Klebsiella phage KP179
MHHHHHHGGSNTFAYYSSLENHYNNKFIEKIRGAGFLMHTVEWVAREKIHGTNFSVIITPTEIWPAKRTGPILEGESFFGHEIIMKKYKDSFVKVQNMLVVMDLVSVQIFGEFAGGGIQKGVDYGDKDFYVFDILSDSGNEKVYWDDYRVESFCTTLGLKLAPLLGRGSFAELSQYPNDFKSIVNRYNELVDTTGLWMANKHVFGPQASSETGVAEGYVLKPVYPIFFNTGTRVAIKCKNSKFSEKAKLDSPIKAKVELTENDKRLLEIFSEYVTWNRVSNVLSHIGSVTAKDFGRVMGLTMKDIINEAAREGHDLLFADNPSAVKKELTILIQNTIRSKWHEVLE

SEQ ID NO: 787 - DNA, 1038 bp, synthetic construct
  misc_feature 1..1038: note = variant of RNA ligase 2 from Klebsiella phage KP179
  source 1..1038: mol_type = other DNA
atgcatcaccatcaccatcacggtggcagcaacacgtttgcgtattattcaagtctggaaaaccattacaataataagttcattgagaagatccgtggtgcaggcttcctgatgcacaccgtggaatgggtagctcgcgagaagattcatggaacgaactttagcgttatcattactccgaccgaaatcgtcccagccaaacgcacagggccgatcttggaaggcgagtcgttctttggtcacgaaattatcatgaaaaaatataaagactccttcgtgaaggtgcagaacatgctgaatgccatggatcttgttagcgtgcaaatctttggcgaatttgcgggtggtggcattcagaaaggcgtcgattacggagacaaagatttctatgtgtttgacatcctgtctgatagcgggaacgagaaagtttactgggatgactatcgcgtcgaatcgttttgcaccacgctcggtctgaaattagcgcctctgctgggacgtggtagtttcgctgaactgtcccagtacccaaacgatttcaaaagcattgtgaaccgttataatgaattggttgatacgacgggcctggaacatgccaataaacacgtctttggtccgcaagcgtcttctgaaactggcgtagcagaaggctacgttcttaaacccgtctatccgatcttctttaataccggtacgcgcgtggcgattaaatgcaagaactccaaattttcggagaaagccaagctggactcgccaattaaggcgaaggtggaactgacggagaacgataaacgtctgctcgaaatctttagcgagtatgttacctggaatcgcgtcagtaacgtactgtcacatattggctcagtgaccgcaaaagattttgggcgtgttatgggtctgacgatgaaagacatcattaatgaagcagcacgcgaaggccatgatctgttgttcgctgataacccgtcggcggtgtgtagcgagctgaccattctcatccagaacacgattcgttccaaatggcacgaagttctggag

SEQ ID NO: 788 - protein, 346 aa, synthetic construct
  REGION 1..346: note = variant of RNA ligase 2 from Klebsiella phage KP179
MHHHHHHGGSNTFAYYSSLENHYNNKFIEKIRGAGFLMHTVEWVAREKIHGTNFSVIITPTEIVPAKRTGPILEGESFFGHEIIMKKYKDSFVKVQNMLNAMDLVSVQIFGEFAGGGIQKGVDYGDKDFYVFDILSDSGNEKVYWDDYRVESFCTTLGLKLAPLLGRGSFAELSQYPNDFKSIVNRYNELVDTTGLEHANKHVFGPQASSETGVAEGYVLKPVYPIFFNTGTRVAIKCKNSKFSEKAKLDSPIKAKVELTENDKRLLEIFSEYVTWNRVSNVLSHIGSVTAKDFGRVMGLTMKDIINEAAREGHDLLFADNPSAVCSELTILIQNTIRSKWHEVLE

SEQ ID NO: 789 - DNA, 1038 bp, synthetic construct
  misc_feature 1..1038: note = variant of RNA ligase 2 from Klebsiella phage KP179
  source 1..1038: mol_type = other DNA
atgcatcaccatcaccatcacggtggcagcaacacgtttgcgtattattcaagtctggaaaaccattacaataataagttcattgagaagatccgtggtgcaggcttcctgatgcacaccgtggaatgggtagctcgcgagaagattcatggaacgaactttagcgttatcattactccgaccgaaatctggccagccaaacgcacagggccgatcttggaaggcgagtcgttctttggtcacgaaattatcatgaaaaaatataaagactccttcgtgaaggtgcagaacatgctgaactggatggatcttgttagcgtgcaaatctttggcgaatttgcgggtggtggcattcagaaaggcgtcgattacggagacaaagatttctatgtgtttgacatcctgtctgatagcgggaacgagaaagtttactgggatgactatcgcgtcgaatcgttttgcaccacgctcggtctgaaattagcgcctctgctgggacgtggtagtttcgctgaactgtcccagtacccaaacgatttcaaaagcattgtgaaccgttataatgaattggttgatacgacgggcctggagcacgccaataaacacgtctttggtccgcaagcgtcttctgaaactggcgtagcagaaggctacgttcttaaacccgtctatccgatcttctttaataccggtacgcgcgtggcgattaaatgcaagaactccaaattttcggagaaagccaagctggactcgccaattaaggcgaaggtggaactgacggagaacgataaacgtctgctcgaaatctttagcgagtatgttacctggaatcgcgtcagtaacgtactgtcacatattggctcagtgaccgcaaaagattttgggcgtgttatgggtctgacgatgaaagacatcattaatgaagcagcacgcgaaggccatgatctgttgttcgctgataacccgtcggcggtgaagaaagagctgaccattctcatccagaacacgattcgttccaaatggcacgaagttctggag

SEQ ID NO: 790 - protein, 346 aa, synthetic construct
  REGION 1..346: note = variant of RNA ligase 2 from Klebsiella phage KP179
MHHHHHHGGSNTFAYYSSLENHYNNKFIEKIRGAGFLMHTVEWVAREKIHGTNFSVIITPTEIWPAKRTGPILEGESFFGHEIIMKKYKDSFVKVQNMLNWMDLVSVQIFGEFAGGGIQKGVDYGDKDFYVFDILSDSGNEKVYWDDYRVESFCTTLGLKLAPLLGRGSFAELSQYPNDFKSIVNRYNELVDTTGLEHANKHVFGPQASSETGVAEGYVLKPVYPIFFNTGTRVAIKCKNSKFSEKAKLDSPIKAKVELTENDKRLLEIFSEYVTWNRVSNVLSHIGSVTAKDFGRVMGLTMKDIINEAAREGHDLLFADNPSAVKKELTILIQNTIRSKWHEVLE

SEQ ID NO: 791 - DNA, 1038 bp, synthetic construct
  misc_feature 1..1038: note = variant of RNA ligase 2 from Klebsiella phage KP179
  source 1..1038: mol_type = other DNA
atgcatcaccatcaccatcacggtggcagcaacacgtttgcgtattattcaagtctggaaaaccattacaataataagttcattgagaagatccgtggtgcaggcttcctgatgcacaccgtggaatgggtagctcgcgagaagattcatggaacgaactttagcgttatcattactccgaccgaaatcgtgccagccaaacgcacagggccgatcttggaaggcgagtcgttctttggtcacgaaattatcatgaaaaaatataaagactccttcgtgaaggtgcagaacatgctggtggttatggatcttgttagcgtgcaaatctttggcgaatttgcgggtggtggcattcagaaaggcgtcgattacggagacaaagatttctatgtgtttgacatcctgtctgatagcgggaacgagaaagtttactgggatgactatcgcgtcgaatcgttttgcaccacgctcggtctgaaattagcgcctctgctgggacgtggtagtttcgctgaactgtcccagtacccaaacgatttcaaaagcattgtgaaccgttataatgaattggttgatacgacgggcctgtggcacgccaataaacacgtctttggtccgcaagcgtcttctgaaactggcgtagcagaaggctacgttcttaaacccgtctatccgatcttctttaataccggtacgcgcgtggcgattaaatgcaagaactccaaattttcggagaaagccaagctggactcgccaattaaggcgaaggtggaactgacggagaacgataaacgtctgctcgaaatctttagcgagtatgttacctggaatcgcgtcagtaacgtactgtcacatattggctcagtgaccgcaaaagattttgggcgtgttatgggtctgacgatgaaagacatcattaatgaagcagcacgcgaaggccatgatctgttgttcgctgataacccgtcggcggtgaagaaagagctgaccattctcatccagaacacgattcgctccaaatggcacgaagttctggag

SEQ ID NO: 792 - protein, 346 aa, synthetic construct
  REGION 1..346: note = variant of RNA ligase 2 from Klebsiella phage KP179
MHHHHHHGGSNTFAYYSSLENHYNNKFIEKIRGAGFLMHTVEWVAREKIHGTNFSVIITPTEIVPAKRTGPILEGESFFGHEIIMKKYKDSFVKVQNMLVVMDLVSVQIFGEFAGGGIQKGVDYGDKDFYVFDILSDSGNEKVYWDDYRVESFCTTLGLKLAPLLGRGSFAELSQYPNDFKSIVNRYNELVDTTGLWHANKHVFGPQASSETGVAEGYVLKPVYPIFFNTGTRVAIKCKNSKFSEKAKLDSPIKAKVELTENDKRLLEIFSEYVTWNRVSNVLSHIGSVTAKDFGRVMGLTMKDIINEAAREGHDLLFADNPSAVKKELTILIQNTIRSKWHEVLE

SEQ ID NO: 793 - DNA, 1038 bp, synthetic construct
  misc_feature 1..1038: note = variant of RNA ligase 2 from Klebsiella phage KP179
  source 1..1038: mol_type = other DNA
atgcatcaccatcaccatcacggtggcagcaacacgtttgcgtattattcaagtctggaaaaccattacaataataagttcattgagaagatccgtggtgcaggcttcctgatgcacaccgtggaatgggtagctcgcgagaagattcatggaacgaactttagcgttatcattactccgaccgaaatcgtcccagccaaacgcacagggccgatcttggaaggcgagtcgttctttggtcacgaaattatcatgaaaaaatataaagactccttcgtgaaggtgcagaacatgctgaacgttatggatcttgttagcgtgcaaatctttggcgaatttgcgggtggtggcattcagaaaggcgtcgattacggagacaaagatttctatgtgtttgacatcctgtctgatagcgggaacgagaaagtttactgggatgactatcgcgtcgaatcgttttgcaccacgctcggtctgaaattagcgcctctgctgggacgtggtagtttcgctgaactgtcccagtacccaaacgatttcaaaagcattgtgaaccgttataatgaattggttgatacgacgggcctggagcatgccaataaacacgtctttggtccgcaagcgtcttctgaaactggcgtagcagaaggctacgttcttaaacccgtctatccgatcttctttaataccggtacgcgcgtggcgattaaatgcaagaactccaaattttcggagaaagccaagctggactcgccaattaaggcgaaggtggaactgacggagaacgataaacgtctgctcgaaatctttagcgagtatgttacctggaatcgcgtcagtaacgtactgtcacatattggctcagtgaccgcaaaagattttgggcgtgttatgggtctgacgatgaaagacatcattaatgaagcagcacgcgaaggccatgatctgttgttcgctgataacccgtcggcggtgaaaagcgagctgaccattctcatccagaacacgattcgttccaaatggcacgaagttctggag

SEQ ID NO: 794 - protein, 346 aa, synthetic construct
  REGION 1..346: note = variant of RNA ligase 2 from Klebsiella phage KP179
MHHHHHHGGSNTFAYYSSLENHYNNKFIEKIRGAGFLMHTVEWVAREKIHGTNFSVIITPTEIVPAKRTGPILEGESFFGHEIIMKKYKDSFVKVQNMLNVMDLVSVQIFGEFAGGGIQKGVDYGDKDFYVFDILSDSGNEKVYWDDYRVESFCTTLGLKLAPLLGRGSFAELSQYPNDFKSIVNRYNELVDTTGLEHANKHVFGPQASSETGVAEGYVLKPVYPIFFNTGTRVAIKCKNSKFSEKAKLDSPIKAKVELTENDKRLLEIFSEYVTWNRVSNVLSHIGSVTAKDFGRVMGLTMKDIINEAAREGHDLLFADNPSAVKSELTILIQNTIRSKWHEVLE

SEQ ID NO: 795 - DNA, 1038 bp, synthetic construct
  misc_feature 1..1038: note = variant of RNA ligase 2 from Klebsiella phage KP179
  source 1..1038: mol_type = other DNA
atgcatcaccatcaccatcacggtggcagcaacacgtttgcgtattattcaagtctggaaaaccattacaataataagttcattgagaagatccgtggtgcaggcttcctgatgcacaccgtggaatgggtagctcgcgagaagattcatggaacgaactttagcgttatcattactccgaccgaaatcgtcccagccaaacgcacagggccgatcttggaaggcgagtcgttctttggtcacgaaattatcatgaaaaaatataaagactccttcgtgaaggtgcagaacatgctgaatgccatggatcttgttagcgtgcaaatctttggcgaatttgcgggtggtggcattcagaaaggcgtcgattacggagacaaagatttctatgtgtttgacatcctgtctgatagcgggaacgagaaagtttactgggatgactatcgcgtcgaatcgttttgcaccacgctcggtctgaaattagcgcctctgctgggacgtggtagtttcgctgaactgtcccagtacccaaacgatttcaaaagcattgtgaaccgttataatgaattggttgatacgacgggcctggagcacgccaataaacacgtctttggtccgcaagcgtcttctgaaactggcgtagcagaaggctacgttcttaaacccgtctatccgatcttctttaataccggtacgcgcgtggcgattaaatgcaagaactccaaattttcggagaaagccaagctggactcgccaattaaggcgaaggtggaactgacggagaacgataaacgtctgctcgaaatctttagcgagtatgttacctggaatcgcgtcagtaacgtactgtcacatattggctcagtgaccgcaaaagattttgggcgtgttatgggtctgacgatgaaagacatcattaatgaagcagcacgcgaaggccatgatctgttgttcgctgataacccgtcggcggtgaagaaagagctgaccattctcatccagaacacgattggctccaaatggcacgaagttctggag

SEQ ID NO: 796 - protein, 346 aa, synthetic construct
  REGION 1..346: note = variant of RNA ligase 2 from Klebsiella phage KP179
MHHHHHHGGSNTFAYYSSLENHYNNKFIEKIRGAGFLMHTVEWVAREKIHGTNFSVIITPTEIVPAKRTGPILEGESFFGHEIIMKKYKDSFVKVQNMLNAMDLVSVQIFGEFAGGGIQKGVDYGDKDFYVFDILSDSGNEKVYWDDYRVESFCTTLGLKLAPLLGRGSFAELSQYPNDFKSIVNRYNELVDTTGLEHANKHVFGPQASSETGVAEGYVLKPVYPIFFNTGTRVAIKCKNSKFSEKAKLDSPIKAKVELTENDKRLLEIFSEYVTWNRVSNVLSHIGSVTAKDFGRVMGLTMKDIINEAAREGHDLLFADNPSAVKKELTILIQNTIGSKWHEVLE

SEQ ID NO: 797 - DNA, 1038 bp, synthetic construct
  misc_feature 1..1038: note = variant of RNA ligase 2 from Klebsiella phage KP179
  source 1..1038: mol_type = other DNA
atgcatcaccatcaccatcacggtggcagcaacacgtttgcgtattattcaagtctggaaaaccattacaataataagttcattgagaagatccgtggtgcaggcttcctgatgcacaccgtggaatgggtagctcgcgagaagattcatggaacgaactttagcgttatcattactccgaccgaaatcgtgccagccaaacgcacagggccgatcttggaaggcgagtcgttctttggtcacgaaattatcatgaaaaaatataaagactccttcgtgaaggtgcagaacatgctggtggttatggatcttgttagcgtgcaaatctttggcgaatttgcgggtggtggcattcagaaaggcgtcgattacggagacaaagatttctatgtgtttgacatcctgtctgatagcgggaacgagaaagtttactgggatgactatcgcgtcgaatcgttttgcaccacgctcggtctgaaattagcgcctctgctgggacgtggtagtttcgctgaactgtcccagtacccaaacgatttcaaaagcattgtgaaccgttataatgaattggttgatacgacgggcctgtggcacgccaataaacacgtctttggtccgcaagcgtcttctgaaactggcgtagcagaaggctacgttcttaaacccgtctatccgatcttctttaataccggtacgcgcgtggcgattaaatgcaagaactccaaattttcggagaaagccaagctggactcgccaattaaggcgaaggtggaactgacggagaacgataaacgtctgctcgaaatctttagcgagtatgttacctggaatcgcgtcagtaacgtactgtcacatattggctcagtgaccgcaaaagattttgggcgtgttatgggtctgacgatgaaagacatcattaatgaagcagcacgcgaaggccatgatctgttgttcgctgataacccgtcggcggtgaagaaagagctgaccattctcatccagaacacgattggctccaaatggcacgaagttctggag

SEQ ID NO: 798 - protein, 346 aa, synthetic construct
  REGION 1..346: note = variant of RNA ligase 2 from Klebsiella phage KP179
MHHHHHHGGSNTFAYYSSLENHYNNKFIEKIRGAGFLMHTVEWVAREKIHGTNFSVIITPTEIVPAKRTGPILEGESFFGHEIIMKKYKDSFVKVQNMLVVMDLVSVQIFGEFAGGGIQKGVDYGDKDFYVFDILSDSGNEKVYWDDYRVESFCTTLGLKLAPLLGRGSFAELSQYPNDFKSIVNRYNELVDTTGLWHANKHVFGPQASSETGVAEGYVLKPVYPIFFNTGTRVAIKCKNSKFSEKAKLDSPIKAKVELTENDKRLLEIFSEYVTWNRVSNVLSHIGSVTAKDFGRVMGLTMKDIINEAAREGHDLLFADNPSAVKKELTILIQNTIGSKWHEVLE

SEQ ID NO: 799 - DNA, 1038 bp, synthetic construct
  misc_feature 1..1038: note = variant of RNA ligase 2 from Klebsiella phage KP179
  source 1..1038: mol_type = other DNA
atgcatcaccatcaccatcacggtggcagcaacacgtttgcgtattattcaagtctggaaaaccattacaataataagttcattgagaagatccgtggtgcaggcttcctgatgcacaccgtggaatgggtagctcgcgagaagattcatggaacgaactttagcgttatcattactccgaccgaaatcgtgccagccaaacgcacagggccgatcttggaaggcgagtcgttctttggtcacgaaattatcatgaaaaaatataaagactccttcgtgaaggtgcagaacatgctggtgtggatggatcttgttagcgtgcaaatctttggcgaatttgcgggtggtggcattcagaaaggcgtcgattacggagacaaagatttctatgtgtttgacatcctgtctgatagcgggaacgagaaagtttactgggatgactatcgcgtcgaatcgttttgcaccacgctcggtctgaaattagcgcctctgctgggacgtggtagtttcgctgaactgtcccagtacccaaacgatttcaaaagcattgtgaaccgttataatgaattggttgatacgacgggcctgtggcacgccaataaacacgtctttggtccgcaagcgtcttctgaaactggcgtagcagaaggctacgttcttaaacccgtctatccgatcttctttaataccggtacgcgcgtggcgattaaatgcaagaactccaaattttcggagaaagccaagctggactcgccaattaaggcgaaggtggaactgacggagaacgataaacgtctgctcgaaatctttagcgagtatgttacctggaatcgcgtcagtaacgtactgtcacatattggctcagtgaccgcaaaagattttgggcgtgttatgggtctgacgatgaaagacatcattaatgaagcagcacgcgaaggccatgatctgttgttcgctgataacccgtcggcggtgaagaaagagctgaccattctcatccagaacacgattggctccaaatggcacgaagttctggag

SEQ ID NO: 800 - protein, 346 aa, synthetic construct
  REGION 1..346: note = variant of RNA ligase 2 from Klebsiella phage KP179
MHHHHHHGGSNTFAYYSSLENHYNNKFIEKIRGAGFLMHTVEWVAREKIHGTNFSVIITPTEIVPAKRTGPILEGESFFGHEIIMKKYKDSFVKVQNMLVWMDLVSVQIFGEFAGGGIQKGVDYGDKDFYVFDILSDSGNEKVYWDDYRVESFCTTLGLKLAPLLGRGSFAELSQYPNDFKSIVNRYNELVDTTGLWHANKHVFGPQASSETGVAEGYVLKPVYPIFFNTGTRVAIKCKNSKFSEKAKLDSPIKAKVELTENDKRLLEIFSEYVTWNRVSNVLSHIGSVTAKDFGRVMGLTMKDIINEAAREGHDLLFADNPSAVKKELTILIQNTIGSKWHEVLE

SEQ ID NO: 801 - DNA, 1038 bp, synthetic construct
  misc_feature 1..1038: note = variant of RNA ligase 2 from Klebsiella phage KP179
  source 1..1038: mol_type = other DNA
atgcatcaccatcaccatcacggtggcagcaacacgtttgcgtattattcaagtctggaaaaccattacaataataagttcattgagaagatccgtggtgcaggcttcctgatgcacaccgtggaatgggtagctcgcgagaagattcatggaacgaactttagcgttatcattactccgaccgaaatctggccagccaaacgcacagggccgatcttggaaggcgagtcgttctttggtcacgaaattatcatgaaaaaatataaagactccttcgtgaaggtgcagaacatgctggtggctatggatcttgttagcgtgcaaatctttggcgaatttgcgggtggtggcattcagaaaggcgtcgattacggagacaaagatttctatgtgtttgacatcctgtctgatagcgggaacgagaaagtttactgggatgactatcgcgtcgaatcgttttgcaccacgctcggtctgaaattagcgcctctgctgggacgtggtagtttcgctgaactgtcccagtacccaaacgatttcaaaagcattgtgaaccgttataatgaattggttgatacgacgggcctgtggatggccaataaacacgtctttggtccgcaagcgtcttctgaaactggcgtagcagaaggctacgttcttaaacccgtctatccgatcttctttaataccggtacgcgcgtggcgattaaatgcaagaactccaaattttcggagaaagccaagctggactcgccaattaaggcgaaggtggaactgacggagaacgataaacgtctgctcgaaatctttagcgagtatgttacctggaatcgcgtcagtaacgtactgtcacatattggctcagtgaccgcaaaagattttgggcgtgttatgggtctgacgatgaaagacatcattaatgaagcagcacgcgaaggccatgatctgttgttcgctgataacccgtcggcggtgaagaaagagctgaccattctcatccagaacacgattggctccaaatggcacgaagttctggag

SEQ ID NO: 802 - protein, 346 aa, synthetic construct
  REGION 1..346: note = variant of RNA ligase 2 from Klebsiella phage KP179
MHHHHHHGGSNTFAYYSSLENHYNNKFIEKIRGAGFLMHTVEWVAREKIHGTNFSVIITPTEIWPAKRTGPILEGESFFGHEIIMKKYKDSFVKVQNMLVAMDLVSVQIFGEFAGGGIQKGVDYGDKDFYVFDILSDSGNEKVYWDDYRVESFCTTLGLKLAPLLGRGSFAELSQYPNDFKSIVNRYNELVDTTGLWMANKHVFGPQASSETGVAEGYVLKPVYPIFFNTGTRVAIKCKNSKFSEKAKLDSPIKAKVELTENDKRLLEIFSEYVTWNRVSNVLSHIGSVTAKDFGRVMGLTMKDIINEAAREGHDLLFADNPSAVKKELTILIQNTIGSKWHEVLE

SEQ ID NO: 803 - DNA, 1038 bp, synthetic construct
  misc_feature 1..1038: note = variant of RNA ligase 2 from Klebsiella phage KP179
  source 1..1038: mol_type = other DNA
atgcatcaccatcaccatcacggtggcagcaacacgtttgcgtattattcaagtctggaaaaccattacaataataagttcattgagaagatccgtggtgcaggcttcctgatgcacaccgtggaatgggtagctcgcgagaagattcatggaacgaactttagcgttatcattactccgaccgaaatcgtcccagccaaacgcacagggccgatcttggaaggcgagtcgttctttggtcacgaaattatcatgaaaaaatataaagactccttcgtgaaggtgcagaacatgctgaatgccatggatcttgttagcgtgcaaatctttggcgaatttgcgggtggtggcattcagaaaggcgtcgattacggagacaaagatttctatgtgtttgacatcctgtctgatagcgggaacgagaaagtttactgggatgactatcgcgtcgaatcgttttgcaccacgctcggtctgaaattagcgcctctgctgggacgtggtagtttcgctgaactgtcccagtacccaaacgatttcaaaagcattgtgaaccgttataatgaattggttgatacgacgggcctggagcatgccaataaacacgtctttggtccgcaagcgtcttctgaaactggcgtagcagaaggctacgttcttaaacccgtctatccgatcttctttaataccggtacgcgcgtggcgattaaatgcaagaactccaaattttcggagaaagccaagctggactcgccaattaaggcgaaggtggaactgacggagaacgataaacgtctgctcgaaatctttagcgagtatgttacctggaatcgcgtcagtaacgtactgtcacatattggctcagtgaccgcaaaagattttgggcgtgttatgggtctgacgatgaaagacatcggtaatgaagcagcacgcgaaggccatgatctgttgttcgctgataacccgtcggcggtgaagaaagagctgaccattctcatccagaacacgattcgttccaaatggcacgaagttctggag

SEQ ID NO: 804 - protein, 346 aa, synthetic construct
  REGION 1..346: note = variant of RNA ligase 2 from Klebsiella phage KP179
MHHHHHHGGSNTFAYYSSLENHYNNKFIEKIRGAGFLMHTVEWVAREKIHGTNFSVIITPTEIVPAKRTGPILEGESFFGHEIIMKKYKDSFVKVQNMLNAMDLVSVQIFGEFAGGGIQKGVDYGDKDFYVFDILSDSGNEKVYWDDYRVESFCTTLGLKLAPLLGRGSFAELSQYPNDFKSIVNRYNELVDTTGLEHANKHVFGPQASSETGVAEGYVLKPVYPIFFNTGTRVAIKCKNSKFSEKAKLDSPIKAKVELTENDKRLLEIFSEYVTWNRVSNVLSHIGSVTAKDFGRVMGLTMKDIGNEAAREGHDLLFADNPSAVKKELTILIQNTIRSKWHEVLE

SEQ ID NO: 805 - DNA, 1038 bp, synthetic construct
  misc_feature 1..1038: note = variant of RNA ligase 2 from Klebsiella phage KP179
  source 1..1038: mol_type = other DNA
atgcatcaccatcaccatcacggtggcagcaacacgtttgcgtattattcaagtctggaaaaccattacaataataagttcattgagaagatccgtggtgcaggcttcctgatgcacaccgtggaatgggtagctcgcgagaagattcatggaacgaactttagcgttatcattactccgaccgaaatctggccagccaaacgcacagggccgatcttggaaggcgagtcgttctttggtcacgaaattatcatgaaaaaatataaagactccttcgtgaaggtgcagaacatgctgaatgccatggatcttgttagcgtgcaaatctttggcgaatttgcgggtggtggcattcagaaaggcgtcgattacggagacaaagatttctatgtgtttgacatcctgtctgatagcgggaacgagaaagtttactgggatgactatcgcgtcgaatcgttttgcaccacgctcggtctgaaattagcgcctctgctgggacgtggtagtttcgctgaactgtcccagtacccaaacgatttcaaaagcattgtgaaccgttataatgaattggttgatacgacgggcctggagcacgccaataaacacgtctttggtccgcaagcgtcttctgaaactggcgtagcagaaggctacgttcttaaacccgtctatccgatcttctttaataccggtacgcgcgtggcgattaaatgcaagaactccaaattttcggagaaagccaagctggactcgccaattaaggcgaaggtggaactgacggagaacgataaacgtctgctcgaaatctttagcgagtatgttacctggaatcgcgtcagtaacgtactgtcacatattggctcagtgaccgcaaaagattttgggcgtgttatgggtctgacgatgaaagacatcattaatgaagcagcacgcgaaggccatgatctgttgttcgctgataacccgtcggcggtgaagaaagagctgaccattctcatccagaacacgattggctccaaatggcacgaagttctggag

SEQ ID NO: 806 - protein, 346 aa, synthetic construct
  REGION 1..346: note = variant of RNA ligase 2 from Klebsiella phage KP179
MHHHHHHGGSNTFAYYSSLENHYNNKFIEKIRGAGFLMHTVEWVAREKIHGTNFSVIITPTEIWPAKRTGPILEGESFFGHEIIMKKYKDSFVKVQNMLNAMDLVSVQIFGEFAGGGIQKGVDYGDKDFYVFDILSDSGNEKVYWDDYRVESFCTTLGLKLAPLLGRGSFAELSQYPNDFKSIVNRYNELVDTTGLEHANKHVFGPQASSETGVAEGYVLKPVYPIFFNTGTRVAIKCKNSKFSEKAKLDSPIKAKVELTENDKRLLEIFSEYVTWNRVSNVLSHIGSVTAKDFGRVMGLTMKDIINEAAREGHDLLFADNPSAVKKELTILIQNTIGSKWHEVLE

SEQ ID NO: 807 - DNA, 1038 bp, synthetic construct
  misc_feature 1..1038: note = variant of RNA ligase 2 from Klebsiella phage KP179
  source 1..1038: mol_type = other DNA
atgcatcaccatcaccatcacggtggcagcaacacgtttgcgtattattcaagtctggaaaaccattacaataataagttcattgagaagatccgtggtgcaggcttcctgatgcacaccgtggaatgggtagctcgcgagaagattcatggaacgaactttagcgttatcattactccgaccgaaatctggccagccaaacgcacagggccgatcttggaaggcgagtcgttctttggtcacgaaattatcatgaaaaaatataaagactccttcgtgaaggtgcagaacatgctggtggttatggatcttgttagcgtgcaaatctttggcgaatttgcgggtggtggcattcagaaaggcgtcgattacggagacaaagatttctatgtgtttgacatcctgtctgatagcgggaacgagaaagtttactgggatgactatcgcgtcgaatcgttttgcaccacgctcggtctgaaattagcgcctctgctgggacgtggtagtttcgctgaactgtcccagtacccaaacgatttcaaaagcattgtgaaccgttataatgaattggttgatacgacgggcctgtggcacgccaataaacacgtctttggtccgcaagcgtcttctgaaactggcgtagcagaaggctacgttcttaaacccgtctatccgatcttctttaataccggtacgcgcgtggcgattaaatgcaagaactccaaattttcggagaaagccaagctggactcgccaattaaggcgaaggtggaactgacggagaacgataaacgtctgctcgaaatctttagcgagtatgttacctggaatcgcgtcagtaacgtactgtcacatattggctcagtgaccgcaaaagattttgggcgtgttatgggtctgacgatgaaagacatcattaatgaagcagcacgcgaaggccatgatctgttgttcgctgataacccgtcggcggtgaagaaagagctgaccattctcatccagaacacgattcgctccaaatggcacgaagttctggag

SEQ ID NO: 808 - protein, 346 aa, synthetic construct
  REGION 1..346: note = variant of RNA ligase 2 from Klebsiella phage KP179
MHHHHHHGGSNTFAYYSSLENHYNNKFIEKIRGAGFLMHTVEWVAREKIHGTNFSVIITPTEIWPAKRTGPILEGESFFGHEIIMKKYKDSFVKVQNMLVVMDLVSVQIFGEFAGGGIQKGVDYGDKDFYVFDILSDSGNEKVYWDDYRVESFCTTLGLKLAPLLGRGSFAELSQYPNDFKSIVNRYNELVDTTGLWHANKHVFGPQASSETGVAEGYVLKPVYPIFFNTGTRVAIKCKNSKFSEKAKLDSPIKAKVELTENDKRLLEIFSEYVTWNRVSNVLSHIGSVTAKDFGRVMGLTMKDIINEAAREGHDLLFADNPSAVKKELTILIQNTIRSKWHEVLE

SEQ ID NO: 809 - DNA, 1038 bp, synthetic construct
  misc_feature 1..1038: note = variant of RNA ligase 2 from Klebsiella phage KP179
  source 1..1038: mol_type = other DNA
atgcatcaccatcaccatcacggtggcagcaacacgtttgcgtattattcaagtctggaaaaccattacaataataagttcattgagaagatccgtggtgcaggcttcctgatgcacaccgtggaatgggtagctcgcgagaagattcatggaacgaactttagcgttatcattactccgaccgaaatctggccagccaaacgcacagggccgatcttggaaggcgagtcgttctttggtcacgaaattatcatgaaaaaatataaagactccttcgtgaaggtgcagaacatgctgaatgccatggatcttgttagcgtgcaaatctttggcgaatttgcgggtggtggcattcagaaaggcgtcgattacggagacaaagatttctatgtgtttgacatcctgtctgatagcgggaacgagaaagtttactgggatgactatcgcgtcgaatcgttttgcaccacgctcggtctgaaattagcgcctctgctgggacgtggtagtttcgctgaactgtcccagtacccaaacgatttcaaaagcattgtgaaccgttataatgaattggttgatacgacgggcctgtggatggccaataaacacgtctttggtccgcaagcgtcttctgaaactggcgtagcagaaggctacgttcttaaacccgtctatccgatcttctttaataccggtacgcgcgtggcgattaaatgcaagaactccaaattttcggagaaagccaagctggactcgccaattaaggcgaaggtggaactgacggagaacgataaacgtctgctcgaaatctttagcgagtatgttacctggaatcgcgtcagtaacgtactgtcacatattggctcagtgaccgcaaaagattttgggcgtgttatgggtctgacgatgaaagacatcattaatgaagcagcacgcgaaggccatgatctgttgttcgctgataacccgtcggcggtgaagaaagagctgaccattctcatccagaacacgattctgtccaaatggcacgaagttctggag

SEQ ID NO: 810 - protein, 346 aa, synthetic construct
  REGION 1..346: note = variant of RNA ligase 2 from Klebsiella phage KP179
MHHHHHHGGSNTFAYYSSLENHYNNKFIEKIRGAGFLMHTVEWVAREKIHGTNFSVIITPTEIWPAKRTGPILEGESFFGHEIIMKKYKDSFVKVQNMLNAMDLVSVQIFGEFAGGGIQKGVDYGDKDFYVFDILSDSGNEKVYWDDYRVESFCTTLGLKLAPLLGRGSFAELSQYPNDFKSIVNRYNELVDTTGLWMANKHVFGPQASSETGVAEGYVLKPVYPIFFNTGTRVAIKCKNSKFSEKAKLDSPIKAKVELTENDKRLLEIFSEYVTWNRVSNVLSHIGSVTAKDFGRVMGLTMKDIINEAAREGHDLLFADNPSAVKKELTILIQNTILSKWHEVLE

SEQ ID NO: 811 - DNA, 1038 bp, synthetic construct
  misc_feature 1..1038: note = variant of RNA ligase 2 from Klebsiella phage KP179
  source 1..1038: mol_type = other DNA
atgcatcaccatcaccatcacggtggcagcaacacgtttgcgtattattcaagtctggaaaaccattacaataataagttcattgagaagatccgtggtgcaggcttcctgatgcacaccgtggaatgggtagctcgcgagaagattcatggaacgaactttagcgttatcattactccgaccgaaatcgtcccagccaaacgcacagggccgatcttggaaggcgagtcgttctttggtcacgaaattatcatgaaaaaatataaagactccttcgtgaaggtgcagaacatgctgaacgttatggatcttgttagcgtgcaaatctttggcgaatttgcgggtggtggcattcagaaaggcgtcgattacggagacaaagatttctatgtgtttgacatcctgtctgatagcgggaacgagaaagtttactgggatgactatcgcgtcgaatcgttttgcaccacgctcggtctgaaattagcgcctctgctgggacgtggtagtttcgctgaactgtcccagtacccaaacgatttcaaaagcattgtgaaccgttataatgaattggttgatacgacgggcctggaacatgccaataaacacgtctttggtccgcaagcgtcttctgaaactggcgtagcagaaggctacgttcttaaacccgtctatccgatcttctttaataccggtacgcgcgtggcgattaaatgcaagaactccaaattttcggagaaagccaagctggactcgccaattaaggcgaaggtggaactgacggagaacgataaacgtctgctcgaaatctttagcgagtatgttacctggaatcgcgtcagtaacgtactgtcacatattggctcagtgaccgcaaaagattttgggcgtgttatgggtctgacgatgaaagacatcattaatgaagcagcacgcgaaggccatgatctgttgttcgctgataacccgtcggcggtgaaaggcgagctgaccattctcatccagaacacgattcgttccaaatggcacgaagttctggag

SEQ ID NO: 812 - protein, 346 aa, synthetic construct
  REGION 1..346: note = variant of RNA ligase 2 from Klebsiella phage KP179
MHHHHHHGGSNTFAYYSSLENHYNNKFIEKIRGAGFLMHTVEWVAREKIHGTNFSVIITPTEIVPAKRTGPILEGESFFGHEIIMKKYKDSFVKVQNMLNVMDLVSVQIFGEFAGGGIQKGVDYGDKDFYVFDILSDSGNEKVYWDDYRVESFCTTLGLKLAPLLGRGSFAELSQYPNDFKSIVNRYNELVDTTGLEHANKHVFGPQASSETGVAEGYVLKPVYPIFFNTGTRVAIKCKNSKFSEKAKLDSPIKAKVELTENDKRLLEIFSEYVTWNRVSNVLSHIGSVTAKDFGRVMGLTMKDIINEAAREGHDLLFADNPSAVKGELTILIQNTIRSKWHEVLE

SEQ ID NO: 813 - DNA, 1038 bp, synthetic construct
  misc_feature 1..1038: note = variant of RNA ligase 2 from Klebsiella phage KP179
  source 1..1038: mol_type = other DNA
atgcatcaccatcaccatcacggtggcagcaacacgtttgcgtattattcaagtctggaaaaccattacaataataagttcattgagaagatccgtggtgcaggcttcctgatgcacaccgtggaatgggtagctcgcgagaagattcatggaacgaactttagcgttatcattactccgaccgaaatcgtcccagccaaacgcacagggccgatcttggaaggcgagtcgttctttggtcacgaaattatcatgaaaaaatataaagactccttcgtgaaggtgcagaacatgctgaacgttatggatcttgttagcgtgcaaatctttggcgaatttgcgggtggtggcattcagaaaggcgtcgattacggagacaaagatttctatgtgtttgacatcctgtctgatagcgggaacgggaaagtttactgggatgactatcgcgtcgaatcgttttgcaccacgctcggtctgaaattagcgcctctgctgggacgtggtagtttcgctgaactgtcccagtacccaaacgatttcaaaagcattgtgaaccgttataatgaattggttgatacgacgggcctggagcatgccaataaacacgtctttggtccgcaagcgtcttctgaaactggcgtagcagaaggctacgttcttaaacccgtctatccgatcttctttaataccggtacgcgcgtggcgattaaatgcaagaactccaaattttcggagaaagccaagctggactcgccaattaaggcgaaggtggaactgacggagaacgataaacgtctgctcgaaatctttagcgagtatgttacctggaatcgcgtcagtaacgtactgtcacatattggctcagtgaccgcaaaagattttgggcgtgttatgggtctgacgatgaaagacatcatcaatgaagcagcacgcgaaggccatgatctgttgttcgctgataacccgtcggcggtgtgtagcgagctgaccattctcatccagaacacgattcgttccaaatggcacgaagttctggag

SEQ ID NO: 814 - protein, 346 aa, synthetic construct
  REGION 1..346: note = variant of RNA ligase 2 from Klebsiella phage KP179
MHHHHHHGGSNTFAYYSSLENHYNNKFIEKIRGAGFLMHTVEWVAREKIHGTNFSVIITPTEIVPAKRTGPILEGESFFGHEIIMKKYKDSFVKVQNMLNVMDLVSVQIFGEFAGGGIQKGVDYGDKDFYVFDILSDSGNGKVYWDDYRVESFCTTLGLKLAPLLGRGSFAELSQYPNDFKSIVNRYNELVDTTGLEHANKHVFGPQASSETGVAEGYVLKPVYPIFFNTGTRVAIKCKNSKFSEKAKLDSPIKAKVELTENDKRLLEIFSEYVTWNRVSNVLSHIGSVTAKDFGRVMGLTMKDIINEAAREGHDLLFADNPSAVCSELTILIQNTIRSKWHEVLE

SEQ ID NO: 815 - DNA, 1038 bp, synthetic construct
  misc_feature 1..1038: note = variant of RNA ligase 2 from Klebsiella phage KP179
  source 1..1038: mol_type = other DNA
atgcatcaccatcaccatcacggtggcagcaacacgtttgcgtattattcaagtctggaaaaccattacaataataagttcattgagaagatccgtggtgcaggcttcctgatgcacaccgtggaatgggtagctcgcgagaagattcatggaacgaactttagcgttatcattactccgaccgaaatctggccagccaaacgcacagggccgatcttggaaggcgagtcgttctttggtcacgaaattatcatgaaaaaatataaagactccttcgtgaaggtgcagaacatgctgaactggatggatcttgttagcgtgcaaatctttggcgaatttgcgggtggtggcattcagaaaggcgtcgattacggagacaaagatttctatgtgtttgacatcctgtctgatagcgggaacgagaaagtttactgggatgactatcgcgtcgaatcgttttgcaccacgctcggtctgaaattagcgcctctgctgggacgtggtagtttcgctgaactgtcccagtacccaaacgatttcaaaagcattgtgaaccgttataatgaattggttgatacgacgggcctgtggcacgccaataaacacgtctttggtccgcaagcgtcttctgaaactggcgtagcagaaggctacgttcttaaacccgtctatccgatcttctttaataccggtacgcgcgtggcgattaaatgcaagaactccaaattttcggagaaagccaagctggactcgccaattaaggcgaaggtggaactgacggagaacgataaacgtctgctcgaaatctttagcgagtatgttacctggaatcgcgtcagtaacgtactgtcacatattggctcagtgaccgcaaaagattttgggcgtgttatgggtctgacgatgaaagacatcattaatgaagcagcacgcgaaggccatgatctgttgttcgctgataacccgtcggcggtgaagaaagagctgaccattctcatccagaacacgattctgtccaaatggcacgaagttctggag

SEQ ID NO: 816 - protein, 346 aa, synthetic construct
  REGION 1..346: note = variant of RNA ligase 2 from Klebsiella phage KP179
MHHHHHHGGSNTFAYYSSLENHYNNKFIEKIRGAGFLMHTVEWVAREKIHGTNFSVIITPTEIWPAKRTGPILEGESFFGHEIIMKKYKDSFVKVQNMLNWMDLVSVQIFGEFAGGGIQKGVDYGDKDFYVFDILSDSGNEKVYWDDYRVESFCTTLGLKLAPLLGRGSFAELSQYPNDFKSIVNRYNELVDTTGLWHANKHVFGPQASSETGVAEGYVLKPVYPIFFNTGTRVAIKCKNSKFSEKAKLDSPIKAKVELTENDKRLLEIFSEYVTWNRVSNVLSHIGSVTAKDFGRVMGLTMKDIINEAAREGHDLLFADNPSAVKKELTILIQNTILSKWHEVLE

SEQ ID NO: 817 - DNA, 1038 bp, synthetic construct
  misc_feature 1..1038: note = variant of RNA ligase 2 from Klebsiella phage KP179
  source 1..1038: mol_type = other DNA
atgcatcaccatcaccatcacggtggcagcaacacgtttgcgtattattcaagtctggaaaaccattacaataataagttcattgagaagatccgtggtgcaggcttcctgatgcacaccgtggaatgggtagctcgcgagaagattcatggaacgaactttagcgttatcattactccgaccgaaatcgtcccagccaaacgcacagggccgatcttggaaggcgagtcgttctttggtcacgaaattatcatgaaaaaatataaagactccttcgtgaaggtgcagaacatgctgaactggatggatcttgttagcgtgcaaatctttggcgaatttgcgggtggtggcattcagaaaggcgtcgattacggagacaaagatttctatgtgtttgacatcctgtctgatagcgggaacgagaaagtttactgggatgactatcgcgtcgaatcgttttgcaccacgctcggtctgaaattagcgcctctgctgggacgtggtagtttcgctgaactgtcccagtacccaaacgatttcaaaagcattgtgaaccgttataatgaattggttgatacgacgggcctggagcacgccaataaacacgtctttggtccgcaagcgtcttctgaaactggcgtagcagaaggctacgttcttaaacccgtctatccgatcttctttaataccggtacgcgcgtggcgattaaatgcaagaactccaaattttcggagaaagccaagctggactcgccaattaaggcgaaggtggaactgacggagaacgataaacgtctgctcgaaatctttagcgagtatgttacctggaatcgcgtcagtaacgtactgtcacatattggctcagtgaccgcaaaagattttgggcgtgttatgggtctgacgatgaaagacatcattaatgaagcagcacgcgaaggccatgatctgttgttcgctgataacccgtcggcggtgaagaaagagctgaccattctcatccagaacacgattggctccaaatggcacgaagttctggag

SEQ ID NO: 818 - protein, 346 aa, synthetic construct
  REGION 1..346: note = variant of RNA ligase 2 from Klebsiella phage KP179
MHHHHHHGGSNTFAYYSSLENHYNNKFIEKIRGAGFLMHTVEWVAREKIHGTNFSVIITPTEIVPAKRTGPILEGESFFGHEIIMKKYKDSFVKVQNMLNWMDLVSVQIFGEFAGGGIQKGVDYGDKDFYVFDILSDSGNEKVYWDDYRVESFCTTLGLKLAPLLGRGSFAELSQYPNDFKSIVNRYNELVDTTGLEHANKHVFGPQASSETGVAEGYVLKPVYPIFFNTGTRVAIKCKNSKFSEKAKLDSPIKAKVELTENDKRLLEIFSEYVTWNRVSNVLSHIGSVTAKDFGRVMGLTMKDIINEAAREGHDLLFADNPSAVKKELTILIQNTIGSKWHEVLE

SEQ ID NO: 819 - DNA, 1038 bp, synthetic construct
  misc_feature 1..1038: note = variant of RNA ligase 2 from Klebsiella phage KP179
  source 1..1038: mol_type = other DNA
atgcatcaccatcaccatcacggtggcagcaacacgtttgcgtattattcaagtctggaaaaccattacaataataagttcattgagaagatccgtggtgcaggcttcctgatgcacaccgtggaatgggtagctcgcgagaagattcatggaacgaactttagcgttatcattactccgaccgaaatcgtcccagccaaacgcacagggccgatcttggaaggcgagtcgttctttggtcacgaaattatcatgaaaaaatataaagactccttcgtgaaggtgcagaacatgctgaacgttatggatcttgttagcgtgcaaatctttggcgaatttgcgggtggtggcattcagaaaggcgtcgattacggagacaaagatttctatgtgtttgacatcctgtctgatagcgggaacgagaaagtttactgggatgactatcgcgtcgaatcgttttgcaccacgctcggtctgaaattagcgcctctgctgggacgtggtagtttcgctgaactgtcccagtacccaaacgatttcaaaagcattgtgaaccgttataatgaattggttgatacgacgggcctggagatggccaataaacacgtctttggtccgcaagcgtcttctgaaactggcgtagcagaaggctacgttcttaaacccgtctatccgatcttctttaataccggtacgcgcgtggcgattaaatgcaagaactccaaattttcggagaaagccaagctggactcgccaattaaggcgaaggtggaactgacggagaacgataaacgtctgctcgaaatctttagcgagtatgttacctggaatcgcgtcagtaacgtactgtcacatattggctcagtgaccgcaaaagattttgggcgtgttatgggtctgacgatgaaagacatcggtaatgaagcagcacgcgaaggccatgatctgttgttcgctgataacccgtcggcggtgaaaagcgagctgaccattctcatccagaacacgattcgttccaaatggcacgaagttctggag

SEQ ID NO: 820 - protein, 346 aa, synthetic construct
  REGION 1..346: note = variant of RNA ligase 2 from Klebsiella phage KP179
MHHHHHHGGSNTFAYYSSLENHYNNKFIEKIRGAGFLMHTVEWVAREKIHGTNFSVIITPTEIVPAKRTGPILEGESFFGHEIIMKKYKDSFVKVQNMLNVMDLVSVQIFGEFAGGGIQKGVDYGDKDFYVFDILSDSGNEKVYWDDYRVESFCTTLGLKLAPLLGRGSFAELSQYPNDFKSIVNRYNELVDTTGLEMANKHVFGPQASSETGVAEGYVLKPVYPIFFNTGTRVAIKCKNSKFSEKAKLDSPIKAKVELTENDKRLLEIFSEYVTWNRVSNVLSHIGSVTAKDFGRVMGLTMKDIGNEAAREGHDLLFADNPSAVKSELTILIQNTIRSKWHEVLE

SEQ ID NO: 821 - DNA, 1038 bp, synthetic construct
  misc_feature 1..1038: note = variant of RNA ligase 2 from Klebsiella phage KP179
  source 1..1038: mol_type = other DNA
atgcatcaccatcaccatcacggtggcagcaacacgtttgcgtattattcaagtctggaaaaccattacaataataagttcattgagaagatccgtggtgcaggcttcctgatgcacaccgtggaatgggtagctcgcgagaagattcatggaacgaactttagcgttatcattactccgaccgaaatcgtcccagccaaacgcacagggccgatcttggaaggcgagtcgttctttggtcacgaaattatcatgaaaaaatataaagactccttcgtgaaggtgcagaacatgctgaatgccatggatcttgttagcgtgcaaatctttggcgaatttgcgggtggtggcattcagaaaggcgtcgattacggagacaaagatttctatgtgtttgacatcctgtctgatagcgggaacgagaaagtttactgggatgactatcgcgtcgaatcgttttgcaccacgctcggtctgaaattagcgcctctgctgggacgtggtagtttcgctgaactgtcccagtacccaaacgatttcaaaagcattgtgaaccgttataatgaattggttgacacggtcggcctggagatggccaataaacacgtctttggtccgcaagcgtcttctgaaactggcgtagcagaaggctacgttcttaaacccgtctatccgatcttctttaataccggtacgcgcgtggcgattaaatgcaagaactccaaattttcggagaaagccaagctggactcgccaattaaggcgaaggtggaactgacggagaacgataaacgtctgctcgaaatctttagcgagtatgttacctggaatcgcgtcagtaacgtactgtcacatattggctcagtgaccgcaaaagattttgggcgtgttatgggtctgacgatgaaagacatcattaatgaagcagcacgcgaaggccatgatctgttgttcgctgataacccgtcggcggtgctgaaggagctggattggctcatccagaacacgattcgttccaaatggcacgaagttctggag

SEQ ID NO: 822 - protein, 346 aa, synthetic construct
  REGION 1..346: note = variant of RNA ligase 2 from Klebsiella phage KP179
MHHHHHHGGSNTFAYYSSLENHYNNKFIEKIRGAGFLMHTVEWVAREKIHGTNFSVIITPTEIVPAKRTGPILEGESFFGHEIIMKKYKDSFVKVQNMLNAMDLVSVQIFGEFAGGGIQKGVDYGDKDFYVFDILSDSGNEKVYWDDYRVESFCTTLGLKLAPLLGRGSFAELSQYPNDFKSIVNRYNELVDTVGLEMANKHVFGPQASSETGVAEGYVLKPVYPIFFNTGTRVAIKCKNSKFSEKAKLDSPIKAKVELTENDKRLLEIFSEYVTWNRVSNVLSHIGSVTAKDFGRVMGLTMKDIINEAAREGHDLLFADNPSAVLKELDWLIQNTIRSKWHEVLE

SEQ ID NO: 823 - DNA, 1038 bp, synthetic construct
  misc_feature 1..1038: note = variant of RNA ligase 2 from Klebsiella phage KP179
  source 1..1038: mol_type = other DNA
atgcatcaccatcaccatcacggtggcagcaacacgtttgcgtattattcaagtctggaaaaccattacaataataagttcattgagaagatccgtggtgcaggcttcctgatgcacaccgtggaatgggtagctcgcgagaagattcatggaacgaactttagcgttatcattactccgaccgaaatcgtcccagccaaacgcacagggccgatcttggaaggcgagtcgttctttggtcacgaaattatcatgaaaaaatataaagactccttcgtgaaggtgcagaacatgctgaatgccatggatcttgttagcgtgcaaatctttggcgaatttgcgggtggtggcattcagaaaggcgtcgattacggagacaaagatttctatgtgtttgacatcctgtctgatagcgggaacgagaaagtttactgggatgactatcgcgtcgaatcgttttgcaccacgctcggtctgaaattagcgcctctgctgggacgtggtagtttcgctgaactgtcccagtacccaaacgatttcaaaagcattgtgaaccgttataatgaattggttgatacgacgggcctggagatggccaataaacacgtctttggtccgcaagcgtcttctgaaactggcgtagcagaaggctacgttcttaaacccgtctatccgatcttctttaataccggtacgcgcgtggcgattaaatgcaagaactccaaattttcggagaaagccaagctggactcgccaattaaggcgaaggtggaactgacggagaacgataaacgtctgctcgaaatctttagcgagtatgttacctggaatcgcgtcagtaacgtactgtcacatattggctcagtgaccgcaaaagattttgggcgtgtttcgggtctgacgatgaaagacatcattaatgaagcagcacgcgaaggccatgatctgttgttcgctgataacccgtcggcggtgctgaaggagctgaccattctcatccagaacacgattcgttccaaatggcacgaagttctggag

SEQ ID NO: 824 - protein, 346 aa, synthetic construct
  REGION 1..346: note = variant of RNA ligase 2 from Klebsiella phage KP179
MHHHHHHGGSNTFAYYSSLENHYNNKFIEKIRGAGFLMHTVEWVAREKIHGTNFSVIITPTEIVPAKRTGPILEGESFFGHEIIMKKYKDSFVKVQNMLNAMDLVSVQIFGEFAGGGIQKGVDYGDKDFYVFDILSDSGNEKVYWDDYRVESFCTTLGLKLAPLLGRGSFAELSQYPNDFKSIVNRYNELVDTTGLEMANKHVFGPQASSETGVAEGYVLKPVYPIFFNTGTRVAIKCKNSKFSEKAKLDSPIKAKVELTENDKRLLEIFSEYVTWNRVSNVLSHIGSVTAKDFGRVSGLTMKDIINEAAREGHDLLFADNPSAVLKELTILIQNTIRSKWHEVLE

SEQ ID NO: 825 - DNA, 1038 bp, synthetic construct
  misc_feature 1..1038: note = variant of RNA ligase 2 from Klebsiella phage KP179
  source 1..1038: mol_type = other DNA
atgcatcaccatcaccatcacggtggcagcaacacgtttgcgtattattcaagtctggaaaaccattacaataataagttcattgagaagatccgtggtgcaggcttcctgatgcacaccgtggaatgggtagctcgcgagaagattcatggaacgaactttagcgttatcattactccgaccgaaatcgtcccagccaaacgcacagggccgatcttggaaggcgagtcgttctttggtcacgaaattatcatgaaaaaatataaagactccttcgtgaaggtgcagaacatgctgaatgccatggatcttgttagcgtgcaaatctttggcgaatttgcgggtggtggcattcagaaaggcgtcgattacggagacaaagatttctatgtgtttgacatcctgtctgatagcgggaacgagaaagtttactgggatgactatcgcgtcgaatcgttttgcaccacgctcggtctgaaattagcgcctctgctgggacgtggtagtttcgctgaactgtcccagtacccaaacgatttcaaaagcattgtgaaccgttataatgaattggttgatacgacgggcctggagatggccaataaacacgtctttggtccgcaagcgtcttctgaaactggcgtagcagaaggctacgttcttaaacccgtctatccgatcttctttaataccggtacgcgcgtggcgattaaatgcaagaactccaaattttcggagaaagccaagctggactcgccaattaaggcgaaggtggaactgacggagaacgataaacgtctgctcgaaatctttagcgagtatgttacctggaatcgcgtcagtaacgtactgtcacatattggctcagtgaccgcaaaagattttgggcgtgttatgggtctgacgatgaaagacatcattaatgaagcagcacgcgaaggccatgatctgttgttcgctgataacccgtcggcggtgctgaaggagctgacttggctcatccagaacacgattcgttccaaatggcacgaagttctggag

SEQ ID NO: 826 - protein, 346 aa, synthetic construct
  REGION 1..346: note = variant of RNA ligase 2 from Klebsiella phage KP179
MHHHHHHGGSNTFAYYSSLENHYNNKFIEKIRGAGFLMHTVEWVAREKIHGTNFSVIITPTEIVPAKRTGPILEGESFFGHEIIMKKYKDSFVKVQNMLNAMDLVSVQIFGEFAGGGIQKGVDYGDKDFYVFDILSDSGNEKVYWDDYRVESFCTTLGLKLAPLLGRGSFAELSQYPNDFKSIVNRYNELVDTTGLEMANKHVFGPQASSETGVAEGYVLKPVYPIFFNTGTRVAIKCKNSKFSEKAKLDSPIKAKVELTENDKRLLEIFSEYVTWNRVSNVLSHIGSVTAKDFGRVMGLTMKDIINEAAREGHDLLFADNPSAVLKELTWLIQNTIRSKWHEVLE

SEQ ID NO: 827 - DNA, 1038 bp, synthetic construct
  misc_feature 1..1038: note = variant of RNA ligase 2 from Klebsiella phage KP179
  source 1..1038: mol_type = other DNA
atgcatcaccatcaccatcacggtggcagcaacacgtttgcgtattattcaagtctggaaaaccattacaataataagttcattgagaagatccgtggtgcaggcttcctgatgcacaccgtggaatgggtagctcgcgagaagattcatggaacgaactttagcgttatcattactccgaccgaaatcgtcccagccaaacgcacagggccgatcttggaaggcgagtcgttctttggtcacgaaattatcatgaaaaaatataaagactccttcgtgaaggtgcagaacatgctgaatgccatggatcttgttagcgtgcaaatctttggcgaatttgcgggtggtggcattcagaaaggcgtcgattacggagacaaagatttctatgtgtttgacatcctgtctgatagcgggaacgagaaagtttactgggatgactatcgcgtcgaatcgttttgcaccacgctcggtctgaaattagcgcctctgctgggacgtggtagtttcgctgaactgtcccagtacccaaacgatttcaaaagcattgtgaaccgttataatgaattggttctgaaggtcggcctggagatggccaataaacacgtctttggtccgcaagcgtcttctgaaactggcgtagcagaaggctacgttcttaaacccgtctatccgatcttctttaataccggtacgcgcgtggcgattaaatgcaagaactccaaattttcggagaaagccaagctggactcgccaattaaggcgaaggtggaactgacggagaacgataaacgtctgctcgaaatctttagcgagtatgttacctggaatcgcgtcagtaacgtactgtcacatattggctcagtgaccgcaaaagattttgggcgtgtttcgggtctgacgatgaaagacatcattaatgaagcagcacgcgaaggccatgatctgttgttcgctgataacccgtcggcggtgctgaaggagctgactattctcatccagaacacgattcgttccaaatggcacgaagttctggag

SEQ ID NO: 828 - protein, 346 aa, synthetic construct
  REGION 1..346: note = variant of RNA ligase 2 from Klebsiella phage KP179
MHHHHHHGGSNTFAYYSSLENHYNNKFIEKIRGAGFLMHTVEWVAREKIHGTNFSVIITPTEIVPAKRTGPILEGESFFGHEIIMKKYKDSFVKVQNMLNAMDLVSVQIFGEFAGGGIQKGVDYGDKDFYVFDILSDSGNEKVYWDDYRVESFCTTLGLKLAPLLGRGSFAELSQYPNDFKSIVNRYNELVLKVGLEMANKHVFGPQASSETGVAEGYVLKPVYPIFFNTGTRVAIKCKNSKFSEKAKLDSPIKAKVELTENDKRLLEIFSEYVTWNRVSNVLSHIGSVTAKDFGRVSGLTMKDIINEAAREGHDLLFADNPSAVLKELTILIQNTIRSKWHEVLE

SEQ ID NO: 829 - DNA, 1038 bp, synthetic construct
  misc_feature 1..1038: note = variant of RNA ligase 2 from Klebsiella phage KP179
  source 1..1038: mol_type = other DNA
atgcatcaccatcaccatcacggtggcagcaacacgtttgcgtattattcaagtctggaaaaccattacaataataagttcattgagaagatccgtggtgcaggcttcctgatgcacaccgtggaatgggtagctcgcgagaagattcatggaacgaactttagcgttatcattactccgaccgaaatcgtcccagccaaacgcacagggccgatcttggaaggcgagtcgttctttggtcacgaaattatcatgaaaaaatataaagactccttcgtgaaggtgcagaacatgctgaatgccatggatcttgttagcgtgcaaatctttggcgaatttgcgggtggtggcattcagaaaggcgtcgattacggagacaaagatttctatgtgtttgacatcctgtctgatagcgggaacgagaaagtttactgggatgactatcgcgtcgaatcgttttgcaccacgctcggtctgaaattagcgcctctgctgggacgtggtagtttcgctgaactgtcccagtacccaaacgatttcaaaagcattgtgaaccgttataatgaattggttgacacgacgggcctggagatggccaataaacacgtctttggtccgcaagcgtcttctgaaactggcgtagcagaaggctacgttcttaaacccgtctatccgatcttctttaataccggtacgcgcgtggcgattaaatgcaagaactccaaattttcggagaaagccaagctggactcgccaattaaggcgaaggtggaactgacggagaacgataaacgtctgctcgaaatctttagcgagtatgttacctggaatcgcgtcagtaacgtactgtcacatattggctcagtgaccgcaaaagattttgggcgtgttatgggtctgacgatgaaagacatcattaatgaagcagcacgcgaaggccatgatctgttgttcgctgataacccgtcggcggtgctgaaggagctggatattctcatccagaacacgattcgttccaaatggcacgaagttctggag

SEQ ID NO: 830 - protein, 346 aa, synthetic construct
  REGION 1..346: note = variant of RNA ligase 2 from Klebsiella phage KP179
MHHHHHHGGSNTFAYYSSLENHYNNKFIEKIRGAGFLMHTVEWVAREKIHGTNFSVIITPTEIVPAKRTGPILEGESFFGHEIIMKKYKDSFVKVQNMLNAMDLVSVQIFGEFAGGGIQKGVDYGDKDFYVFDILSDSGNEKVYWDDYRVESFCTTLGLKLAPLLGRGSFAELSQYPNDFKSIVNRYNELVDTTGLEMANKHVFGPQASSETGVAEGYVLKPVYPIFFNTGTRVAIKCKNSKFSEKAKLDSPIKAKVELTENDKRLLEIFSEYVTWNRVSNVLSHIGSVTAKDFGRVMGLTMKDIINEAAREGHDLLFADNPSAVLKELDILIQNTIRSKWHEVLE

SEQ ID NO: 831 - DNA, 1038 bp, synthetic construct
  misc_feature 1..1038: note = variant of RNA ligase 2 from Klebsiella phage KP179
  source 1..1038: mol_type = other DNA
atgcatcaccatcaccatcacggtggcagcaacacgtttgcgtattattcaagtctggaaaaccattacaataataagttcattgagaagatccgtggtgcaggcttcctgatgcacaccgtggaatgggtagctcgcgagaagattcatggaacgaactttagcgttatcattactccgaccgaaatcgtcccagccaaacgcacagggccgatcttggaaggcgagtcgttctttggtcacgaaattatcatgaaaaaatataaagactccttcgtgaaggtgcagaacatgctgaatgccatggatcttgttagcgtgcaaatctttggcgaatttgcgggtggtggcattcagaaaggcgtcgattacggagacaaagatttctatgtgtttgacatcctgtctgatagcgggaacgagaaagtttactgggatgactatcgcgtcgaatcgttttgcaccacgctcggtctgaaattagcgcctctgctgggacgtggtagtttcgctgaactgtcccagtacccaaacgatttcaaaagcattgtgaaccgttataatgaattggttctgacgacgggcctggagatggccaataaacacgtctttggtccgcaagcgtcttctgaaactggcgtagcagaaggctacgttcttaaacccgtctatccgatcttctttaataccggtacgcgcgtggcgattaaatgcaagaactccaaattttcggagaaagccaagctggactcgccaattaaggcgaaggtggaactgacggagaacgataaacgtctgctcgaaatctttagcgagtatgttacctggaatcgcgtcagtaacgtactgtcacatattggctcagtgaccgcaaaagattttgggcgtgttatgggtctgacgatgaaagacatcattaatgaagcagcacgcgaaggccatgatctgttgttcgctgataacccgtcggcggtgctgaaggagctggatggcctcatccagaacacgattcgttccaaatggcacgaagttctggag

SEQ ID NO: 832 - protein, 346 aa, synthetic construct
  REGION 1..346: note = variant of RNA ligase 2 from Klebsiella phage KP179
MHHHHHHGGSNTFAYYSSLENHYNNKFIEKIRGAGFLMHTVEWVAREKIHGTNFSVIITPTEIVPAKRTGPILEGESFFGHEIIMKKYKDSFVKVQNMLNAMDLVSVQIFGEFAGGGIQKGVDYGDKDFYVFDILSDSGNEKVYWDDYRVESFCTTLGLKLAPLLGRGSFAELSQYPNDFKSIVNRYNELVLTTGLEMANKHVFGPQASSETGVAEGYVLKPVYPIFFNTGTRVAIKCKNSKFSEKAKLDSPIKAKVELTENDKRLLEIFSEYVTWNRVSNVLSHIGSVTAKDFGRVMGLTMKDIINEAAREGHDLLFADNPSAVLKELDGLIQNTIRSKWHEVLE

SEQ ID NO: 833 - DNA, 1038 bp, synthetic construct
  misc_feature 1..1038: note = variant of RNA ligase 2 from Klebsiella phage KP179
  source 1..1038: mol_type = other DNA
atgcatcaccatcaccatcacggtggcagcaacacgtttgcgtattattcaagtctggaaaaccattacaataataagttcattgagaagatccgtggtgcaggcttcctgatgcacaccgtggaatgggtagctcgcgagaagattcatggaacgaactttagcgttatcattactccgaccgaaatcgtcccagccaaacgcacagggccgatcttggaaggcgagtcgttctttggtcacgaaattatcatgaaaaaatataaagactccttcgtgaaggtgcagaacatgctgaatgccatggatcttgttagcgtgcaaatctttggcgaatttgcgggtggtggcattcagaaaggcgtcgattacggagacaaagatttctatgtgtttgacatcctgtctgatagcgggaacgagaaagtttactgggatgactatcgcgtcgaatcgttttgcaccacgctcggtctgaaattagcgcctctgctgggacgtggtagtttcgctgaactgtcccagtacccaaacgatttcaaaagcattgtgaaccgttataatgaattggttctgaaggtcggcctggagatggccaataaacacgtctttggtccgcaagcgtcttctgaaactggcgtagcagaaggctacgttcttaaacccgtctatccgatcttctttaataccggtacgcgcgtggcgattaaatgcaagaactccaaattttcggagaaagccaagctggactcgccaattaaggcgaaggtggaactgacggagaacgataaacgtctgctcgaaatctttagcgagtatgttacctggaatcgcgtcagtaacgtactgtcacatattggctcagtgaccgcaaaagattttgggcgtgttatgggtctgacgatgaaagacatcattaatgaagcagcacgcgaaggccatgatctgttgttcgctgataacccgtcggcggtgctgaaggagctgactagcctcatccagaacacgattcgttccaaatggcacgaagttctggag

SEQ ID NO: 834 - protein, 346 aa, synthetic construct
  REGION 1..346: note = variant of RNA ligase 2 from Klebsiella phage KP179
MHHHHHHGGSNTFAYYSSLENHYNNKFIEKIRGAGFLMHTVEWVAREKIHGTNFSVIITPTEIVPAKRTGPILEGESFFGHEIIMKKYKDSFVKVQNMLNAMDLVSVQIFGEFAGGGIQKGVDYGDKDFYVFDILSDSGNEKVYWDDYRVESFCTTLGLKLAPLLGRGSFAELSQYPNDFKSIVNRYNELVLKVGLEMANKHVFGPQASSETGVAEGYVLKPVYPIFFNTGTRVAIKCKNSKFSEKAKLDSPIKAKVELTENDKRLLEIFSEYVTWNRVSNVLSHIGSVTAKDFGRVMGLTMKDIINEAAREGHDLLFADNPSAVLKELTSLIQNTIRSKWHEVLE

SEQ ID NO: 835 - DNA, 1038 bp, synthetic construct
  misc_feature 1..1038: note = variant of RNA ligase 2 from Klebsiella phage KP179
  source 1..1038: mol_type = other DNA
atgcatcaccatcaccatcacggtggcagcaacacgtttgcgtattattcaagtctggaaaaccattacaataataagttcattgagaagatccgtggtgcaggcttcctgatgcacaccgtggaatgggtagctcgcgagaagattcatggaacgaactttagcgttatcattactccgaccgaaatcgtcccagccaaacgcacagggccgatcttggaaggcgagtcgttctttggtcacgaaattatcatgaaaaaatataaagactccttcgtgaaggtgcagaacatgctgaatgccatggatcttgttagcgtgcaaatctttggcgaatttgcgggtggtggcattcagaaaggcgtcgattacggagacaaagatttctatgtgtttgacatcctgtctgatagcgggaacgagaaagtttactgggatgactatcgcgtcgaatcgttttgcaccacgctcggtctgaaattagcgcctctgctgggacgtggtagtttcgctgaactgtcccagtacccaaacgatttcaaaagcattgtgaaccgttataatgaattggttgacacgacgggcctggagatggccaataaacacgtctttggtccgcaagcgtcttctgaaactggcgtagcagaaggctacgttcttaaacccgtctatccgatcttctttaataccggtacgcgcgtggcgattaaatgcaagaactccaaattttcggagaaagccaagctggactcgccaattaaggcgaaggtggaactgacggagaacgataaacgtctgctcgaaatctttagcgagtatgttacctggaatcgcgtcagtaacgtactgtcacatattggctcagtgaccgcaaaagattttgggcgtgttatcggtctgacgatgaaagacatcattaatgaagcagcacgcgaaggccatgatctgttgttcgctgataacccgtcggcggtgctgaaggagctggatagcctcatccagaacacgattcgttccaaatggcacgaagttctggag

SEQ ID NO: 836 - protein, 346 aa, synthetic construct
  REGION 1..346: note = variant of RNA ligase 2 from Klebsiella phage KP179
MHHHHHHGGSNTFAYYSSLENHYNNKFIEKIRGAGFLMHTVEWVAREKIHGTNFSVIITPTEIVPAKRTGPILEGESFFGHEIIMKKYKDSFVKVQNMLNAMDLVSVQIFGEFAGGGIQKGVDYGDKDFYVFDILSDSGNEKVYWDDYRVESFCTTLGLKLAPLLGRGSFAELSQYPNDFKSIVNRYNELVDTTGLEMANKHVFGPQASSETGVAEGYVLKPVYPIFFNTGTRVAIKCKNSKFSEKAKLDSPIKAKVELTENDKRLLEIFSEYVTWNRVSNVLSHIGSVTAKDFGRVIGLTMKDIINEAAREGHDLLFADNPSAVLKELDSLIQNTIRSKWHEVLE

SEQ ID NO: 837 - DNA, 1038 bp, synthetic construct
  misc_feature 1..1038: note = variant of RNA ligase 2 from Klebsiella phage KP179
  source 1..1038: mol_type = other DNA
atgcatcaccatcaccatcacggtggcagcaacacgtttgcgtattattcaagtctggaaaaccattacaataataagttcattgagaagatccgtggtgcaggcttcctgatgcacaccgtggaatgggtagctcgcgagaagattcatggaacgaactttagcgttatcattactccgaccgaaatcgtcccagccaaacgcacagggccgatcttggaaggcgagtcgttctttggtcacgaaattatcatgaaaaaatataaagactccttcgtgaaggtgcagaacatgctgaatgccatggatcttgttagcgtgcaaatctttggcgaatttgcgggtggtggcattcagaaaggcgtcgattacggagacaaagatttctatgtgtttgacatcctgtctgatagcgggaacgagaaagtttactgggatgactatcgcgtcgaatcgttttgcaccacgctcggtctgaaattagcgcctctgctgggacgtggtagtttcgctgaactgtcccagtacccaaacgatttcaaaagcattgtgaaccgttataatgaattggttgacacggtcggcctggagatggccaataaacacgtctttggtccgcaagcgtcttctgaaactggcgtagcagaaggctacgttcttaaacccgtctatccgatcttctttaataccggtacgcgcgtggcgattaaatgcaagaactccaaattttcggagaaagccaagctggactcgccaattaaggcgaaggtggaactgacggagaacgataaacgtctgctcgaaatctttagcgagtatgttacctggaatcgcgtcagtaacgtactgtcacatattggctcagtgaccgcaaaagattttgggcgtgtttcgggtctgacgatgaaagacatcattaatgaagcagcacgcgaaggccatgatctgttgttcgctgataacccgtcggcggtgctgaaggagctggatggcctcatccagaacacgattcgttccaaatggcacgaagttctggag

SEQ ID NO: 838 - protein, 346 aa, synthetic construct
  REGION 1..346: note = variant of RNA ligase 2 from Klebsiella phage KP179
MHHHHHHGGSNTFAYYSSLENHYNNKFIEKIRGAGFLMHTVEWVAREKIHGTNFSVIITPTEIVPAKRTGPILEGESFFGHEIIMKKYKDSFVKVQNMLNAMDLVSVQIFGEFAGGGIQKGVDYGDKDFYVFDILSDSGNEKVYWDDYRVESFCTTLGLKLAPLLGRGSFAELSQYPNDFKSIVNRYNELVDTVGLEMANKHVFGPQASSETGVAEGYVLKPVYPIFFNTGTRVAIKCKNSKFSEKAKLDSPIKAKVELTENDKRLLEIFSEYVTWNRVSNVLSHIGSVTAKDFGRVSGLTMKDIINEAAREGHDLLFADNPSAVLKELDGLIQNTIRSKWHEVLE

SEQ ID NO: 839 - DNA, 1038 bp, synthetic construct
  misc_feature 1..1038: note = variant of RNA ligase 2 from Klebsiella phage KP179
  source 1..1038: mol_type = other DNA
atgcatcaccatcaccatcacggtggcagcaacacgtttgcgtattattcaagtctggaaaaccattacaataataagttcattgagaagatccgtggtgcaggcttcctgatgcacaccgtggaatgggtagctcgcgagaagattcatggaacgaactttagcgttatcattactccgaccgaaatcgtcccagccaaacgcacagggccgatcttggaaggcgagtcgttctttggtcacgaaattatcatgaaaaaatataaagactccttcgtgaaggtgcagaacatgctgaatgccatggatcttgttagcgtgcaaatctttggcgaatttgcgggtggtggcattcagaaaggcgtcgattacggagacaaagatttctatgtgtttgacatcctgtctgatagcgggaacgagaaagtttactgggatgactatcgcgtcgaatcgttttgcaccacgctcggtctgaaattagcgcctctgctgggacgtggtagtttcgctgaactgtcccagtacccaaacgatttcaaaagcattgtgaaccgttataatgaattggttctgaagacgggcctggagatggccaataaacacgtctttggtccgcaagcgtcttctgaaactggcgtagcagaaggctacgttcttaaacccgtctatccgatcttctttaataccggtacgcgcgtggcgattaaatgcaagaactccaaattttcggagaaagccaagctggactcgccaattaaggcgaaggtggaactgacggagaacgataaacgtctgctcgaaatctttagcgagtatgttacctggaatcgcgtcagtaacgtactgtcacatattggctcagtgaccgcaaaagattttgggcgtgttatgggtctgacgatgaaagacatcattaatgaagcagcacgcgaaggccatgatctgttgttcgctgataacccgtcggcggtgctgaaggagctggatagcctcatccagaacacgattcgttccaaatggcacgaagttctggag

SEQ ID NO: 840 - protein, 346 aa, synthetic construct
  REGION 1..346: note = variant of RNA ligase 2 from Klebsiella phage KP179
MHHHHHHGGSNTFAYYSSLENHYNNKFIEKIRGAGFLMHTVEWVAREKIHGTNFSVIITPTEIVPAKRTGPILEGESFFGHEIIMKKYKDSFVKVQNMLNAMDLVSVQIFGEFAGGGIQKGVDYGDKDFYVFDILSDSGNEKVYWDDYRVESFCTTLGLKLAPLLGRGSFAELSQYPNDFKSIVNRYNELVLKTGLEMANKHVFGPQASSETGVAEGYVLKPVYPIFFNTGTRVAIKCKNSKFSEKAKLDSPIKAKVELTENDKRLLEIFSEYVTWNRVSNVLSHIGSVTAKDFGRVMGLTMKDIINEAAREGHDLLFADNPSAVLKELDSLIQNTIRSKWHEVLE

SEQ ID NO: 841 - DNA, 1038 bp, synthetic construct
  misc_feature 1..1038: note = variant of RNA ligase 2 from Klebsiella phage KP179
  source 1..1038: mol_type = other DNA
atgcatcaccatcaccatcacggtggcagcaacacgtttgcgtattattcaagtctggaaaaccattacaataataagttcattgagaagatccgtggtgcaggcttcctgatgcacaccgtggaatgggtagctcgcgagaagattcatggaacgaactttagcgttatcattactccgaccgaaatcgtcccagccaaacgcacagggccgatcttggaaggcgagtcgttctttggtcacgaaattatcatgaaaaaatataaagactccttcgtgaaggtgcagaacatgctgaatgccatggatcttgttagcgtgcaaatctttggcgaatttgcgggtggtggcattcagaaaggcgtcgattacggagacaaagatttctatgtgtttgacatcctgtctgatagcgggaacgagaaagtttactgggatgactatcgcgtcgaatcgttttgcaccacgctcggtctgaaattagcgcctctgctgggacgtggtagtttcgctgaactgtcccagtacccaaacgatttcaaaagcattgtgaaccgttataatgaattggttctgacgacgggcctggagatggccaataaacacgtctttggtccgcaagcgtcttctgaaactggcgtagcagaaggctacgttcttaaacccgtctatccgatcttctttaataccggtacgcgcgtggcgattaaatgcaagaactccaaattttcggagaaagccaagctggactcgccaattaaggcgaaggtggaactgacggagaacgataaacgtctgctcgaaatctttagcgagtatgttacctggaatcgcgtcagtaacgtactgtcacatattggctcagtgaccgcaaaagattttgggcgtgtttcgggtctgacgatgaaagacatcattaatgaagcagcacgcgaaggccatgatctgttgttcgctgataacccgtcggcggtgctgaaggagctgactagcctcatccagaacacgattcgttccaaatggcacgaagttctggag

SEQ ID NO: 842 - protein, 346 aa, synthetic construct
  REGION 1..346: note = variant of RNA ligase 2 from Klebsiella phage KP179
MHHHHHHGGSNTFAYYSSLENHYNNKFIEKIRGAGFLMHTVEWVAREKIHGTNFSVIITPTEIVPAKRTGPILEGESFFGHEIIMKKYKDSFVKVQNMLNAMDLVSVQIFGEFAGGGIQKGVDYGDKDFYVFDILSDSGNEKVYWDDYRVESFCTTLGLKLAPLLGRGSFAELSQYPNDFKSIVNRYNELVLTTGLEMANKHVFGPQASSETGVAEGYVLKPVYPIFFNTGTRVAIKCKNSKFSEKAKLDSPIKAKVELTENDKRLLEIFSEYVTWNRVSNVLSHIGSVTAKDFGRVSGLTMKDIINEAAREGHDLLFADNPSAVLKELTSLIQNTIRSKWHEVLE

SEQ ID NO: 843 - DNA, 1038 bp, synthetic construct
  misc_feature 1..1038: note = variant of RNA ligase 2 from Klebsiella phage KP179
  source 1..1038: mol_type = other DNA
atgcatcaccatcaccatcacggtggcagcaacacgtttgcgtattattcaagtctggaaaaccattacaataataagttcattgagaagatccgtggtgcaggcttcctgatgcacaccgtggaatgggtagctcgcgagaagattcatggaacgaactttagcgttatcattactccgaccgaaatcgtcccagccaaacgcacagggccgatcttggaaggcgagtcgttctttggtcacgaaattatcatgaaaaaatataaagactccttcgtgaaggtgcagaacatgctgaatgccatggatcttgttagcgtgcaaatctttggcgaatttgcgggtggtggcattcagaaaggcgtcgattacggagacaaagatttctatgtgtttgacatcctgtctgatagcgggaacgagaaagtttactgggatgactatcgcgtcgaatcgttttgcaccacgctcggtctgaaattagcgcctctgctgggacgtggtagtttcgctgaactgtcccagtacccaaacgatttcaaaagcattgtgaaccgttataatgaattggttctgaagacgggcctggagatggccaataaacacgtctttggtccgcaagcgtcttctgaaactggcgtagcagaaggctacgttcttaaacccgtctatccgatcttctttaataccggtacgcgcgtggcgattaaatgcaagaactccaaattttcggagaaagccaagctggactcgccaattaaggcgaaggtggaactgacggagaacgataaacgtctgctcgaaatctttagcgagtatgttacctggaatcgcgtcagtaacgtactgtcacatattggctcagtgaccgcaaaagattttgggcgtgttatgggtctgacgatgaaagacatcattaatgaagcagcacgcgaaggccatgatctgttgttcgctgataacccgtcggcggtgctgaaggagctgaccattctcatccagaacacgattcgttccaaatggcacgaagttctggag

SEQ ID NO: 844 - protein, 346 aa, synthetic construct
  REGION 1..346: note = variant of RNA ligase 2 from Klebsiella phage KP179
MHHHHHHGGSNTFAYYSSLENHYNNKFIEKIRGAGFLMHTVEWVAREKIHGTNFSVIITPTEIVPAKRTGPILEGESFFGHEIIMKKYKDSFVKVQNMLNAMDLVSVQIFGEFAGGGIQKGVDYGDKDFYVFDILSDSGNEKVYWDDYRVESFCTTLGLKLAPLLGRGSFAELSQYPNDFKSIVNRYNELVLKTGLEMANKHVFGPQASSETGVAEGYVLKPVYPIFFNTGTRVAIKCKNSKFSEKAKLDSPIKAKVELTENDKRLLEIFSEYVTWNRVSNVLSHIGSVTAKDFGRVMGLTMKDIINEAAREGHDLLFADNPSAVLKELTILIQNTIRSKWHEVLE

SEQ ID NO: 845 - DNA, 1038 bp, synthetic construct
  misc_feature 1..1038: note = variant of RNA ligase 2 from Klebsiella phage KP179
  source 1..1038: mol_type = other DNA
atgcatcaccatcaccatcacggtggcagcaacacgtttgcgtattattcaagtctggaaaaccattacaataataagttcattgagaagatccgtggtgcaggcttcctgatgcacaccgtggaatgggtagctcgcgagaagattcatggaacgaactttagcgttatcattactccgaccgaaatcgtcccagccaaacgcacagggccgatcttggaaggcgagtcgttctttggtcacgaaattatcatgaaaaaatataaagactccttcgtgaaggtgcagaacatgctgaatgccatggatcttgttagcgtgcaaatctttggcgaatttgcgggtggtggcattcagaaaggcgtcgattacggagacaaagatttctatgtgtttgacatcctgtctgatagcgggaacgagaaagtttactgggatgactatcgcgtcgaatcgttttgcaccacgctcggtctgaaattagcgcctctgctgggacgtggtagtttcgctgaactgtcccagtacccaaacgatttcaaaagcattgtgaaccgttataatgaattggttgacacggtcggcctggagatggccaataaacacgtctttggtccgcaagcgtcttctgaaactggcgtagcagaaggctacgttcttaaacccgtctatccgatcttctttaataccggtacgcgcgtggcgattaaatgcaagaactccaaattttcggagaaagccaagctggactcgccaattaaggcgaaggtggaactgacggagaacgataaacgtctgctcgaaatctttagcgagtatgttacctggaatcgcgtcagtaacgtactgtcacatattggctcagtgaccgcaaaagattttgggcgtgttatgggtctgacgatgaaagacatcattaatgaagcagcacgcgaaggccatgatctgttgttcgctgataacccgtcggcggtgctgaaggagctggatattctcatccagaacacgattcgttccaaatggcacgaagttctggag

SEQ ID NO: 846 - protein, 346 aa, synthetic construct
  REGION 1..346: note = variant of RNA ligase 2 from Klebsiella phage KP179
MHHHHHHGGSNTFAYYSSLENHYNNKFIEKIRGAGFLMHTVEWVAREKIHGTNFSVIITPTEIVPAKRTGPILEGESFFGHEIIMKKYKDSFVKVQNMLNAMDLVSVQIFGEFAGGGIQKGVDYGDKDFYVFDILSDSGNEKVYWDDYRVESFCTTLGLKLAPLLGRGSFAELSQYPNDFKSIVNRYNELVDTVGLEMANKHVFGPQASSETGVAEGYVLKPVYPIFFNTGTRVAIKCKNSKFSEKAKLDSPIKAKVELTENDKRLLEIFSEYVTWNRVSNVLSHIGSVTAKDFGRVMGLTMKDIINEAAREGHDLLFADNPSAVLKELDILIQNTIRSKWHEVLE

SEQ ID NO: 847 - DNA, 1038 bp, synthetic construct
  misc_feature 1..1038: note = variant of RNA ligase 2 from Klebsiella phage KP179
  source 1..1038: mol_type = other DNA
atgcatcaccatcaccatcacggtggcagcaacacgtttgcgtattattcaagtctggaaaaccattacaataataagttcattgagaagatccgtggtgcaggcttcctgatgcacaccgtggaatgggtagctcgcgagaagattcatggaacgaactttagcgttatcattactccgaccgaaatcgtcccagccaaacgcacagggccgatcttggaaggcgagtcgttctttggtcacgaaattatcatgaaaaaatataaagactccttcgtgaaggtgcagaacatgctgaatgccatggatcttgttagcgtgcaaatctttggcgaatttgcgggtggtggcattcagaaaggcgtcgattacggagacaaagatttctatgtgtttgacatcctgtctgatagcgggaacgagaaagtttactgggatgactatcgcgtcgaatcgttttgcaccacgctcggtctgaaattagcgcctctgctgggacgtggtagtttcgctgaactgtcccagtacccaaacgatttcaaaagcattgtgaaccgttataatgaattggttgacacgacgggcctggagatggccaataaacacgtctttggtccgcaagcgtcttctgaaactggcgtagcagaaggctacgttcttaaacccgtctatccgatcttctttaataccggtacgcgcgtggcgattaaatgcaagaactccaaattttcggagaaagccaagctggactcgccaattaaggcgaaggtggaactgacggagaacgataaacgtctgctcgaaatctttagcgagtatgttacctggaatcgcgtcagtaacgtactgtcacatattggctcagtgaccgcaaaagattttgggcgtgttatgggtctgacgatgaaagacatcattaatgaagcagcacgcgaaggccatgatctgttgttcgctgataacccgtcggcggtgctgaaggagctgactggcctcatccagaacacgattcgttccaaatggcacgaagttctggag

SEQ ID NO: 848 - protein, 346 aa, synthetic construct
  REGION 1..346: note = variant of RNA ligase 2 from Klebsiella phage KP179
MHHHHHHGGSNTFAYYSSLENHYNNKFIEKIRGAGFLMHTVEWVAREKIHGTNFSVIITPTEIVPAKRTGPILEGESFFGHEIIMKKYKDSFVKVQNMLNAMDLVSVQIFGEFAGGGIQKGVDYGDKDFYVFDILSDSGNEKVYWDDYRVESFCTTLGLKLAPLLGRGSFAELSQYPNDFKSIVNRYNELVDTTGLEMANKHVFGPQASSETGVAEGYVLKPVYPIFFNTGTRVAIKCKNSKFSEKAKLDSPIKAKVELTENDKRLLEIFSEYVTWNRVSNVLSHIGSVTAKDFGRVMGLTMKDIINEAAREGHDLLFADNPSAVLKELTGLIQNTIRSKWHEVLE

SEQ ID NO: 849 - DNA, 1038 bp, synthetic construct
  misc_feature 1..1038: note = variant of RNA ligase 2 from Klebsiella phage KP179
  source 1..1038: mol_type = other DNA
atgcatcaccatcaccatcacggtggcagcaacacgtttgcgtattattcaagtctggaaaaccattacaataataagttcattgagaagatccgtggtgcaggcttcctgatgcacaccgtggaatgggtagctcgcgagaagattcatggaacgaactttagcgttatcattactccgaccgaaatcgtcccagccaaacgcacagggccgatcttggaaggcgagtcgttctttggtcacgaaattatcatgaaaaaatataaagactccttcgtgaaggtgcagaacatgctgaatgccatggatcttgttagcgtgcaaatctttggcgaatttgcgggtggtggcattcagaaaggcgtcgattacggagacaaagatttctatgtgtttgacatcctgtctgatagcgggaacgagaaagtttactgggatgactatcgcgtcgaatcgttttgcaccacgctcggtctgaaattagcgcctctgctgggacgtggtagtttcgctgaactgtcccagtacccaaacgatttcaaaagcattgtgaaccgttataatgaattggttctgacgacgggcctggagatggccaataaacacgtctttggtccgcaagcgtcttctgaaactggcgtagcagaaggctacgttcttaaacccgtctatccgatcttctttaataccggtacgcgcgtggcgattaaatgcaagaactccaaattttcggagaaagccaagctggactcgccaattaaggcgaaggtggaactgacggagaacgataaacgtctgctcgaaatctttagcgagtatgttacctggaatcgcgtcagtaacgtactgtcacatattggctcagtgaccgcaaaagattttgggcgtgtttcgggtctgacgatgaaagacatcattaatgaagcagcacgcgaaggccatgatctgttgttcgctgataacccgtcggcggtgctgaaggagctgacttggctcatccagaacacgattcgttccaaatggcacgaagttctggag

SEQ ID NO: 850 - protein, 346 aa, synthetic construct
  REGION 1..346: note = variant of RNA ligase 2 from Klebsiella phage KP179
MHHHHHHGGSNTFAYYSSLENHYNNKFIEKIRGAGFLMHTVEWVAREKIHGTNFSVIITPTEIVPAKRTGPILEGESFFGHEIIMKKYKDSFVKVQNMLNAMDLVSVQIFGEFAGGGIQKGVDYGDKDFYVFDILSDSGNEKVYWDDYRVESFCTTLGLKLAPLLGRGSFAELSQYPNDFKSIVNRYNELVLTTGLEMANKHVFGPQASSETGVAEGYVLKPVYPIFFNTGTRVAIKCKNSKFSEKAKLDSPIKAKVELTENDKRLLEIFSEYVTWNRVSNVLSHIGSVTAKDFGRVSGLTMKDIINEAAREGHDLLFADNPSAVLKELTWLIQNTIRSKWHEVLE

SEQ ID NO: 851 - DNA, 1038 bp, synthetic construct
  misc_feature 1..1038: note = variant of RNA ligase 2 from Klebsiella phage KP179
  source 1..1038: mol_type = other DNA
atgcatcaccatcaccatcacggtggcagcaacacgtttgcgtattattcaagtctggaaaaccactacaataataagttcattgagaagatccgtggtgcaggcttcctgatgcacaccgtggaatgggtagctcgcgagaagattcatggaacgaactttagcgttatcattactgataccgaaatcgtcccagccaaacgcacagggccgatcttggaaggcgagtcgttctttggtcacgaaattatcatgaaaaaatataaagactccttcgtgaaggtgcagaacatgctgcgtgccatggatcttgttagcgtgcaaatctttggcgaatttgcgggtggtggcattcagaaaggcgtcgattacggagacaaggatttctatgtgtttgacatcctgtctgatagcgggaacgagaaagtttactgggatgactatcgcgtcgaatcgttttgcaccggtctcggtctgaaattagcgcctctgctgggacgtggtagtttcgctgaactgtcccagtacccaaacgatttcaaaagcattgtgaaccgttataatgaattggttgatacgacgggcctggagatggccaataaacacgtctttggtccgcaagcgtcttctgaaactggcgtagcagaaggctacgttcttaaacccgtctatccgatcttctttaataccggtacgcgcgtggcgattaaatgcaagaactccaaattttcggagaaagccaagctggactcgccaattaaggcgaaggtggaactgacggagaacgataaacgtctgctcgaaatctttagcgagtatgttacctggaatcgcgtcagtaacgtactgtcacatattggctcagtgaccgcaaaagattttgggcgtgttatgggtctgacgatgaaagacatcattaatgaagcagcacgcgaaggccatgatctgttgttcgctgataacccgtcggcggtgctgaaggagctgaccattctcatccagaacacgattcgctccaaatggcacgaagttctggag

SEQ ID NO: 852 - protein, 346 aa, synthetic construct
  REGION 1..346: note = variant of RNA ligase 2 from Klebsiella phage KP179
MHHHHHHGGSNTFAYYSSLENHYNNKFIEKIRGAGFLMHTVEWVAREKIHGTNFSVIITDTEIVPAKRTGPILEGESFFGHEIIMKKYKDSFVKVQNMLRAMDLVSVQIFGEFAGGGIQKGVDYGDKDFYVFDILSDSGNEKVYWDDYRVESFCTGLGLKLAPLLGRGSFAELSQYPNDFKSIVNRYNELVDTTGLEMANKHVFGPQASSETGVAEGYVLKPVYPIFFNTGTRVAIKCKNSKFSEKAKLDSPIKAKVELTENDKRLLEIFSEYVTWNRVSNVLSHIGSVTAKDFGRVMGLTMKDIINEAAREGHDLLFADNPSAVLKELTILIQNTIRSKWHEVLE

SEQ ID NO: 853 - DNA, 1038 bp, synthetic construct
  misc_feature 1..1038: note = variant of RNA ligase 2 from Klebsiella phage KP179
  source 1..1038: mol_type = other DNA
atgcatcaccatcaccatcacggtggcagcaacacgtttgcgtattattcaagtctggaaaaccattacaataataagttcattgagaagatccgtggtgcaggcttcctgatgcacaccgtggaatgggtagctcgcgagaagattcatggaacgaactttagcgttatcattactccgaccgaaatcgtcccagccaaacgcacagggccgatcttggaaggcgagtcgttctttggtcacgaaattatcatgaaaaaatataaagactccttcgtgaaggtgcagaacatgctgaatgccatggatcttgttagcgtgcaaatctttggcgaatttgcgggtggtggcattcagaaaggcgtcgattacggagacaaagatttctatgtgtttgacatcctgtctgatagcgggaacgagaaagtttactgggatgactatcgcgtcgaatcgttttgcaccacgctcggtctgaaattagcgcctctgctgggacgtggtagtttcgctgaactgtcccagtacccaaacgatttcaaaagcattgtgaaccgttataatgaattggttgacaagacgggcctggagatggccaataaacacgtctttggtccgcaagcgtcttctgaaactggcgtagcagaaggctacgttcttaaacccgtctatccgatcttctttaataccggtacgcgcgtggcgattaaatgcaagaactccaaattttcggagaaagccaagctggactcgccaattaaggcgaaggtggaactgacggagaacgataaacgtctgctcgaaatctttagcgagtatgttacctggaatcgcgtcagtaacgtactgtcacatattggctcagtgaccgcaaaagattttgggggtgttatgggtctgacgatgaaagacatcattaatgaagcagcacgcgaaggccatgatctgttgttcgctgataacccgtcggcggtgctgaaggagctgacttggctcatccagaacacgattcgttccaaatggcacgaagttctggag

SEQ ID NO: 854 - protein, 346 aa, synthetic construct
  REGION 1..346: note = variant of RNA ligase 2 from Klebsiella phage KP179
MHHHHHHGGSNTFAYYSSLENHYNNKFIEKIRGAGFLMHTVEWVAREKIHGTNFSVIITPTEIVPAKRTGPILEGESFFGHEIIMKKYKDSFVKVQNMLNAMDLVSVQIFGEFAGGGIQKGVDYGDKDFYVFDILSDSGNEKVYWDDYRVESFCTTLGLKLAPLLGRGSFAELSQYPNDFKSIVNRYNELVDKTGLEMANKHVFGPQASSETGVAEGYVLKPVYPIFFNTGTRVAIKCKNSKFSEKAKLDSPIKAKVELTENDKRLLEIFSEYVTWNRVSNVLSHIGSVTAKDFGGVMGLTMKDIINEAAREGHDLLFADNPSAVLKELTWLIQNTIRSKWHEVLE

SEQ ID NO: 855 - DNA, 1038 bp, synthetic construct
  misc_feature 1..1038: note = variant of RNA ligase 2 from Klebsiella phage KP179
  source 1..1038: mol_type = other DNA
atgcatcaccatcaccatcacggtggcagcaacacgtttgcgtattattcaagtctggaaaaccattacaataataagttcattgagaagatccgtggtgcaggcttcctgatgcacaccgtggaatgggtagctcgcgagaagattcatggaacgaactttagcgttatcattactccgaccgaaatcgtcccagccaaacgcacagggccgatcttggaaggcgagtcgttctttggtcacgaaattatcatgaaaaaatataaagactccttcgtgaaggtgcagaacatgctgaatgccatggatcttgttagcgtgcaaatctttggcgaatttgcgggtggtggcattcagaaaggcgtcgattacggagacaaagatttctatgtgtttgacatcctgtctgatagcgggaacgagaaagtttactgggatgactatcgcgtcgaatcgttttgcaccacgctcggtctgaaattagcgcctctgctgggacgtggtagtttcgctgaactgtcccagtacccaaacgatttcaaaagcattgtgaaccgttataatgaattggttgacacgacgggcctggagatggccaataaacacgtctttggtccgcaagcgtcttctgaaactggcgtagcagaaggctacgttcttaaacccgtctatccgatcttctttaataccggtacgcgcgtggcgattaaatgcaagaactccaaattttcggagaaagccaagctggactcgccaattaaggcgaaggtggaactgacggagaacgataaacgtctgctcgaaatctttagcgagtatgttacctggaatcgcgtcagtaacgtactgtcacatattggctcagtgaccgcaaaagattttgggcgtgtttcgggtctgacgatgaaagacatcattaatgaagcagcacgcgaaggccatgatctgttgttcgctgataacccgtcggcggtgctgaaggagctgactggcctcatccagaacacgattcgttccaaatggcacgaagttctggag

SEQ ID NO: 856 - protein, 346 aa, synthetic construct
  REGION 1..346: note = variant of RNA ligase 2 from Klebsiella phage KP179
MHHHHHHGGSNTFAYYSSLENHYNNKFIEKIRGAGFLMHTVEWVAREKIHGTNFSVIITPTEIVPAKRTGPILEGESFFGHEIIMKKYKDSFVKVQNMLNAMDLVSVQIFGEFAGGGIQKGVDYGDKDFYVFDILSDSGNEKVYWDDYRVESFCTTLGLKLAPLLGRGSFAELSQYPNDFKSIVNRYNELVDTTGLEMANKHVFGPQASSETGVAEGYVLKPVYPIFFNTGTRVAIKCKNSKFSEKAKLDSPIKAKVELTENDKRLLEIFSEYVTWNRVSNVLSHIGSVTAKDFGRVSGLTMKDIINEAAREGHDLLFADNPSAVLKELTGLIQNTIRSKWHEVLE

SEQ ID NO: 857 - DNA, 1038 bp, synthetic construct
  misc_feature 1..1038: note = variant of RNA ligase 2 from Klebsiella phage KP179
  source 1..1038: mol_type = other DNA
atgcatcaccatcaccatcacggtggcagcaacacgtttgcgtattattcaagtctggaaaaccattacaataataagttcattgagaagatccgtggtgcaggcttcctgatgcacaccgtggaatgggtagctcgcgagaagattcatggaacgaactttagcgttatcattactccgaccgaaatcgtcccagccaaacgcacagggccgatcttggaaggcgagtcgttctttggtcacgaaattatcatgaaaaaatataaagactccttcgtgaaggtgcagaacatgctgaatgccatggatcttgttagcgtgcaaatctttggcgaatttgcgggtggtggcattcagaaaggcgtcgattacggagacaaagatttctatgtgtttgacatcctgtctgatagcgggaacgagaaagtttactgggatgactatcgcgtcgaatcgttttgcaccacgctcggtctgaaattagcgcctctgctgggacgtggtagtttcgctgaactgtcccagtacccaaacgatttcaaaagcattgtgaaccgttataatgaattggttgacaaggtcggcctggagatggccaataaacacgtctttggtccgcaagcgtcttctgaaactggcgtagcagaaggctacgttcttaaacccgtctatccgatcttctttaataccggtacgcgcgtggcgattaaatgcaagaactccaaattttcggagaaagccaagctggactcgccaattaaggcgaaggtggaactgacggagaacgataaacgtctgctcgaaatctttagcgagtatgttacctggaatcgcgtcagtaacgtactgtcacatattggctcagtgaccgcaaaagattttgggcgtgttatgggtctgacgatgaaagacatcattaatgaagcagcacgcgaaggccatgatctgttgttcgctgataacccgtcggcggtgctgaaggagctggattggctcatccagaacacgattcgttccaaatggcacgaagttctggag

SEQ ID NO: 858 - protein, 346 aa, synthetic construct
  REGION 1..346: note = variant of RNA ligase 2 from Klebsiella phage KP179
MHHHHHHGGSNTFAYYSSLENHYNNKFIEKIRGAGFLMHTVEWVAREKIHGTNFSVIITPTEIVPAKRTGPILEGESFFGHEIIMKKYKDSFVKVQNMLNAMDLVSVQIFGEFAGGGIQKGVDYGDKDFYVFDILSDSGNEKVYWDDYRVESFCTTLGLKLAPLLGRGSFAELSQYPNDFKSIVNRYNELVDKVGLEMANKHVFGPQASSETGVAEGYVLKPVYPIFFNTGTRVAIKCKNSKFSEKAKLDSPIKAKVELTENDKRLLEIFSEYVTWNRVSNVLSHIGSVTAKDFGRVMGLTMKDIINEAAREGHDLLFADNPSAVLKELDWLIQNTIRSKWHEVLE

SEQ ID NO: 859 - DNA, 1038 bp, synthetic construct
  misc_feature 1..1038: note = variant of RNA ligase 2 from Klebsiella phage KP179
  source 1..1038: mol_type = other DNA
atgcatcaccatcaccatcacggtggcagcaacacgtttgcgtattattcaagtctggaaaaccattacaataataagttcattgagaagatccgtggtgcaggcttcctgatgcacaccgtggaatgggtagctcgcgagaagattcatggaacgaactttagcgttatcattactccgaccgaaatcgtcccagccaaacgcacagggccgatcttggaaggcgagtcgttctttggtcacgaaattatcatgaaaaaatataaagactccttcgtgaaggtgcagaacatgctgaatgccatggatcttgttagcgtgcaaatctttggcgaatttgcgggtggtggcattcagaaaggcgtcgattacggagacaaagatttctatgtgtttgacatcctgtctgatagcgggaacgagaaagtttactgggatgactatcgcgtcgaatcgttttgcaccacgctcggtctgaaattagcgcctctgctgggacgtggtagtttcgctgaactgtcccagtacccaaacgatttcaaaagcattgtgaaccgttataatgaattggttgacacggtcggcctggagatggccaataaacacgtctttggtccgcaagcgtcttctgaaactggcgtagcagaaggctacgttcttaaacccgtctatccgatcttctttaataccggtacgcgcgtggcgattaaatgcaagaactccaaattttcggagaaagccaagctggactcgccaattaaggcgaaggtggaactgacggagaacgataaacgtctgctcgaaatctttagcgagtatgttacctggaatcgcgtcagtaacgtactgtcacatattggctcagtgaccgcaaaagattttgggcgtgttatgggtctgacgatgaaagacatcattaatgaagcagcacgcgaaggccatgatctgttgttcgctgataacccgtcggcggtgctgaaggagctgaccattctcatccagaacacgattcgttccaaatggcacgaagttctggag

SEQ ID NO: 860 - protein, 346 aa, synthetic construct
  REGION 1..346: note = variant of RNA ligase 2 from Klebsiella phage KP179
MHHHHHHGGSNTFAYYSSLENHYNNKFIEKIRGAGFLMHTVEWVAREKIHGTNFSVIITPTEIVPAKRTGPILEGESFFGHEIIMKKYKDSFVKVQNMLNAMDLVSVQIFGEFAGGGIQKGVDYGDKDFYVFDILSDSGNEKVYWDDYRVESFCTTLGLKLAPLLGRGSFAELSQYPNDFKSIVNRYNELVDTVGLEMANKHVFGPQASSETGVAEGYVLKPVYPIFFNTGTRVAIKCKNSKFSEKAKLDSPIKAKVELTENDKRLLEIFSEYVTWNRVSNVLSHIGSVTAKDFGRVMGLTMKDIINEAAREGHDLLFADNPSAVLKELTILIQNTIRSKWHEVLE

SEQ ID NO: 861 - DNA, 1038 bp, synthetic construct
  misc_feature 1..1038: note = variant of RNA ligase 2 from Klebsiella phage KP179
  source 1..1038: mol_type = other DNA
atgcatcaccatcaccatcacggtggcagcaacacgtttgcgtattattcaagtctggaaaaccattacaataataagttcattgagaagatccgtggtgcaggcttcctgatgcacaccgtggaatgggtagctcgcgagaagattcatggaacgaactttagcgttatcattactccgaccgaaatcgtcccagccaaacgcacagggccgatcttggaaggcgagtcgttctttggtcacgaaattatcatgaaaaaatataaagactccttcgtgaaggtgcagaacatgctgaatgccatggatcttgttagcgtgcaaatctttggcgaatttgcgggtggtggcattcagaaaggcgtcgattacggagacaaagatttctatgtgtttgacatcctgtctgatagcgggaacgagaaagtttactgggatgactatcgcgtcgaatcgttttgcaccacgctcggtctgaaattagcgcctctgctgggacgtggtagtttcgctgaactgtcccagtacccaaacgatttcaaaagcattgtgaaccgttataatgaattggttgacacggtcggcctggagatggccaataaacacgtctttggtccgcaagcgtcttctgaaactggcgtagcagaaggctacgttcttaaacccgtctatccgatcttctttaataccggtacgcgcgtggcgattaaatgcaagaactccaaattttcggagaaagccaagctggactcgccaattaaggcgaaggtggaactgacggagaacgataaacgtctgctcgaaatctttagcgagtatgttacctggaatcgcgtcagtaacgtactgtcacatattggctcagtgaccgcaaaagattttgggcgtgtttcgggtctgacgatgaaagacatcattaatgaagcagcacgcgaaggccatgatctgttgttcgctgataacccgtcggcggtgctgaaggagctgactggcctcatccagaacacgattcgttccaaatggcacgaagttctggag

SEQ ID NO: 862 - protein, 346 aa, synthetic construct
  REGION 1..346: note = variant of RNA ligase 2 from Klebsiella phage KP179
MHHHHHHGGSNTFAYYSSLENHYNNKFIEKIRGAGFLMHTVEWVAREKIHGTNFSVIITPTEIVPAKRTGPILEGESFFGHEIIMKKYKDSFVKVQNMLNAMDLVSVQIFGEFAGGGIQKGVDYGDKDFYVFDILSDSGNEKVYWDDYRVESFCTTLGLKLAPLLGRGSFAELSQYPNDFKSIVNRYNELVDTVGLEMANKHVFGPQASSETGVAEGYVLKPVYPIFFNTGTRVAIKCKNSKFSEKAKLDSPIKAKVELTENDKRLLEIFSEYVTWNRVSNVLSHIGSVTAKDFGRVSGLTMKDIINEAAREGHDLLFADNPSAVLKELTGLIQNTIRSKWHEVLE

SEQ ID NO: 863 - DNA, 1038 bp, synthetic construct
  misc_feature 1..1038: note = variant of RNA ligase 2 from Klebsiella phage KP179
  source 1..1038: mol_type = other DNA
atgcatcaccatcaccatcacggtggcagcaacacgtttgcgtattattcaagtctggaaaaccattacaataataagttcattgagaagatccgtggtgcaggcttcctgatgcacaccgtggaatgggtagctcgcgagaagattcatggaacgaactttagcgttatcattactccgaccgaaatcgtcccagccaaacgcacagggccgatcttggaaggcgagtcgttctttggtcacgaaattatcatgaaaaaatataaagactccttcgtgaaggtgcagaacatgctgaatgccatggatcttgttagcgtgcaaatctttggcgaatttgcgggtggtggcattcagaaaggcgtcgattacggagacaaagatttctatgtgtttgacatcctgtctgatagcgggaacgagaaagtttactgggatgactatcgcgtcgaatcgttttgcaccacgctcggtctgaaattagcgcctctgctgggacgtggtagtttcgctgaactgtcccagtacccaaacgatttcaaaagcattgtgaaccgttataatgaattggttgacaagacgggcctggagatggccaataaacacgtctttggtccgcaagcgtcttctgaaactggcgtagcagaaggctacgttcttaaacccgtctatccgatcttctttaataccggtacgcgcgtggcgattaaatgcaagaactccaaattttcggagaaagccaagctggactcgccaattaaggcgaaggtggaactgacggagaacgataaacgtctgctcgaaatctttagcgagtatgttacctggaatcgcgtcagtaacgtactgtcacatattggctcagtgaccgcaaaagattttgggcgtgtttcgggtctgacgatgaaagacatcattaatgaagcagcacgcgaaggccatgatctgttgttcgctgataacccgtcggcggtgctgaaggagctgactattctcatccagaacacgattcgttccaaatggcacgaagttctggag

SEQ ID NO: 864 - protein, 346 aa, synthetic construct
  REGION 1..346: note = variant of RNA ligase 2 from Klebsiella phage KP179
MHHHHHHGGSNTFAYYSSLENHYNNKFIEKIRGAGFLMHTVEWVAREKIHGTNFSVIITPTEIVPAKRTGPILEGESFFGHEIIMKKYKDSFVKVQNMLNAMDLVSVQIFGEFAGGGIQKGVDYGDKDFYVFDILSDSGNEKVYWDDYRVESFCTTLGLKLAPLLGRGSFAELSQYPNDFKSIVNRYNELVDKTGLEMANKHVFGPQASSETGVAEGYVLKPVYPIFFNTGTRVAIKCKNSKFSEKAKLDSPIKAKVELTENDKRLLEIFSEYVTWNRVSNVLSHIGSVTAKDFGRVSGLTMKDIINEAAREGHDLLFADNPSAVLKELTILIQNTIRSKWHEVLE

SEQ ID NO: 865 - DNA, 1038 bp, synthetic construct
  misc_feature 1..1038: note = variant of RNA ligase 2 from Klebsiella phage KP179
  source 1..1038: mol_type = other DNA
atgcatcaccatcaccatcacggtggcagcaacacgtttgcgtattattcaagtctggaaaaccattacaataataagttcattgagaagatccgtggtgcaggcttcctgatgcacaccgtggaatgggtagctcgcgagaagattcatggaacgaactttagcgttatcattactccgaccgaaatcgtcccagccaaacgcacagggccgatcttggaaggcgagtcgttctttggtcacgaaattatcatgaaaaaatataaagactccttcgtgaaggtgcagaacatgctgaatgccatggatcttgttagcgtgcaaatctttggcgaatttgcgggtggtggcattcagaaaggcgtcgattacggagacaaagatttctatgtgtttgacatcctgtctgatagcgggaacgagaaagtttactgggatgactatcgcgtcgaatcgttttgcaccacgctcggtctgaaattagcgcctctgctgggacgtggtagtttcgctgaactgtcccagtacccaaacgatttcaaaagcattgtgaaccgttataatgaattggttgacaagacgggcctggagatggccaataaacacgtctttggtccgcaagcgtcttctgaaactggcgtagcagaaggctacgttcttaaacccgtctatccgatcttctttaataccggtacgcgcgtggcgattaaatgcaagaactccaaattttcggagaaagccaagctggactcgccaattaaggcgaaggtggaactgacggagaacgataaacgtctgctcgaaatctttagcgagtatgttacctggaatcgcgtcagtaacgtactgtcacatattggctcagtgaccgcaaaagattttgggcgtgttatgggtctgacgatgaaagacatcattaatgaagcagcacgcgaaggccatgatctgttgttcgctgataacccgtcggcggtgctgaaggagctggatattctcatccagaacacgattcgttccaaatggcacgaagttctggag

SEQ ID NO: 866 - protein, 346 aa, synthetic construct
  REGION 1..346: note = variant of RNA ligase 2 from Klebsiella phage KP179
MHHHHHHGGSNTFAYYSSLENHYNNKFIEKIRGAGFLMHTVEWVAREKIHGTNFSVIITPTEIVPAKRTGPILEGESFFGHEIIMKKYKDSFVKVQNMLNAMDLVSVQIFGEFAGGGIQKGVDYGDKDFYVFDILSDSGNEKVYWDDYRVESFCTTLGLKLAPLLGRGSFAELSQYPNDFKSIVNRYNELVDKTGLEMANKHVFGPQASSETGVAEGYVLKPVYPIFFNTGTRVAIKCKNSKFSEKAKLDSPIKAKVELTENDKRLLEIFSEYVTWNRVSNVLSHIGSVTAKDFGRVMGLTMKDIINEAAREGHDLLFADNPSAVLKELDILIQNTIRSKWHEVLE

SEQ ID NO: 867 - DNA, 1038 bp, synthetic construct
  misc_feature 1..1038: note = variant of RNA ligase 2 from Klebsiella phage KP179
  source 1..1038: mol_type = other DNA
atgcatcaccatcaccatcacggtggcagcaacacgtttgcgtattattcaagtctggaaaaccattacaataataagttcattgagaagatccgtggtgcaggcttcctgatgcacaccgtggaatgggtagctcgcgagaagattcatggaacgaactttagcgttatcattactccgaccgaaatcgtcccagccaaacgcacagggccgatcttggaaggcgagtcgttctttggtcacgaaattatcatgaaaaaatataaagactccttcgtgaaggtgcagaacatgctgaatgccatggatcttgttagcgtgcaaatctttggcgaatttgcgggtggtggcattcagaaaggcgtcgattacggagacaaagatttctatgtgtttgacatcctgtctgatagcgggaacgagaaagtttactgggatgactatcgcgtcgaatcgttttgcaccacgctcggtctgaaattagcgcctctgctgggacgtggtagtttcgctgaactgtcccagtacccaaacgatttcaaaagcattgtgaaccgttataatgaattggttctgacgacgggcctggagatggccaataaacacgtctttggtccgcaagcgtcttctgaaactggcgtagcagaaggctacgttcttaaacccgtctatccgatcttctttaataccggtacgcgcgtggcgattaaatgcaagaactccaaattttcggagaaagccaagctggactcgccaattaaggcgaaggtggaactgacggagaacgataaacgtctgctcgaaatctttagcgagtatgttacctggaatcgcgtcagtaacgtactgtcacatattggctcagtgaccgcaaaagattttgggcgtgttatgggtctgacgatgaaagacatcattaatgaagcagcacgcgaaggccatgatctgttgttcgctgataacccgtcggcggtgctgaaggagctgactattctcatccagaacacgattcgttccaaatggcacgaagttctggag

SEQ ID NO: 868 - protein, 346 aa, synthetic construct
  REGION 1..346: note = variant of RNA ligase 2 from Klebsiella phage KP179
MHHHHHHGGSNTFAYYSSLENHYNNKFIEKIRGAGFLMHTVEWVAREKIHGTNFSVIITPTEIVPAKRTGPILEGESFFGHEIIMKKYKDSFVKVQNMLNAMDLVSVQIFGEFAGGGIQKGVDYGDKDFYVFDILSDSGNEKVYWDDYRVESFCTTLGLKLAPLLGRGSFAELSQYPNDFKSIVNRYNELVLTTGLEMANKHVFGPQASSETGVAEGYVLKPVYPIFFNTGTRVAIKCKNSKFSEKAKLDSPIKAKVELTENDKRLLEIFSEYVTWNRVSNVLSHIGSVTAKDFGRVMGLTMKDIINEAAREGHDLLFADNPSAVLKELTILIQNTIRSKWHEVLE

SEQ ID NO: 869 - DNA, 1038 bp, synthetic construct
  misc_feature 1..1038: note = variant of RNA ligase 2 from Klebsiella phage KP179
  source 1..1038: mol_type = other DNA
atgcatcaccatcaccatcacggtggcagcaacacgtttgcgtattattcaagtctggaaaaccattacaataataagttcattgagaagatccgtggtgcaggcttcctgatgcacaccgtggaatgggtagctcgcgagaagattcatggaacgaactttagcgttatcattactccgaccgaaatcgtcccagccaaacgcacagggccgatcttggaaggcgagtcgttctttggtcacgaaattatcatgaaaaaatataaagactccttcgtgaaggtgcagaacatgctgaatgccatggatcttgttagcgtgcaaatctttggcgaatttgcgggtggtggcattcagaaaggcgtcgattacggagacaaagatttctatgtgtttgacatcctgtctgatagcgggaacgagaaagtttactgggatgactatcgcgtcgaatcgttttgcaccacgctcggtctgaaattagcgcctctgctgggacgtggtagtttcgctgaactgtcccagtacccaaacgatttcaaaagcattgtgaaccgttataatgaattggttctgaaggtcggcctggagatggccaataaacacgtctttggtccgcaagcgtcttctgaaactggcgtagcagaaggctacgttcttaaacccgtctatccgatcttctttaataccggtacgcgcgtggcgattaaatgcaagaactccaaattttcggagaaagccaagctggactcgccaattaaggcgaaggtggaactgacggagaacgataaacgtctgctcgaaatctttagcgagtatgttacctggaatcgcgtcagtaacgtactgtcacatattggctcagtgaccgcaaaagattttgggcgtgtttcgggtctgacgatgaaagacatcattaatgaagcagcacgcgaaggccatgatctgttgttcgctgataacccgtcggcggtgctgaaggagctgactagcctcatccagaacacgattcgttccaaatggcacgaagttctggag

SEQ ID NO: 870 - protein, 346 aa, synthetic construct
  REGION 1..346: note = variant of RNA ligase 2 from Klebsiella phage KP179
MHHHHHHGGSNTFAYYSSLENHYNNKFIEKIRGAGFLMHTVEWVAREKIHGTNFSVIITPTEIVPAKRTGPILEGESFFGHEIIMKKYKDSFVKVQNMLNAMDLVSVQIFGEFAGGGIQKGVDYGDKDFYVFDILSDSGNEKVYWDDYRVESFCTTLGLKLAPLLGRGSFAELSQYPNDFKSIVNRYNELVLKVGLEMANKHVFGPQASSETGVAEGYVLKPVYPIFFNTGTRVAIKCKNSKFSEKAKLDSPIKAKVELTENDKRLLEIFSEYVTWNRVSNVLSHIGSVTAKDFGRVSGLTMKDIINEAAREGHDLLFADNPSAVLKELTSLIQNTIRSKWHEVLE

SEQ ID NO: 871 - DNA, 1038 bp, synthetic construct
  misc_feature 1..1038: note = variant of RNA ligase 2 from Klebsiella phage KP179
  source 1..1038: mol_type = other DNA
atgcatcaccatcaccatcacggtggcagcaacacgtttgcgtattattcaagtctggaaaaccattacaataataagttcattgagaagatccgtggtgcaggcttcctgatgcacaccgtggaatgggtagctcgcgagaagattcatggaacgaactttagcgttatcattactccgaccgaaatcgtcccagccaaacgcacagggccgatcttggaaggcgagtcgttctttggtcacgaaattatcatgaaaaaatataaagactccttcgtgaaggtgcagaacatgctgaatgccatggatcttgttagcgtgcaaatctttggcgaatttgcgggtggtggcattcagaaaggcgtcgattacggagacaaagatttctatgtgtttgacatcctgtctgatagcgggaacgagaaagtttactgggatgactatcgcgtcgaatcgttttgcaccacgctcggtctgaaattagcgcctctgctgggacgtggtagtttcgctgaactgtcccagtacccaaacgatttcaaaagcattgtgaaccgttataatgaattggttctgaaggtcggcctggagatggccaataaacacgtctttggtccgcaagcgtcttctgaaactggcgtagcagaaggctacgttcttaaacccgtctatccgatcttctttaataccggtacgcgcgtggcgattaaatgcaagaactccaaattttcggagaaagccaagctggactcgccaattaaggcgaaggtggaactgacggagaacgataaacgtctgctcgaaatctttagcgagtatgttacctggaatcgcgtcagtaacgtactgtcacatattggctcagtgaccgcaaaagattttgggcgtgtttcgggtctgacgatgaaagacatcattaatgaagcagcacgcgaaggccatgatctgttgttcgctgataacccgtcggcggtgctgaaggagctggatattctcatccagaacacgattcgttccaaatggcacgaagttctggag

SEQ ID NO: 872 - protein, 346 aa, synthetic construct
  REGION 1..346: note = variant of RNA ligase 2 from Klebsiella phage KP179
MHHHHHHGGSNTFAYYSSLENHYNNKFIEKIRGAGFLMHTVEWVAREKIHGTNFSVIITPTEIVPAKRTGPILEGESFFGHEIIMKKYKDSFVKVQNMLNAMDLVSVQIFGEFAGGGIQKGVDYGDKDFYVFDILSDSGNEKVYWDDYRVESFCTTLGLKLAPLLGRGSFAELSQYPNDFKSIVNRYNELVLKVGLEMANKHVFGPQASSETGVAEGYVLKPVYPIFFNTGTRVAIKCKNSKFSEKAKLDSPIKAKVELTENDKRLLEIFSEYVTWNRVSNVLSHIGSVTAKDFGRVSGLTMKDIINEAAREGHDLLFADNPSAVLKELDILIQNTIRSKWHEVLE

SEQ ID NO: 873 - DNA, 1038 bp, synthetic construct
  misc_feature 1..1038: note = variant of RNA ligase 2 from Klebsiella phage KP179
  source 1..1038: mol_type = other DNA
atgcatcaccatcaccatcacggtggcagcaacacgtttgcgtattattcaagtctggaaaaccattacaataataagttcattgagaagatccgtggtgcaggcttcctgatgcacaccgtggaatgggtagctcgcgagaagattcatggaacgaactttagcgttatcattactccgaccgaaatcgtcccagccaaacgcacagggccgatcttggaaggcgagtcgttctttggtcacgaaattatcatgaaaaaatataaagactccttcgtgaaggtgcagaacatgctgaatgccatggatcttgttagcgtgcaaatctttggcgaatttgcgggtggtggcattcagaaaggcgtcgattacggagacaaagatttctatgtgtttgacatcctgtctgatagcgggaacgagaaagtttactgggatgactatcgcgtcgaatcgttttgcaccacgctcggtctgaaattagcgcctctgctgggacgtggtagtttcgctgaactgtcccagtacccaaacgatttcaaaagcattgtgaaccgttataatgaattggttctgaagacgggcctggagatggccaataaacacgtctttggtccgcaagcgtcttctgaaactggcgtagcagaaggctacgttcttaaacccgtctatccgatcttctttaataccggtacgcgcgtggcgattaaatgcaagaactccaaattttcggagaaagccaagctggactcgccaattaaggcgaaggtggaactgacggagaacgataaacgtctgctcgaaatctttagcgagtatgttacctggaatcgcgtcagtaacgtactgtcacatattggctcagtgaccgcaaaagattttgggcgtgtttcgggtctgacgatgaaagacatcattaatgaagcagcacgcgaaggccatgatctgttgttcgctgataacccgtcggcggtgctgaaggagctgactagcctcatccagaacacgattcgttccaaatggcacgaagttctggag

SEQ ID NO: 874 - protein, 346 aa, synthetic construct
  REGION 1..346: note = variant of RNA ligase 2 from Klebsiella phage KP179
MHHHHHHGGSNTFAYYSSLENHYNNKFIEKIRGAGFLMHTVEWVAREKIHGTNFSVIITPTEIVPAKRTGPILEGESFFGHEIIMKKYKDSFVKVQNMLNAMDLVSVQIFGEFAGGGIQKGVDYGDKDFYVFDILSDSGNEKVYWDDYRVESFCTTLGLKLAPLLGRGSFAELSQYPNDFKSIVNRYNELVLKTGLEMANKHVFGPQASSETGVAEGYVLKPVYPIFFNTGTRVAIKCKNSKFSEKAKLDSPIKAKVELTENDKRLLEIFSEYVTWNRVSNVLSHIGSVTAKDFGRVSGLTMKDIINEAAREGHDLLFADNPSAVLKELTSLIQNTIRSKWHEVLE

SEQ ID NO: 875 - DNA, 1038 bp, synthetic construct
  misc_feature 1..1038: note = variant of RNA ligase 2 from Klebsiella phage KP179
  source 1..1038: mol_type = other DNA
atgcatcaccatcaccatcacggtggcagcaacacgtttgcgtattattcaagtctggaaaaccattacaataataagttcattgagaagatccgtggtgcaggcttcctgatgcacaccgtggaatgggtagctcgcgagaagattcatggaacgaactttagcgttatcattactccaaccgaaatcgtcccagccaaacgcacagggccgatcttggaaggcgagtcgttctttggtcacgaaattatcatgaaaaaatataaagactccttcgtgaaggtgcagaacatgctgcgtgccatggatcttgttagcgtgcaaatctttggcgaatttgcgggtggtggcattcagaaaggcgtcgattacggagacaaagatttctatgtgtttgacatcctgtctgatagcgggaacgagaaagtttactgggatgactatcgcgtcgaatcgttttgcaccggtctcggtctgaaattagcgcctctgctgggacgtggtagtttcgctgaactgtcccagtacccaaacgatttcaaaagcattgtgaaccgttataatgaattggttgatacgacgggcctggagatggccaataaacacgtctttggtccgcaagcgtcttctgaaactggcgtagcagaaggctacgttcttaaacccgtctatccgatcttctttaataccggtacgcgcgtggcgattaaatgcaagaactccaaattttcggagaaagccaagctggactcgccaattaaggcgaaggtggaactgacggagaacgataaacgtctgctcgaaatctttagcgagtatgttacctggaatcgcgtcagtaacgtactgtcacatattggctcagtgaccgcaaaagattttgggcgtgttatgggtctgacgatgaaagacatcattaatgaagcagcacgcgaaggccatgatctgttgttcgctgataacccgtcggcggtgctgaaggagctgaccattctcatccagaacacgattcgttccaaatggcacgaagttctggag

SEQ ID NO: 876 - protein, 346 aa, synthetic construct
  REGION 1..346: note = variant of RNA ligase 2 from Klebsiella phage KP179
MHHHHHHGGSNTFAYYSSLENHYNNKFIEKIRGAGFLMHTVEWVAREKIHGTNFSVIITPTEIVPAKRTGPILEGESFFGHEIIMKKYKDSFVKVQNMLRAMDLVSVQIFGEFAGGGIQKGVDYGDKDFYVFDILSDSGNEKVYWDDYRVESFCTGLGLKLAPLLGRGSFAELSQYPNDFKSIVNRYNELVDTTGLEMANKHVFGPQASSETGVAEGYVLKPVYPIFFNTGTRVAIKCKNSKFSEKAKLDSPIKAKVELTENDKRLLEIFSEYVTWNRVSNVLSHIGSVTAKDFGRVMGLTMKDIINEAAREGHDLLFADNPSAVLKELTILIQNTIRSKWHEVLE

SEQ ID NO: 877 - DNA, 1038 bp, synthetic construct
  misc_feature 1..1038: note = variant of RNA ligase 2 from Klebsiella phage KP179
  source 1..1038: mol_type = other DNA
atgcatcaccatcaccatcacggtggcagcaacacgtttgcgtattattcaagtctggaaaaccattacaataataagttcattgagaagatccgtggtgcaggcttcctgatgcacaccgtggaatgggtagctcgcgagaagattcatggaacgaactttagcgttatcattactccgaccgaaatcgtcccagccaaacgcacagggccgatcttggaaggcgagtcgttctttggtcacgaaattatcatgaaaaaatataaagactccttcgtgaaggtgcagaacatgctgaatgccatggatcttgttagcgtgcaaatctttggcgaatttgcgggtggtggcattcagaaaggcgtcgattacggagacaaagatttctatgtgtttgacatcctgtctgatagcgggaacgagaaagtttactgggatgactatcgcgtcgaatcgttttgcaccacgctcggtctgaaattagcgcctctgctgggacgtggtagtttcgctgaactgtcccagtacccaaacgatttcaaaagcattgtgaaccgttataatgaattggttgatacgacgggcctggagatggccaataaacacgtctttggtccgcaagcgtcttctgaaactggcgtagcagaaggctacgttcttaaacccgtctatccgatcttctttaataccggtacgcgcgtggcgattaaatgcaagaactccaaattttcggagaaagccaagctggactcgccaattaaggcgaaggtggaactgacggagaacgataaacgtctgctcgaaatctttagcgagtatgttacctggaatcgcgtcagtaacgtactgtcacatattggctcagtgaccgcaaaagattttgggcgtgtttcgggtctgacgatgaaagacatcattaatgaagcagcacgcgaaggccatgatctgttgttcgctgataacccgtcggcggtgctgaaggagctgactagcctcatccagaacacgattcgttccaaatggcacgaagttctggag

SEQ ID NO: 878 - protein, 346 aa, synthetic construct
  REGION 1..346: note = variant of RNA ligase 2 from Klebsiella phage KP179
MHHHHHHGGSNTFAYYSSLENHYNNKFIEKIRGAGFLMHTVEWVAREKIHGTNFSVIITPTEIVPAKRTGPILEGESFFGHEIIMKKYKDSFVKVQNMLNAMDLVSVQIFGEFAGGGIQKGVDYGDKDFYVFDILSDSGNEKVYWDDYRVESFCTTLGLKLAPLLGRGSFAELSQYPNDFKSIVNRYNELVDTTGLEMANKHVFGPQASSETGVAEGYVLKPVYPIFFNTGTRVAIKCKNSKFSEKAKLDSPIKAKVELTENDKRLLEIFSEYVTWNRVSNVLSHIGSVTAKDFGRVSGLTMKDIINEAAREGHDLLFADNPSAVLKELTSLIQNTIRSKWHEVLE

SEQ ID NO: 879 - DNA, 1038 bp, synthetic construct
  misc_feature 1..1038: note = variant of RNA ligase 2 from Klebsiella phage KP179
  source 1..1038: mol_type = other DNA
atgcatcaccatcaccatcacggtggcagcaacacgtttgcgtattattcaagtctggaaaaccattacaataataagttcattgagaagatccgtggtgcaggcttcctgatgcacaccgtggaatgggtagctcgcgagaagattcatggaacgaactttagcgttatcattactccgaccgaaatcgtcccagccaaacgcacagggccgatcttggaaggcgagtcgttctttggtcacgaaattatcatgaaaaaatataaagactccttcgtgaaggtgcagaacatgctgaatgccatggatcttgttagcgtgcaaatctttggcgaatttgcgggtggtggcattcagaaaggcgtcgattacggagacaaagatttctatgtgtttgacatcctgtctgatagcgggaacgagaaagtttactgggatgactatcgcgtcgaatcgttttgcaccacgctcggtctgaaattagcgcctctgctgggacgtggtagtttcgctgaactgtcccagtacccaaacgatttcaaaagcattgtgaaccgttataatgaattggttgacacgacgggcctggagatggccaataaacacgtctttggtccgcaagcgtcttctgaaactggcgtagcagaaggctacgttcttaaacccgtctatccgatcttctttaataccggtacgcgcgtggcgattaaatgcaagaactccaaattttcggagaaagccaagctggactcgccaattaaggcgaaggtggaactgacggagaacgataaacgtctgctcgaaatctttagcgagtatgttacctggaatcgcgtcagtaacgtactgtcacatattggctcagtgaccgcaaaagattttgggcgtgttatcggtctgacgatgaaagacatcattaatgaagcagcacgcgaaggccatgatctgttgttcgctgataacccgtcggcggtgctgaaggagctgactggcctcatccagaacacgattcgttccaaatggcacgaagttctggag

SEQ ID NO: 880 - protein, 346 aa, synthetic construct
  REGION 1..346: note = variant of RNA ligase 2 from Klebsiella phage KP179
MHHHHHHGGSNTFAYYSSLENHYNNKFIEKIRGAGFLMHTVEWVAREKIHGTNFSVIITPTEIVPAKRTGPILEGESFFGHEIIMKKYKDSFVKVQNMLNAMDLVSVQIFGEFAGGGIQKGVDYGDKDFYVFDILSDSGNEKVYWDDYRVESFCTTLGLKLAPLLGRGSFAELSQYPNDFKSIVNRYNELVDTTGLEMANKHVFGPQASSETGVAEGYVLKPVYPIFFNTGTRVAIKCKNSKFSEKAKLDSPIKAKVELTENDKRLLEIFSEYVTWNRVSNVLSHIGSVTAKDFGRVIGLTMKDIINEAAREGHDLLFADNPSAVLKELTGLIQNTIRSKWHEVLE

SEQ ID NO: 881 - DNA, 1038 bp, synthetic construct
  misc_feature 1..1038: note = variant of RNA ligase 2 from Klebsiella phage KP179
  source 1..1038: mol_type = other DNA
atgcatcaccatcaccatcacggtggcagcaacacgtttgcgtattattcaagtctggaaaaccactacaataataagttcattgagaagatccgtggtgcaggcttcctgatgcacaccgtggaatgggtagctcgcgagaagattcatggaacgaactttagcgttatcattactccaaccgtaatcgtcccagccaaacgcacagggccgatcttggaaggcgagtcgttctttggtcacgaaattatcatgaaaaaatataaagactccttcgtgaaggtgcagaacatgctggtcgccatggatcttgttagcgtgcaaatctttggcgaatttgcgggtggtggcattcagaaaggcgtcgattacggagacaaggatttctatgtgtttgacatcctgtctgatagcgggaacgagaaagtttactgggatgactatcgcgtcgaatcgttttgcaccacgctcggtctgaaattagcgcctctgctgggacgtggtagtttcgctgaactgtcccagtacccaaacgatttcaaaagcattgtgaaccgttataatgaattggttgatacgacgggcctggagatggccaataaacacgtctttggtccgcaagcgtcttctgaaactggcgtagcagaaggctacgttcttaaacccgtctatccgatcttctttaataccggtacgcgcgtggcgattaaatgcaagaactccaaattttcggagaaagccaagctggactcgccaattaaggcgaaggtggaactgacggagaacgataaacgtctgctcgaaatctttagcgagtatgttacctggaatcgcgtcagtaacgtactgtcacatattggctcagtgaccgcaaaagattttgggcgtgttatgggtctgacgatgaaagacatcattaatgaagcagcacgcgaaggccatgatctgttgttcgctgataacccgtcggcggtgctgaaggagctgaccattctcatccagaacacgattcgttccaaatggcacgaagttctggag

SEQ ID NO: 882 - protein, 346 aa, synthetic construct
  REGION 1..346: note = variant of RNA ligase 2 from Klebsiella phage KP179
MHHHHHHGGSNTFAYYSSLENHYNNKFIEKIRGAGFLMHTVEWVAREKIHGTNFSVIITPTVIVPAKRTGPILEGESFFGHEIIMKKYKDSFVKVQNMLVAMDLVSVQIFGEFAGGGIQKGVDYGDKDFYVFDILSDSGNEKVYWDDYRVESFCTTLGLKLAPLLGRGSFAELSQYPNDFKSIVNRYNELVDTTGLEMANKHVFGPQASSETGVAEGYVLKPVYPIFFNTGTRVAIKCKNSKFSEKAKLDSPIKAKVELTENDKRLLEIFSEYVTWNRVSNVLSHIGSVTAKDFGRVMGLTMKDIINEAAREGHDLLFADNPSAVLKELTILIQNTIRSKWHEVLE

SEQ ID NO: 883 - DNA, 1038 bp, synthetic construct
  misc_feature 1..1038: note = variant of RNA ligase 2 from Klebsiella phage KP179
  source 1..1038: mol_type = other DNA
atgcatcaccatcaccatcacggtggcagcaacacgtttgcgtattattcaagtctggaaaaccattacaataataagttcattgagaagatccgtggtgcaggcttcctgatgcacaccgtggaatgggtagctcgcgagaagattcatggaacgaactttagcgttatcattactccgaccgaaatcgtcccagccaaacgcacagggccgatcttggaaggcgagtcgttctttggtcacgaaattatcatgaaaaaatataaagactccttcgtgaaggtgcagaacatgctgaatgccatggatcttgttagcgtgcaaatctttggcgaatttgcgggtggtggcattcagaaaggcgtcgattacggagacaaagatttctatgtgtttgacatcctgtctgatagcgggaacgagaaagtttactgggatgactatcgcgtcgaatcgttttgcaccacgctcggtctgaaattagcgcctctgctgggacgtggtagtttcgctgaactgtcccagtacccaaacgatttcaaaagcattgtgaaccgttataatgaattggttgacacgacgggcctggagatggccaataaacacgtctttggtccgcaagcgtcttctgaaactggcgtagcagaaggctacgttcttaaacccgtctatccgatcttctttaataccggtacgcgcgtggcgattaaatgcaagaactccaaattttcggagaaagccaagctggactcgccaattaaggcgaaggtggaactgacggagaacgataaacgtctgctcgaaatctttagcgagtatgttacctggaatcgcgtcagtaacgtactgtcacatattggctcagtgaccgcaaaagattttgggcgtgtttcgggtctgacgatgaaagacatcattaatgaagcagcacgcgaaggccatgatctgttgttcgctgataacccgtcggcggtgctgaaggagctggatattctcatccagaacacgattcgttccaaatggcacgaagttctggag

SEQ ID NO: 884 - protein, 346 aa, synthetic construct
  REGION 1..346: note = variant of RNA ligase 2 from Klebsiella phage KP179
MHHHHHHGGSNTFAYYSSLENHYNNKFIEKIRGAGFLMHTVEWVAREKIHGTNFSVIITPTEIVPAKRTGPILEGESFFGHEIIMKKYKDSFVKVQNMLNAMDLVSVQIFGEFAGGGIQKGVDYGDKDFYVFDILSDSGNEKVYWDDYRVESFCTTLGLKLAPLLGRGSFAELSQYPNDFKSIVNRYNELVDTTGLEMANKHVFGPQASSETGVAEGYVLKPVYPIFFNTGTRVAIKCKNSKFSEKAKLDSPIKAKVELTENDKRLLEIFSEYVTWNRVSNVLSHIGSVTAKDFGRVSGLTMKDIINEAAREGHDLLFADNPSAVLKELDILIQNTIRSKWHEVLE

SEQ ID NO: 885 - DNA, 1038 bp, synthetic construct
  misc_feature 1..1038: note = variant of RNA ligase 2 from Klebsiella phage KP179
  source 1..1038: mol_type = other DNA
atgcatcaccatcaccatcacggtggcagcaacacgtttgcgtattattcaagtctggaaaaccattacaataataagttcattgagaagatccgtggtgcaggcttcctgatgcacaccgtggaatgggtagctcgcgagaagattcatggaacgaactttagcgttatcattactccgaccgaaatcgtcccagccaaacgcacagggccgatcttggaaggcgagtcgttctttggtcacgaaattatcatgaaaaaatataaagactccttcgtgaaggtgcagaacatgctgaatgccatggatcttgttagcgtgcaaatctttggcgaatttgcgggtggtggcattcagaaaggcgtcgattacggagacaaagatttctatgtgtttgacatcctgtctgatagcgggaacgagaaagtttactgggatgactatcgcgtcgaatcgttttgcaccacgctcggtctgaaattagcgcctctgctgggacgtggtagtttcgctgaactgtcccagtacccaaacgatttcaaaagcattgtgaaccgttataatgaattggttgacaagacgggcctggagatggccaataaacacgtctttggtccgcaagcgtcttctgaaactggcgtagcagaaggctacgttcttaaacccgtctatccgatcttctttaataccggtacgcgcgtggcgattaaatgcaagaactccaaattttcggagaaagccaagctggactcgccaattaaggcgaaggtggaactgacggagaacgataaacgtctgctcgaaatctttagcgagtatgttacctggaatcgcgtcagtaacgtactgtcacatattggctcagtgaccgcaaaagattttgggcgtgttatcggtctgacgatgaaagacatcattaatgaagcagcacgcgaaggccatgatctgttgttcgctgataacccgtcggcggtgctgaaggagctgactattctcatccagaacacgattcgttccaaatggcacgaagttctggag

SEQ ID NO: 886 - protein, 346 aa, synthetic construct
  REGION 1..346: note = variant of RNA ligase 2 from Klebsiella phage KP179
MHHHHHHGGSNTFAYYSSLENHYNNKFIEKIRGAGFLMHTVEWVAREKIHGTNFSVIITPTEIVPAKRTGPILEGESFFGHEIIMKKYKDSFVKVQNMLNAMDLVSVQIFGEFAGGGIQKGVDYGDKDFYVFDILSDSGNEKVYWDDYRVESFCTTLGLKLAPLLGRGSFAELSQYPNDFKSIVNRYNELVDKTGLEMANKHVFGPQASSETGVAEGYVLKPVYPIFFNTGTRVAIKCKNSKFSEKAKLDSPIKAKVELTENDKRLLEIFSEYVTWNRVSNVLSHIGSVTAKDFGRVIGLTMKDIINEAAREGHDLLFADNPSAVLKELTILIQNTIRSKWHEVLE

SEQ ID NO: 887 - DNA, 1038 bp, synthetic construct
  misc_feature 1..1038: note = variant of RNA ligase 2 from Klebsiella phage KP179
  source 1..1038: mol_type = other DNA
atgcatcaccatcaccatcacggtggcagcaacacgtttgcgtattattcaagtctggaaaaccattacaataataagttcattgagaagatccgtggtgcaggcttcctgatgcacaccgtggaatgggtagctcgcgagaagattcatggaacgaactttagcgttatcattactccgaccgaaatcgtcccagccaaacgcacagggccgatcttggaaggcgagtcgttctttggtcacgaaattatcatgaaaaaatataaagactccttcgtgaaggtgcagaacatgctgaatgccatggatcttgttagcgtgcaaatctttggcgaatttgcgggtggtggcattcagaaaggcgtcgattacggagacaaagatttctatgtgtttgacatcctgtctgatagcgggaacgagaaagtttactgggatgactatcgcgtcgaatcgttttgcaccacgctcggtctgaaattagcgcctctgctgggacgtggtagtttcgctgaactgtcccagtacccaaacgatttcaaaagcattgtgaaccgttataatgaattggttgatacgacgggcctggagatggccaataaacacgtctttggtccgcaagcgtcttctgaaactggcgtagcagaaggctacgttcttaaacccgtctatccgatcttctttaataccggtacgcgcgtggcgattaaatgcaagaactccaaattttcggagaaagccaagctggactcgccaattaaggcgaaggtggaactgacggagaacgataaacgtctgctcgaaatctttagcgagtatgttacctggaatcgcgtcagtaacgtactgtcacatattggctcagtgaccgcaaaagattttgggcgtgttatgggtctgacgatgaaagacatcattaatgaagcagcacgcgaaggccatgatctgttgttcgctgataacccgtcggcggtgctgaaggagctgactagcctcatccagaacacgattcgttccaaatggcacgaagttctggag

SEQ ID NO: 888 - protein, 346 aa, synthetic construct
  REGION 1..346: note = variant of RNA ligase 2 from Klebsiella phage KP179
MHHHHHHGGSNTFAYYSSLENHYNNKFIEKIRGAGFLMHTVEWVAREKIHGTNFSVIITPTEIVPAKRTGPILEGESFFGHEIIMKKYKDSFVKVQNMLNAMDLVSVQIFGEFAGGGIQKGVDYGDKDFYVFDILSDSGNEKVYWDDYRVESFCTTLGLKLAPLLGRGSFAELSQYPNDFKSIVNRYNELVDTTGLEMANKHVFGPQASSETGVAEGYVLKPVYPIFFNTGTRVAIKCKNSKFSEKAKLDSPIKAKVELTENDKRLLEIFSEYVTWNRVSNVLSHIGSVTAKDFGRVMGLTMKDIINEAAREGHDLLFADNPSAVLKELTSLIQNTIRSKWHEVLE

SEQ ID NO: 889 - DNA, 1038 bp, synthetic construct
  misc_feature 1..1038: note = variant of RNA ligase 2 from Klebsiella phage KP179
  source 1..1038: mol_type = other DNA
atgcatcaccatcaccatcacggtggcagcaacacgtttgcgtattattcaagtctggaaaaccattacaataataagttcattgagaagatccgtggtgcaggcttcctgatgcacaccgtggaatgggtagctcgcgagaagattcatggaacgaactttagcgttatcattactgataccgaaatcgtcccagccaaacgcacagggccgatcttggaaggcgagtcgttctttggtcacgaaattatcatgaaaaaatataaagactccttcgtgaaggtgcagaacatgctgcgtgccatggatcttgttagcgtgcaaatctttggcgaatttgcgggtggtggcattcagaaaggcgtcgattacggagacaaagatttctatgtgtttgacatcctgtctgatagcgggaacgagaaagtttactgggatgactatcgcgtcgaatcgttttgcaccactctcggtctgaaattagcgcctctgctgggacgtggtagtttcgctgaactgtcccagtacccaaacgatttcaaaagcattgtgaaccgttataatgaattggttgatacgacgggcctggagatggccaataaacacgtctttggtccgcaagcgtcttctgaaactggcgtagcagaaggctacgttcttaaacccgtctatccgatcttctttaataccggtacgcgcgtggcgattaaatgcaagaactccaaattttcggagaaagccaagctggactcgccaattaaggcgaaggtggaactgacggagaacgataaacgtctgctcgaaatctttagcgagtatgttacctggaatcgcgtcagtaacgtactgtcacatattggctcagtgaccgcaaaagattttgggcgtgttatgggtctgacgatgaaagacatcattaatgaagcagcacgcgaaggccatgatctgttgttcgctgataacccgtcggcggtgctgaaggagctgaccattctcatccagaacacgattcgttccaaatggcacgaagttctggag

SEQ ID NO: 890 - protein, 346 aa, synthetic construct
  REGION 1..346: note = variant of RNA ligase 2 from Klebsiella phage KP179
MHHHHHHGGSNTFAYYSSLENHYNNKFIEKIRGAGFLMHTVEWVAREKIHGTNFSVIITDTEIVPAKRTGPILEGESFFGHEIIMKKYKDSFVKVQNMLRAMDLVSVQIFGEFAGGGIQKGVDYGDKDFYVFDILSDSGNEKVYWDDYRVESFCTTLGLKLAPLLGRGSFAELSQYPNDFKSIVNRYNELVDTTGLEMANKHVFGPQASSETGVAEGYVLKPVYPIFFNTGTRVAIKCKNSKFSEKAKLDSPIKAKVELTENDKRLLEIFSEYVTWNRVSNVLSHIGSVTAKDFGRVMGLTMKDIINEAAREGHDLLFADNPSAVLKELTILIQNTIRSKWHEVLE

SEQ ID NO: 891 - DNA, 1038 bp, synthetic construct
  misc_feature 1..1038: note = variant of RNA ligase 2 from Klebsiella phage KP179
  source 1..1038: mol_type = other DNA
atgcatcaccatcaccatcacggtggcagcaacacgtttgcgtattattcaagtctggaaaaccattacaataataagttcattgagaagatccgtggtgcaggcttcctgatgcacaccgtggaatgggtagctcgcgagaagattcatggaacgaactttagcgttatcattactccgaccgaaatcgtcccagccaaacgcacagggccgatcttggaaggcgagtcgttctttggtcacgaaattatcatgaaaaaatataaagactccttcgtgaaggtgcagaacatgctgaatgccatggatcttgttagcgtgcaaatctttggcgaatttgcgggtggtggcattcagaaaggcgtcgattacggagacaaagatttctatgtgtttgacatcctgtctgatagcgggaacgagaaagtttactgggatgactatcgcgtcgaatcgttttgcaccacgctcggtctgaaattagcgcctctgctgggacgtggtagtttcgctgaactgtcccagtacccaaacgatttcaaaagcattgtgaaccgttataatgaattggttctgaagacgggcctggagatggccaataaacacgtctttggtccgcaagcgtcttctgaaactggcgtagcagaaggctacgttcttaaacccgtctatccgatcttctttaataccggtacgcgcgtggcgattaaatgcaagaactccaaattttcggagaaagccaagctggactcgccaattaaggcgaaggtggaactgacggagaacgataaacgtctgctcgaaatctttagcgagtatgttacctggaatcgcgtcagtaacgtactgtcacatattggctcagtgaccgcaaaagattttgggcgtgtttcgggtctgacgatgaaagacatcattaatgaagcagcacgcgaaggccatgatctgttgttcgctgataacccgtcggcggtgctgaaggagctggatagcctcatccagaacacgattcgttccaaatggcacgaagttctggag

SEQ ID NO: 892 - protein, 346 aa, synthetic construct
  REGION 1..346: note = variant of RNA ligase 2 from Klebsiella phage KP179
MHHHHHHGGSNTFAYYSSLENHYNNKFIEKIRGAGFLMHTVEWVAREKIHGTNFSVIITPTEIVPAKRTGPILEGESFFGHEIIMKKYKDSFVKVQNMLNAMDLVSVQIFGEFAGGGIQKGVDYGDKDFYVFDILSDSGNEKVYWDDYRVESFCTTLGLKLAPLLGRGSFAELSQYPNDFKSIVNRYNELVLKTGLEMANKHVFGPQASSETGVAEGYVLKPVYPIFFNTGTRVAIKCKNSKFSEKAKLDSPIKAKVELTENDKRLLEIFSEYVTWNRVSNVLSHIGSVTAKDFGRVSGLTMKDIINEAAREGHDLLFADNPSAVLKELDSLIQNTIRSKWHEVLE

SEQ ID NO: 893 - DNA, 1038 bp, synthetic construct
  misc_feature 1..1038: note = variant of RNA ligase 2 from Klebsiella phage KP179
  source 1..1038: mol_type = other DNA
atgcatcaccatcaccatcacggtggcagcaacacgtttgcgtattattcaagtctggaaaaccattacaataataagttcattgagaagatccgtggtgcaggcttcctgatgcacaccgtggaatgggtagctcgcgagaagattcatggaacgaactttagcgttatcattactccgaccgaaatcgtcccagccaaacgcacagggccgatcttggaaggcgagtcgttctttggtcacgaaattatcatgaaaaaatataaagactccttcgtgaaggtgcagaacatgctgaatgccatggatcttgttagcgtgcaaatctttggcgaatttgcgggtggtggcattcagaaaggcgtcgattacggagacaaagatttctatgtgtttgacatcctgtctgatagcgggaacgagaaagtttactgggatgactatcgcgtcgaatcgttttgcaccacgctcggtctgaaattagcgcctctgctgggacgtggtagtttcgctgaactgtcccagtacccaaacgatttcaaaagcattgtgaaccgttataatgaattggttctgaaggtcggcctggagatggccaataaacacgtctttggtccgcaagcgtcttctgaaactggcgtagcagaaggctacgttcttaaacccgtctatccgatcttctttaataccggtacgcgcgtggcgattaaatgcaagaactccaaattttcggagaaagccaagctggactcgccaattaaggcgaaggtggaactgacggagaacgataaacgtctgctcgaaatctttagcgagtatgttacctggaatcgcgtcagtaacgtactgtcacatattggctcagtgaccgcaaaagattttgggcgtgtttcgggtctgacgatgaaagacatcattaatgaagcagcacgcgaaggccatgatctgttgttcgctgataacccgtcggcggtgctgaaggagctgacttggctcatccagaacacgattcgttccaaatggcacgaagttctggag

SEQ ID NO: 894 - protein, 346 aa, synthetic construct
  REGION 1..346: note = variant of RNA ligase 2 from Klebsiella phage KP179
MHHHHHHGGSNTFAYYSSLENHYNNKFIEKIRGAGFLMHTVEWVAREKIHGTNFSVIITPTEIVPAKRTGPILEGESFFGHEIIMKKYKDSFVKVQNMLNAMDLVSVQIFGEFAGGGIQKGVDYGDKDFYVFDILSDSGNEKVYWDDYRVESFCTTLGLKLAPLLGRGSFAELSQYPNDFKSIVNRYNELVLKVGLEMANKHVFGPQASSETGVAEGYVLKPVYPIFFNTGTRVAIKCKNSKFSEKAKLDSPIKAKVELTENDKRLLEIFSEYVTWNRVSNVLSHIGSVTAKDFGRVSGLTMKDIINEAAREGHDLLFADNPSAVLKELTWLIQNTIRSKWHEVLE

SEQ ID NO: 895 - DNA, 1038 bp, synthetic construct
  misc_feature 1..1038: note = variant of RNA ligase 2 from Klebsiella phage KP179
  source 1..1038: mol_type = other DNA
atgcatcaccatcaccatcacggtggcagcaacacgtttgcgtattattcaagtctggaaaaccattacaataataagttcattgagaagatccgtggtgcaggcttcctgatgcacaccgtggaatgggtagctcgcgagaagattcatggaacgaactttagcgttatcattactccgaccgaaatcgtcccagccaaacgcacagggccgatcttggaaggcgagtcgttctttggtcacgaaattatcatgaaaaaatataaagactccttcgtgaaggtgcagaacatgctgaatgccatggatcttgttagcgtgcaaatctttggcgaatttgcgggtggtggcattcagaaaggcgtcgattacggagacaaagatttctatgtgtttgacatcctgtctgatagcgggaacgagaaagtttactgggatgactatcgcgtcgaatcgttttgcaccacgctcggtctgaaattagcgcctctgctgggacgtggtagtttcgctgaactgtcccagtacccaaacgatttcaaaagcattgtgaaccgttataatgaattggttctgacgacgggcctggagatggccaataaacacgtctttggtccgcaagcgtcttctgaaactggcgtagcagaaggctacgttcttaaacccgtctatccgatcttctttaataccggtacgcgcgtggcgattaaatgcaagaactccaaattttcggagaaagccaagctggactcgccaattaaggcgaaggtggaactgacggagaacgataaacgtctgctcgaaatctttagcgagtatgttacctggaatcgcgtcagtaacgtactgtcacatattggctcagtgaccgcaaaagattttgggcgtgttatgggtctgacgatgaaagacatcattaatgaagcagcacgcgaaggccatgatctgttgttcgctgataacccgtcggcggtgctgaaggagctggatagcctcatccagaacacgattcgttccaaatggcacgaagttctggag

SEQ ID NO: 896 - protein, 346 aa, synthetic construct
  REGION 1..346: note = variant of RNA ligase 2 from Klebsiella phage KP179
MHHHHHHGGSNTFAYYSSLENHYNNKFIEKIRGAGFLMHTVEWVAREKIHGTNFSVIITPTEIVPAKRTGPILEGESFFGHEIIMKKYKDSFVKVQNMLNAMDLVSVQIFGEFAGGGIQKGVDYGDKDFYVFDILSDSGNEKVYWDDYRVESFCTTLGLKLAPLLGRGSFAELSQYPNDFKSIVNRYNELVLTTGLEMANKHVFGPQASSETGVAEGYVLKPVYPIFFNTGTRVAIKCKNSKFSEKAKLDSPIKAKVELTENDKRLLEIFSEYVTWNRVSNVLSHIGSVTAKDFGRVMGLTMKDIINEAAREGHDLLFADNPSAVLKELDSLIQNTIRSKWHEVLE

SEQ ID NO: 897 - DNA, 1038 bp, synthetic construct
  misc_feature 1..1038: note = variant of RNA ligase 2 from Klebsiella phage KP179
  source 1..1038: mol_type = other DNA
atgcatcaccatcaccatcacggtggcagcaacacgtttgcgtattattcaagtctggaaaaccactacaataataagttcattgagaagatccgtggtgcaggcttcctgatgcacaccgtggaatgggtagctcgcgagaagattcatggaacgaactttagcgttatcattactccaaccgaaatcgtcccagccaaacgcacagggccgatcttggaaggcgagtcgttctttggtcacgaaattatcatgaaaaaatataaagactccttcgtgaaggtgcagaacatgctgcgtgccatggatcttgttagcgtgcaaatctttggcgaatttgcgggtggtggcattcagaaaggcgtcgattacggagacaaggatttctatgtgtttgacatcctgtctgatagcgggaacgagaaagtttactgggatgactatcgcgtcgaatcgttttgcaccactctcggtctgaaattagcgcctctgctgggacgtggtagtttcgctgaactgtcccagtacccaaacgatttcaaaagcattgtgaaccgttataatgaattggttgatacgacgggcctggagatggccaataaacacgtctttggtccacaagcgtcttctgaaactggcgtagcagaaggctacgttcttaaacccgtctatccgatcttctttaataccggtacgcgcgtggcgattaaatgcaagaactccaaattttcggagaaagccaagctggactcgccaattaaggcgaaggtggaactgacggagaacgataaacgtctgctcgaaatctttagcgagtatgttacctggaatcgcgtcagtaacgtactgtcacatattggctcagtgaccgcaaaagattttgggcgtgttatgggtctgacgatgaaagacatcattaatgaagcagcacgcgaaggccatgatctgttgttcgctgataacccgtcggcggtgctgaaggagctgaccattctcatccagaacacgattcgctccaaatggcacgaagttctggag

SEQ ID NO: 898 - protein, 346 aa, synthetic construct
  REGION 1..346: note = variant of RNA ligase 2 from Klebsiella phage KP179
MHHHHHHGGSNTFAYYSSLENHYNNKFIEKIRGAGFLMHTVEWVAREKIHGTNFSVIITPTEIVPAKRTGPILEGESFFGHEIIMKKYKDSFVKVQNMLRAMDLVSVQIFGEFAGGGIQKGVDYGDKDFYVFDILSDSGNEKVYWDDYRVESFCTTLGLKLAPLLGRGSFAELSQYPNDFKSIVNRYNELVDTTGLEMANKHVFGPQASSETGVAEGYVLKPVYPIFFNTGTRVAIKCKNSKFSEKAKLDSPIKAKVELTENDKRLLEIFSEYVTWNRVSNVLSHIGSVTAKDFGRVMGLTMKDIINEAAREGHDLLFADNPSAVLKELTILIQNTIRSKWHEVLE

SEQ ID NO: 899 - DNA, 1038 bp, synthetic construct
  misc_feature 1..1038: note = variant of RNA ligase 2 from Klebsiella phage KP179
  source 1..1038: mol_type = other DNA
atgcatcaccatcaccatcacggtggcagcaacacgtttgcgtattattcaagtctggaaaaccattacaataataagttcattgagaagatccgtggtgcaggcttcctgatgcacaccgtggaatgggtagctcgcgagaagattcatggaacgaactttagcgttatcattactccgaccgaaatcgtcccagccaaacgcacagggccgatcttggaaggcgagtcgttctttggtcacgaaattatcatgaaaaaatataaagactccttcgtgaaggtgcagaacatgctgaatgccatggatcttgttagcgtgcaaatctttggcgaatttgcgggtggtggcattcagaaaggcgtcgattacggagacaaagatttctatgtgtttgacatcctgtctgatagcgggaacgagaaagtttactgggatgactatcgcgtcgaatcgttttgcaccacgctcggtctgaaattagcgcctctgctgggacgtggtagtttcgctgaactgtcccagtacccaaacgatttcaaaagcattgtgaaccgttataatgaattggttgacaaggtcggcctggagatggccaataaacacgtctttggtccgcaagcgtcttctgaaactggcgtagcagaaggctacgttcttaaacccgtctatccgatcttctttaataccggtacgcgcgtggcgattaaatgcaagaactccaaattttcggagaaagccaagctggactcgccaattaaggcgaaggtggaactgacggagaacgataaacgtctgctcgaaatctttagcgagtatgttacctggaatcgcgtcagtaacgtactgtcacatattggctcagtgaccgcaaaagattttgggcgtgtttcgggtctgacgatgaaagacatcattaatgaagcagcacgcgaaggccatgatctgttgttcgctgataacccgtcggcggtgctgaaggagctgactattctcatccagaacacgattcgttccaaatggcacgaagttctggag

SEQ ID NO: 900 - protein, 346 aa, synthetic construct
  REGION 1..346: note = variant of RNA ligase 2 from Klebsiella phage KP179
MHHHHHHGGSNTFAYYSSLENHYNNKFIEKIRGAGFLMHTVEWVAREKIHGTNFSVIITPTEIVPAKRTGPILEGESFFGHEIIMKKYKDSFVKVQNMLNAMDLVSVQIFGEFAGGGIQKGVDYGDKDFYVFDILSDSGNEKVYWDDYRVESFCTTLGLKLAPLLGRGSFAELSQYPNDFKSIVNRYNELVDKVGLEMANKHVFGPQASSETGVAEGYVLKPVYPIFFNTGTRVAIKCKNSKFSEKAKLDSPIKAKVELTENDKRLLEIFSEYVTWNRVSNVLSHIGSVTAKDFGRVSGLTMKDIINEAAREGHDLLFADNPSAVLKELTILIQNTIRSKWHEVLE

SEQ ID NO: 901 - DNA, 1038 bp, synthetic construct
  misc_feature 1..1038: note = variant of RNA ligase 2 from Klebsiella phage KP179
  source 1..1038: mol_type = other DNA
atgcatcaccatcaccatcacggtggcagcaacacgtttgcgtattattcaagtctggaaaaccattacaataataagttcattgagaagatccgtggtgcaggcttcctgatgcacaccgtggaatgggtagctcgcgagaagattcatggaacgaactttagcgttatcattactccgaccgaaatcgtcccagccaaacgcacagggccgatcttggaaggcgagtcgttctttggtcacgaaattatcatgaaaaaatataaagactccttcgtgaaggtgcagaacatgctgaatgccatggatcttgttagcgtgcaaatctttggcgaatttgcgggtggtggcattcagaaaggcgtcgattacggagacaaagatttctatgtgtttgacatcctgtctgatagcgggaacgagaaagtttactgggatgactatcgcgtcgaatcgttttgcaccacgctcggtctgaaattagcgcctctgctgggacgtggtagtttcgctgaactgtcccagtacccaaacgatttcaaaagcattgtgaaccgttataatgaattggttgacacggtcggcctggagatggccaataaacacgtctttggtccgcaagcgtcttctgaaactggcgtagcagaaggctacgttcttaaacccgtctatccgatcttctttaataccggtacgcgcgtggcgattaaatgcaagaactccaaattttcggagaaagccaagctggactcgccaattaaggcgaaggtggaactgacggagaacgataaacgtctgctcgaaatctttagcgagtatgttacctggaatcgcgtcagtaacgtactgtcacatattggctcagtgaccgcaaaagattttgggcgtgtttcgggtctgacgatgaaagacatcattaatgaagcagcacgcgaaggccatgatctgttgttcgctgataacccgtcggcggtgctgaaggagctgactagcctcatccagaacacgattcgttccaaatggcacgaagttctggag

SEQ ID NO: 902 - protein, 346 aa, synthetic construct
  REGION 1..346: note = variant of RNA ligase 2 from Klebsiella phage KP179
MHHHHHHGGSNTFAYYSSLENHYNNKFIEKIRGAGFLMHTVEWVAREKIHGTNFSVIITPTEIVPAKRTGPILEGESFFGHEIIMKKYKDSFVKVQNMLNAMDLVSVQIFGEFAGGGIQKGVDYGDKDFYVFDILSDSGNEKVYWDDYRVESFCTTLGLKLAPLLGRGSFAELSQYPNDFKSIVNRYNELVDTVGLEMANKHVFGPQASSETGVAEGYVLKPVYPIFFNTGTRVAIKCKNSKFSEKAKLDSPIKAKVELTENDKRLLEIFSEYVTWNRVSNVLSHIGSVTAKDFGRVSGLTMKDIINEAAREGHDLLFADNPSAVLKELTSLIQNTIRSKWHEVLE

SEQ ID NO: 903 - DNA, 1038 bp, synthetic construct
  misc_feature 1..1038: note = variant of RNA ligase 2 from Klebsiella phage KP179
  source 1..1038: mol_type = other DNA
atgcatcaccatcaccatcacggtggcagcaacacgtttgcgtattattcaagtctggaaaaccattacaataataagttcattgagaagatccgtggtgcaggcttcctgatgcacaccgtggaatgggtagctcgcgagaagattcatggaacgaactttagcgttatcattactccgaccgaaatcgtcccagccaaacgcacagggccgatcttggaaggcgagtcgttctttggtcacgaaattatcatgaaaaaatataaagactccttcgtgaaggtgcagaacatgctgaatgccatggatcttgttagcgtgcaaatctttggcgaatttgcgggtggtggcattcagaaaggcgtcgattacggagacaaagatttctatgtgtttgacatcctgtctgatagcgggaacgagaaagtttactgggatgactatcgcgtcgaatcgttttgcaccactctcggtctgaaattagcgcctctgctgggacgtggtagtttcgctgaactgtcccagtacccaaacgatttcaaaagcattgtgaaccgttataatgaattggttgatacgacgggcctggagatggccaataaacacgtctttggtccgcaagcgtcttctgaaactggcgtagcagaaggctacgttcttaaacccgtctatccgatcttctttaataccggtacgcgcgtggcgattaaatgcaagaactccaaattttcggagaaagccaagctggactcgccaattaaggcgaaggtggaactgacggagaacgataaacgtctgctcgaaatctttagcgagtatgttacctggaatcgcgtcagtaacgtactgtcacatattggctcagtgaccgcaaaagattttgggcgtgttatgggtctgacgatgaaagacatcattaatgaagcagcacgcgaaggccatgatctgttgttcgctgataacccgtcggcggtgctgaaggagctgaccattctcatccagaacacgattctgtccaaatggcacgaagttctggag

SEQ ID NO: 904 - protein, 346 aa, synthetic construct
  REGION 1..346: note = variant of RNA ligase 2 from Klebsiella phage KP179
MHHHHHHGGSNTFAYYSSLENHYNNKFIEKIRGAGFLMHTVEWVAREKIHGTNFSVIITPTEIVPAKRTGPILEGESFFGHEIIMKKYKDSFVKVQNMLNAMDLVSVQIFGEFAGGGIQKGVDYGDKDFYVFDILSDSGNEKVYWDDYRVESFCTTLGLKLAPLLGRGSFAELSQYPNDFKSIVNRYNELVDTTGLEMANKHVFGPQASSETGVAEGYVLKPVYPIFFNTGTRVAIKCKNSKFSEKAKLDSPIKAKVELTENDKRLLEIFSEYVTWNRVSNVLSHIGSVTAKDFGRVMGLTMKDIINEAAREGHDLLFADNPSAVLKELTILIQNTILSKWHEVLE

SEQ ID NO: 905 - DNA, 1038 bp, synthetic construct
  misc_feature 1..1038: note = variant of RNA ligase 2 from Klebsiella phage KP179
  source 1..1038: mol_type = other DNA
atgcatcaccatcaccatcacggtggcagcaacacgtttgcgtattattcaagtctggaaaaccactacaataataagttcattgagaagatccgtggtgcaggcttcctgatgcacaccgtggaatgggtagctcgcgagaagattcatggaacgaactttagcgttatcattactccaaccgtaatcgtcccagccaaacgcacagggccgatcttggaaggcgagtcgttctttggtcacgaaattatcatgaaaaaatataaagactccttcgtgaaggtgcagaacatgctgaatgccatggatcttgttagcgtgcaaatctttggcgaatttgcgggtggtggcattcagaaaggcgtcgattacggagacaaggatttctatgtgtttgacatcctgtctgatagcgggaacgagaaagtttactgggatgactatcgcgtcgaatcgttttgcaccactctcggtctgaaattagcgcctctgctgggacgtggtagtttcgctgaactgtcccagtacccaaacgatttcaaaagcattgtgaaccgttataatgaattggttgatacgacgggcctggagatggccaataaacacgtctttggtccgcaagcgtcttctgaaactggcgtagcagaaggctacgttcttaaacccgtctatccgatcttctttaataccggtacgcgcgtggcgattaaatgcaagaactccaaattttcggagaaagccaagctggactcgccaattaaggcgaaggtggaactgacggagaacgataaacgtctgctcgaaatctttagcgagtatgttacctggaatcgcgtcagtaacgtactgtcacatattggctcagtgaccgcaaaagattttgggcgtgttatgggtctgacgatgaaagacatcattaatgaagcagcacgcgaaggccatgatctgttgttcgctgataacccgtcggcggtgctgaaggagctgaccattctcatccagaacacgattcgttccaaatggcacgaagttctggag

SEQ ID NO: 906 - protein, 346 aa, synthetic construct
  REGION 1..346: note = variant of RNA ligase 2 from Klebsiella phage KP179
MHHHHHHGGSNTFAYYSSLENHYNNKFIEKIRGAGFLMHTVEWVAREKIHGTNFSVIITPTVIVPAKRTGPILEGESFFGHEIIMKKYKDSFVKVQNMLNAMDLVSVQIFGEFAGGGIQKGVDYGDKDFYVFDILSDSGNEKVYWDDYRVESFCTTLGLKLAPLLGRGSFAELSQYPNDFKSIVNRYNELVDTTGLEMANKHVFGPQASSETGVAEGYVLKPVYPIFFNTGTRVAIKCKNSKFSEKAKLDSPIKAKVELTENDKRLLEIFSEYVTWNRVSNVLSHIGSVTAKDFGRVMGLTMKDIINEAAREGHDLLFADNPSAVLKELTILIQNTIRSKWHEVLE

SEQ ID NO: 907 - DNA, 1038 bp, synthetic construct
  misc_feature 1..1038: note = variant of RNA ligase 2 from Klebsiella phage KP179
  source 1..1038: mol_type = other DNA
atgcatcaccatcaccatcacggtggcagcaacacgtttgcgtattattcaagtctggaaaaccattacaataataagttcattgagaagatccgtggtgcaggcttcctgatgcacaccgtggaatgggtagctcgcgagaagattcatggaacgaactttagcgttatcattactccgaccgaaatcgtcccagccaaacgcacagggccgatcttggaaggcgagtcgttctttggtcacgaaattatcatgaaaaaatataaagactccttcgtgaaggtgcagaacatgctgaatgccatggatcttgttagcgtgcaaatctttggcgaatttgcgggtggtggcattcagaaaggcgtcgattacggagacaaagatttctatgtgtttgacatcctgtctgatagcgggaacgagaaagtttactgggatgactatcgcgtcgaatcgttttgcaccacgctcggtctgaaattagcgcctctgctgggacgtggtagtttcgctgaactgtcccagtacccaaacgatttcaaaagcattgtgaaccgttataatgaattggttgatacgacgggcctggagatggccaataaacacgtctttggtccgcaagcgtcttctgaaactggcgtagcagaaggctacgttcttaaacccgtctatccgatcttctttaataccggtacgcgcgtggcgattaaatgcaagaactccaaattttcggagaaaagtaagctggactcgccaattaaggcgaaggtggaactgacggagaacgataaacgtctgctcgaaatctttagcgagtatgttacctggaatcgcgtcagtaacgtactgtcacatattggctcagtgaccgcaaaagattttgggcgtgttatgggtctgacgatgaaagacatcattaatgaagcagcacgcgaaggccatgatctgttgttcgctgataacccgtcggcggtgctgaaggagctgaccattctcatccagaacacgattcgttccaaatggcacgaagttctggag

SEQ ID NO: 908 - protein, 346 aa, synthetic construct
  REGION 1..346: note = variant of RNA ligase 2 from Klebsiella phage KP179
MHHHHHHGGSNTFAYYSSLENHYNNKFIEKIRGAGFLMHTVEWVAREKIHGTNFSVIITPTEIVPAKRTGPILEGESFFGHEIIMKKYKDSFVKVQNMLNAMDLVSVQIFGEFAGGGIQKGVDYGDKDFYVFDILSDSGNEKVYWDDYRVESFCTTLGLKLAPLLGRGSFAELSQYPNDFKSIVNRYNELVDTTGLEMANKHVFGPQASSETGVAEGYVLKPVYPIFFNTGTRVAIKCKNSKFSEKSKLDSPIKAKVELTENDKRLLEIFSEYVTWNRVSNVLSHIGSVTAKDFGRVMGLTMKDIINEAAREGHDLLFADNPSAVLKELTILIQNTIRSKWHEVLE

SEQ ID NO: 909 - DNA, 1038 bp, synthetic construct
  misc_feature 1..1038: note = variant of RNA ligase 2 from Klebsiella phage KP179
  source 1..1038: mol_type = other DNA
atgcatcaccatcaccatcacggtggcagcaacacgtttgcgtattattcacatctggaaaaccattacaataataagttcattgagaagatccgtggtgcaggcttcctgatgcacaccgtggaatgggtagctcgcgagaagattcatggaacgaactttagcgttatcattactccgaccgaaatcgtcccagccaaacgcacagggccgatcttggaaggcgagtcgttctttggtcacgaaattatcatgaaaaaatataaagactccttcgtgaaggtgcagaacatgctgaatgccatggatcttgttagcgtgcaaatctttggcgaatttgcgggtggtggcattcagaaaggcgtcgattacggagacaaagatttctatgtgtttgacatcctgtctgatagcgggaacgagaaagtttactgggatgactatcgcgtcgaatcgttttgcaccacgctcggtctgaaattagcgcctctgctgggacgtggtagtttcgctgaactgtcccagtacccaaacgatttcaaaagcattgtgaaccgttataatgaattggttgatacgacgggcctggagatggccaataaacacgtctttggtccgcaagcgtcttctgaaactggcgtagcagaaggctacgttcttaaacccgtctatccgatcttctttaataccggtacgcgcgtggcgattaaatgcaagaactccaaattttcggagaaagccaagctggactcgccaattaaggcgaaggtggaactgacggagaacgataaacgtctgctcgaaatctttagcgagtatgttacctggaatcgcgtcagtaacgtactgtcacatattggctcagtgaccgcaaaagattttgggcgtgttatgggtctgacgatgaaagacatcattaatgaagcagcacgcgaaggccatgatctgttgttcgctgataacccgtcggcggtgctgaaggagctgaccattctcatccagaacacgattcgttccaaatggcacgaagttctggag

SEQ ID NO: 910 - protein, 346 aa, synthetic construct
  REGION 1..346: note = variant of RNA ligase 2 from Klebsiella phage KP179
MHHHHHHGGSNTFAYYSHLENHYNNKFIEKIRGAGFLMHTVEWVAREKIHGTNFSVIITPTEIVPAKRTGPILEGESFFGHEIIMKKYKDSFVKVQNMLNAMDLVSVQIFGEFAGGGIQKGVDYGDKDFYVFDILSDSGNEKVYWDDYRVESFCTTLGLKLAPLLGRGSFAELSQYPNDFKSIVNRYNELVDTTGLEMANKHVFGPQASSETGVAEGYVLKPVYPIFFNTGTRVAIKCKNSKFSEKAKLDSPIKAKVELTENDKRLLEIFSEYVTWNRVSNVLSHIGSVTAKDFGRVMGLTMKDIINEAAREGHDLLFADNPSAVLKELTILIQNTIRSKWHEVLE

SEQ ID NO: 911 - DNA, 1038 bp, synthetic construct
  misc_feature 1..1038: note = variant of RNA ligase 2 from Klebsiella phage KP179
  source 1..1038: mol_type = other DNA
atgcatcaccatcaccatcacggtggcagcaacacgtttgcgtattattcaagtctggaaaaccattacaataataagttcattgagaagatccgtggtgcaggcttcgcgatgcacaccgtggaatgggtagctcgcgagaagattcatggaacgaactttagcgttatcattactccgaccgaaatcgtcccagccaaacgcacagggccgatcttggaaggcgagtcgttctttggtcacgaaattatcatgaaaaaatataaagactccttcgtgaaggtgcagaacatgctgaatgccatggatcttgttagcgtgcaaatctttggcgaatttgcgggtggtggcattcagaaaggcgtcgattacggagacaaagatttctatgtgtttgacatcctgtctgatagcgggaacgagaaagtttactgggatgactatcgcgtcgaatcgttttgcaccacgctcggtctgaaattagcgcctctgctgggacgtggtagtttcgctgaactgtcccagtacccaaacgatttcaaaagcattgtgaaccgttataatgaattggttgatacgacgggcctggagatggccaataaacacgtctttggtccgcaagcgtcttctgaaactggcgtagcagaaggctacgttcttaaacccgtctatccgatcttctttaataccggtacgcgcgtggcgattaaatgcaagaactccaaattttcggagaaagccaagctggactcgccaattaaggcgaaggtggaactgacggagaacgataaacgtctgctcgaaatctttagcgagtatgttacctggaatcgcgtcagtaacgtactgtcacatattggctcagtgaccgcaaaagattttgggcgtgttatgggtctgacgatgaaagacatcattaatgaagcagcacgcgaaggccatgatctgttgttcgctgataacccgtcggcggtgctgaaggagctgaccattctcatccagaacacgattcgttccaaatggcacgaagttctggag

SEQ ID NO: 912 - protein, 346 aa, synthetic construct
  REGION 1..346: note = variant of RNA ligase 2 from Klebsiella phage KP179
MHHHHHHGGSNTFAYYSSLENHYNNKFIEKIRGAGFAMHTVEWVAREKIHGTNFSVIITPTEIVPAKRTGPILEGESFFGHEIIMKKYKDSFVKVQNMLNAMDLVSVQIFGEFAGGGIQKGVDYGDKDFYVFDILSDSGNEKVYWDDYRVESFCTTLGLKLAPLLGRGSFAELSQYPNDFKSIVNRYNELVDTTGLEMANKHVFGPQASSETGVAEGYVLKPVYPIFFNTGTRVAIKCKNSKFSEKAKLDSPIKAKVELTENDKRLLEIFSEYVTWNRVSNVLSHIGSVTAKDFGRVMGLTMKDIINEAAREGHDLLFADNPSAVLKELTILIQNTIRSKWHEVLE

SEQ ID NO: 913 - DNA, 1038 bp, synthetic construct
  misc_feature 1..1038: note = variant of RNA ligase 2 from Klebsiella phage KP179
  source 1..1038: mol_type = other DNA
atgcatcaccatcaccatcacggtggcagcaacacgtttgcgtattattcaagtctggaaaaccattacaataataagttcattgagaagatccgtggtgcaggcttcctgatgcacaccgtggaatgggtagctcgcgagaagattcatggaacgaactttagcgttatcattactccgaccgaaatcgtcccagccaaacgcacagggccgatcttggaaggcgagtcgttctttggtcacgaaattatcatgaaaaaatataaagactccttcgtgaaggtgcagaacatgctgaatgccatggatcttgttagcgtgcaaatctttggcgaatttgcgggtggtggcattcagaaaggcgtcgattacggagacaaagatttctatgtgtttgacatcctgtctgatagcgggaacgagaaagtttactgggatgactatcgcgtcgaatcgttttgcaccacgctcggtctgaaattagcgcctctgctgggacgtggtagtttcgctgaactgtcccagtacccaaacgatttcaaaagcattgtgaaccgttataatgaattggttgatacgacgggcctggagatggccaataaacacgtctttggtccgcaagcgtcttctgaaactggcgtagcagaaggctacgttcttaaacccgtctatccgatcttctttaataccggtacgcgcgtggcgattaaatgcaagaactccaaattttcggagaaagccaagctggactcgccaatttctgcgaaggtggaactgacggagaacgataaacgtctgctcgaaatctttagcgagtatgttacctggaatcgcgtcagtaacgtactgtcacatattggctcagtgaccgcaaaagattttgggcgtgttatgggtctgacgatgaaagacatcattaatgaagcagcacgcgaaggccatgatctgttgttcgctgataacccgtcggcggtgctgaaggagctgaccattctcatccagaacacgattcgttccaaatggcacgaagttctggag

SEQ ID NO: 914 - protein, 346 aa, synthetic construct
  REGION 1..346: note = variant of RNA ligase 2 from Klebsiella phage KP179
MHHHHHHGGSNTFAYYSSLENHYNNKFIEKIRGAGFLMHTVEWVAREKIHGTNFSVIITPTEIVPAKRTGPILEGESFFGHEIIMKKYKDSFVKVQNMLNAMDLVSVQIFGEFAGGGIQKGVDYGDKDFYVFDILSDSGNEKVYWDDYRVESFCTTLGLKLAPLLGRGSFAELSQYPNDFKSIVNRYNELVDTTGLEMANKHVFGPQASSETGVAEGYVLKPVYPIFFNTGTRVAIKCKNSKFSEKAKLDSPISAKVELTENDKRLLEIFSEYVTWNRVSNVLSHIGSVTAKDFGRVMGLTMKDIINEAAREGHDLLFADNPSAVLKELTILIQNTIRSKWHEVLE

SEQ ID NO: 915 - DNA, 1038 bp, synthetic construct
  misc_feature 1..1038: note = variant of RNA ligase 2 from Klebsiella phage KP179
  source 1..1038: mol_type = other DNA
atgcatcaccatcaccatcacggtggcagcaacacgtttgcgtattattcaagtctggaaaaccattacaataataagttcattgagaagatccgtcttgcaggcttcctgatgcacaccgtggaatgggtagctcgcgagaagattcatggaacgaactttagcgttatcattactccgaccgaaatcgtcccagccaaacgcacagggccgatcttggaaggcgagtcgttctttggtcacgaaattatcatgaaaaaatataaagactccttcgtgaaggtgcagaacatgctgaatgccatggatcttgttagcgtgcaaatctttggcgaatttgcgggtggtggcattcagaaaggcgtcgattacggagacaaagatttctatgtgtttgacatcctgtctgatagcgggaacgagaaagtttactgggatgactatcgcgtcgaatcgttttgcaccacgctcggtctgaaattagcgcctctgctgggacgtggtagtttcgctgaactgtcccagtacccaaacgatttcaaaagcattgtgaaccgttataatgaattggttgatacgacgggcctggagatggccaataaacacgtctttggtccgcaagcgtcttctgaaactggcgtagcagaaggctacgttcttaaacccgtctatccgatcttctttaataccggtacgcgcgtggcgattaaatgcaagaactccaaattttcggagaaagccaagctggactcgccaattaaggcgaaggtggaactgacggagaacgataaacgtctgctcgaaatctttagcgagtatgttacctggaatcgcgtcagtaacgtactgtcacatattggctcagtgaccgcaaaagattttgggcgtgttatgggtctgacgatgaaagacatcattaatgaagcagcacgcgaaggccatgatctgttgttcgctgataacccgtcggcggtgctgaaggagctgaccattctcatccagaacacgattcgttccaaatggcacgaagttctggag

SEQ ID NO: 916 - protein, 346 aa, synthetic construct
  REGION 1..346: note = variant of RNA ligase 2 from Klebsiella phage KP179
MHHHHHHGGSNTFAYYSSLENHYNNKFIEKIRLAGFLMHTVEWVAREKIHGTNFSVIITPTEIVPAKRTGPILEGESFFGHEIIMKKYKDSFVKVQNMLNAMDLVSVQIFGEFAGGGIQKGVDYGDKDFYVFDILSDSGNEKVYWDDYRVESFCTTLGLKLAPLLGRGSFAELSQYPNDFKSIVNRYNELVDTTGLEMANKHVFGPQASSETGVAEGYVLKPVYPIFFNTGTRVAIKCKNSKFSEKAKLDSPIKAKVELTENDKRLLEIFSEYVTWNRVSNVLSHIGSVTAKDFGRVMGLTMKDIINEAAREGHDLLFADNPSAVLKELTILIQNTIRSKWHEVLE

SEQ ID NO: 917 - DNA, 1038 bp, synthetic construct
  misc_feature 1..1038: note = variant of RNA ligase 2 from Klebsiella phage KP179
  source 1..1038: mol_type = other DNA
atgcatcaccatcaccatcacggtggcagcaacacgtttgcgtattattcaagtctggaaaaccattacaataataagttcattgagaagatccgtggtgcaggcttcctgatgcacaccgtggaatgggtagctcgcgagaagattcatggaacgaactttagcgttatcattactccgaccgaaatcgtcccagccaaacgcacagggccgatcttggaaggcgagtcgttctttggtcacgaaattatcatgaaaaaatataaagactccttcgtgaaggtgcagaacatgctgaatgccatggatcttgttagcgtgcaaatctttggcgaatttgcgggtggtggcattcagaaaggcgtcgattacggagacaaagatttctatgtgtttgacatcctgtctgatagcgggaacgagaaagtttactgggatgactatcgcgtcgaatcgttttgcaccacgctcggtctgaaattagcgcctctgctgggacgtggtagtttcgctgaactgtcccagtacccaaacgatttcaaaagcattgtgaaccgttataatgaattggttgatacgacgggcctggagatggccaataaacacgtctttggtccgcaagcgtcttctgaaactggcgtagcagaaggctacgttcttaaacccgtctatccgatcttctttaataccggtacgcgcgtggcgattaaatgcaagaactccaaattttcggagaaagccaagctggactcgccaattaaggcgaaggtggaactgacgacgaacgataaacgtctgctcgaaatctttagcgagtatgttacctggaatcgcgtcagtaacgtactgtcacatattggctcagtgaccgcaaaagattttgggcgtgttatgggtctgacgatgaaagacatcattaatgaagcagcacgcgaaggccatgatctgttgttcgctgataacccgtcggcggtgctgaaggagctgaccattctcatccagaacacgattcgttccaaatggcacgaagttctggag

SEQ ID NO: 918 - protein, 346 aa, synthetic construct
  REGION 1..346: note = variant of RNA ligase 2 from Klebsiella phage KP179
MHHHHHHGGSNTFAYYSSLENHYNNKFIEKIRGAGFLMHTVEWVAREKIHGTNFSVIITPTEIVPAKRTGPILEGESFFGHEIIMKKYKDSFVKVQNMLNAMDLVSVQIFGEFAGGGIQKGVDYGDKDFYVFDILSDSGNEKVYWDDYRVESFCTTLGLKLAPLLGRGSFAELSQYPNDFKSIVNRYNELVDTTGLEMANKHVFGPQASSETGVAEGYVLKPVYPIFFNTGTRVAIKCKNSKFSEKAKLDSPIKAKVELTTNDKRLLEIFSEYVTWNRVSNVLSHIGSVTAKDFGRVMGLTMKDIINEAAREGHDLLFADNPSAVLKELTILIQNTIRSKWHEVLE

SEQ ID NO: 919 - DNA, 1038 bp, synthetic construct
  misc_feature 1..1038: note = variant of RNA ligase 2 from Klebsiella phage KP179
  source 1..1038: mol_type = other DNA
atgcatcaccatcaccatcacggtggcagcaacacgtttgcgtattattcaagtctggaaaaccattacaataataagttcattgagaagatccgtggtgcaggcttcctgatgcacaccgtggaatgggtagctcgcgagaagattcatggaacgaactttagcgttatcattactccgaccgaaatcgtcccagccaaacgcacagggccgatcttggaaggcgagtcgttctttggtcacgaaattatcatgaaaaaatataaagactccttcgtgaaggtgcagaacatgctgaatgccatggatcttgttagcgtgcaaatctttggcgaatttgcgggtggtggcattcagaaaggcgtcgattacggagacaaagatttctatgtgtttgacatcctgtctgatagcgggaacgagaaagtttactgggatgactatcgcgtcgaatcgttttgcaccacgctcggtctgaaattagcgcctctgctgggacgtggtagtttcgctgaactgtcccagtacccaaacgatttcaaaagcattgtgaaccgttataatgaattggttgatacgacgggcctggagatggccaataaacacgtctttggtccgcaagcgtcttctgaaactggcgtagcagaaggctacgttcttaaacccgtctatccgatcttctttaataccggtacgcgcgtggcgattaaatgcaagaactccaaattttcggagaaagccaagctggactatccaattaaggcgaaggtggaactgacggagaacgataaacgtctgctcgaaatctttagcgagtatgttacctggaatcgcgtcagtaacgtactgtcacatattggctcagtgaccgcaaaagattttgggcgtgttatgggtctgacgatgaaagacatcattaatgaagcagcacgcgaaggccatgatctgttgttcgctgataacccgtcggcggtgctgaaggagctgaccattctcatccagaacacgattcgttccaaatggcacgaagttctggag

SEQ ID NO: 920 - protein, 346 aa, synthetic construct
  REGION 1..346: note = variant of RNA ligase 2 from Klebsiella phage KP179
MHHHHHHGGSNTFAYYSSLENHYNNKFIEKIRGAGFLMHTVEWVAREKIHGTNFSVIITPTEIVPAKRTGPILEGESFFGHEIIMKKYKDSFVKVQNMLNAMDLVSVQIFGEFAGGGIQKGVDYGDKDFYVFDILSDSGNEKVYWDDYRVESFCTTLGLKLAPLLGRGSFAELSQYPNDFKSIVNRYNELVDTTGLEMANKHVFGPQASSETGVAEGYVLKPVYPIFFNTGTRVAIKCKNSKFSEKAKLDYPIKAKVELTENDKRLLEIFSEYVTWNRVSNVLSHIGSVTAKDFGRVMGLTMKDIINEAAREGHDLLFADNPSAVLKELTILIQNTIRSKWHEVLE

SEQ ID NO: 921 - DNA, 1038 bp, synthetic construct
  misc_feature 1..1038: note = variant of RNA ligase 2 from Klebsiella phage KP179
  source 1..1038: mol_type = other DNA
atgcatcaccatcaccatcacggtggcagcaacacgtttgcgtattattcaagtctggaaaaccattacaataataagttcattgagaagatccgtggtgcaggcttcctgatgcacaccgtggaatgggtagctcgcgagaagattcatggaacgaactttagcgttatcattactccgaccgaaatcgtcccagccaaacgcacagggccgatcttggaaggcgagtcgttctttggtcacgaaattatcatgaaaaaatataaagactccttcgtgaaggtgcagaacatgctgaatgccatggatcttgttagcgtgcaaatctttggcgaatttgcgggtggtggcattcagaaaggcgtcgattacggagacaaagatttctatgtgtttgacatcctgtctgatagcgggaacgagaaagtttactgggatgactatcgcgtcgaatcgttttgcaccacgctcggtctgaaattagcgcctctgctgggacgtggtagtttcgctgaactgtcccagtacccaaacgatttcaaaagcattgtgaaccgttataatgaattggttgatacgacgggcctggagatggccaataaacacgtctttggtccgcaagcgtcttctgaaactggcgtagcagaaggctacgttcttaaacccgtctatccgatcttctttaataccggtacgcgcgtggcgattaaatgcaagaactccaaattttcggagaaagccaagctggactcgccaattaaggcgaaggtggaactgggtgagaacgataaacgtctgctcgaaatctttagcgagtatgttacctggaatcgcgtcagtaacgtactgtcacatattggctcagtgaccgcaaaagattttgggcgtgttatgggtctgacgatgaaagacatcattaatgaagcagcacgcgaaggccatgatctgttgttcgctgataacccgtcggcggtgctgaaggagctgaccattctcatccagaacacgattcgttccaaatggcacgaagttctggag

SEQ ID NO: 922 - protein, 346 aa, synthetic construct
  REGION 1..346: note = variant of RNA ligase 2 from Klebsiella phage KP179
MHHHHHHGGSNTFAYYSSLENHYNNKFIEKIRGAGFLMHTVEWVAREKIHGTNFSVIITPTEIVPAKRTGPILEGESFFGHEIIMKKYKDSFVKVQNMLNAMDLVSVQIFGEFAGGGIQKGVDYGDKDFYVFDILSDSGNEKVYWDDYRVESFCTTLGLKLAPLLGRGSFAELSQYPNDFKSIVNRYNELVDTTGLEMANKHVFGPQASSETGVAEGYVLKPVYPIFFNTGTRVAIKCKNSKFSEKAKLDSPIKAKVELGENDKRLLEIFSEYVTWNRVSNVLSHIGSVTAKDFGRVMGLTMKDIINEAAREGHDLLFADNPSAVLKELTILIQNTIRSKWHEVLE

SEQ ID NO: 923 - DNA, 1038 bp, synthetic construct
  misc_feature 1..1038: note = variant of RNA ligase 2 from Klebsiella phage KP179
  source 1..1038: mol_type = other DNA
atgcatcaccatcaccatcacggtggcagcaacacgtttgcgtattattcaagtctggaaaaccattacaataataagttcattgagaagatccgtggtgcaggcttcctgatgcacaccgtggaatgggtagctcgcgagaagattcatggaacgaactttagcgttatcattactccgaccgaaatcgtcccagccaaacgcacagggccgatcttggaaggcgagtcgttctttggtcacgaaattatcatgaaaaaatataaagactccttcgtgaaggtgcagaacatgctgaatgccatggatcttgttagcgtgcaaatctttggcgaatttgcgggtggtggcattcagaaaggcgtcgattacggagacaaagatttctatgtgtttgacatcctgtctgatagcgggaacgagaaagtttactgggatgactatcgcgtcgaatcgttttgcaccacgctcggtctgaaattagcgcctctgctgggacgtggtagtttcgctgaactgtcccagtacccaaacgatttcaaaagcattgtgaaccgttataatgaattggttgatacgacgggcctggagatggccaataaacacgtctttggtccgcaagcgtcttctgaaactggcgtagcagaaggctacgttcttaaacccgtctatccgatcttctttaataccggtacgcgcgtggcgattaaatgcaagaactccaaattttcggagaaagccaagctggactgtccaattaaggcgaaggtggaactgacggagaacgataaacgtctgctcgaaatctttagcgagtatgttacctggaatcgcgtcagtaacgtactgtcacatattggctcagtgaccgcaaaagattttgggcgtgttatgggtctgacgatgaaagacatcattaatgaagcagcacgcgaaggccatgatctgttgttcgctgataacccgtcggcggtgctgaaggagctgaccattctcatccagaacacgattcgttccaaatggcacgaagttctggag

SEQ ID NO: 924 - protein, 346 aa, synthetic construct
  REGION 1..346: note = variant of RNA ligase 2 from Klebsiella phage KP179
MHHHHHHGGSNTFAYYSSLENHYNNKFIEKIRGAGFLMHTVEWVAREKIHGTNFSVIITPTEIVPAKRTGPILEGESFFGHEIIMKKYKDSFVKVQNMLNAMDLVSVQIFGEFAGGGIQKGVDYGDKDFYVFDILSDSGNEKVYWDDYRVESFCTTLGLKLAPLLGRGSFAELSQYPNDFKSIVNRYNELVDTTGLEMANKHVFGPQASSETGVAEGYVLKPVYPIFFNTGTRVAIKCKNSKFSEKAKLDCPIKAKVELTENDKRLLEIFSEYVTWNRVSNVLSHIGSVTAKDFGRVMGLTMKDIINEAAREGHDLLFADNPSAVLKELTILIQNTIRSKWHEVLE

SEQ ID NO: 925 - DNA, 1038 bp, synthetic construct
  misc_feature 1..1038: note = variant of RNA ligase 2 from Klebsiella phage KP179
  source 1..1038: mol_type = other DNA
atgcatcaccatcaccatcacggtggcagcaacaggtttgcgtattattcaagtctggaaaaccattacaataataagttcattgagaagatccgtggtgcaggcttcctgatgcacaccgtggaatgggtagctcgcgagaagattcatggaacgaactttagcgttatcattactccgaccgaaatcgtcccagccaaacgcacagggccgatcttggaaggcgagtcgttctttggtcacgaaattatcatgaaaaaatataaagactccttcgtgaaggtgcagaacatgctgaatgccatggatcttgttagcgtgcaaatctttggcgaatttgcgggtggtggcattcagaaaggcgtcgattacggagacaaagatttctatgtgtttgacatcctgtctgatagcgggaacgagaaagtttactgggatgactatcgcgtcgaatcgttttgcaccacgctcggtctgaaattagcgcctctgctgggacgtggtagtttcgctgaactgtcccagtacccaaacgatttcaaaagcattgtgaaccgttataatgaattggttgatacgacgggcctggagatggccaataaacacgtctttggtccgcaagcgtcttctgaaactggcgtagcagaaggctacgttcttaaacccgtctatccgatcttctttaataccggtacgcgcgtggcgattaaatgcaagaactccaaattttcggagaaagccaagctggactcgccaattaaggcgaaggtggaactgacggagaacgataaacgtctgctcgaaatctttagcgagtatgttacctggaatcgcgtcagtaacgtactgtcacatattggctcagtgaccgcaaaagattttgggcgtgttatgggtctgacgatgaaagacatcattaatgaagcagcacgcgaaggccatgatctgttgttcgctgataacccgtcggcggtgctgaaggagctgaccattctcatccagaacacgattcgttccaaatggcacgaagttctggag

SEQ ID NO: 926 - protein, 346 aa, synthetic construct
  REGION 1..346: note = variant of RNA ligase 2 from Klebsiella phage KP179
MHHHHHHGGSNRFAYYSSLENHYNNKFIEKIRGAGFLMHTVEWVAREKIHGTNFSVIITPTEIVPAKRTGPILEGESFFGHEIIMKKYKDSFVKVQNMLNAMDLVSVQIFGEFAGGGIQKGVDYGDKDFYVFDILSDSGNEKVYWDDYRVESFCTTLGLKLAPLLGRGSFAELSQYPNDFKSIVNRYNELVDTTGLEMANKHVFGPQASSETGVAEGYVLKPVYPIFFNTGTRVAIKCKNSKFSEKAKLDSPIKAKVELTENDKRLLEIFSEYVTWNRVSNVLSHIGSVTAKDFGRVMGLTMKDIINEAAREGHDLLFADNPSAVLKELTILIQNTIRSKWHEVLE

SEQ ID NO: 927 - DNA, 1038 bp, synthetic construct
  misc_feature 1..1038: note = variant of RNA ligase 2 from Klebsiella phage KP179
  source 1..1038: mol_type = other DNA
atgcatcaccatcaccatcacggtggcagcaacacgtttgcgtattattcaagtctggaaaaccattacaataataagttcattgagaagatccgtggtgcaggcttcctgatgcacaccgtggaatgggtagctcgcgagaagattcatggaacgaactttagcgttatcattactccgaccgaaatcgtcccagccaaacgcacagggccgatcttggaaggcgagtcgttctttggtcacgaaattatcatgaaaaaatataaagactccttcgtgaaggtgcagaacatgctgaatgccatggatcttgttagcgtgcaaatctttggcgaatttgcgggtggtgctattcagaaaggcgtcgattacggagacaaagatttctatgtgtttgacatcctgtctgatagcgggaacgagaaagtttactgggatgactatcgcgtcgaatcgttttgcaccacgctcggtctgaaattagcgcctctgctgggacgtggtagtttcgctgaactgtcccagtacccaaacgatttcaaaagcattgtgaaccgttataatgaattggttgatacgacgggcctggagatggccaataaacacgtctttggtccgcaagcgtcttctgaaactggcgtagcagaaggctacgttcttaaacccgtctatccgatcttctttaataccggtacgcgcgtggcgattaaatgcaagaactccaaattttcggagaaagccaagctggactcgccaattaaggcgaaggtggaactgacggagaacgataaacgtctgctcgaaatctttagcgagtatgttacctggaatcgcgtcagtaacgtactgtcacatattggctcagtgaccgcaaaagattttgggcgtgttatgggtctgacgatgaaagacatcattaatgaagcagcacgcgaaggccatgatctgttgttcgctgataacccgtcggcggtgctgaaggagctgaccattctcatccagaacacgattcgttccaaatggcacgaagttctggag

SEQ ID NO: 928 - protein, 346 aa, synthetic construct
  REGION 1..346: note = variant of RNA ligase 2 from Klebsiella phage KP179
MHHHHHHGGSNTFAYYSSLENHYNNKFIEKIRGAGFLMHTVEWVAREKIHGTNFSVIITPTEIVPAKRTGPILEGESFFGHEIIMKKYKDSFVKVQNMLNAMDLVSVQIFGEFAGGAIQKGVDYGDKDFYVFDILSDSGNEKVYWDDYRVESFCTTLGLKLAPLLGRGSFAELSQYPNDFKSIVNRYNELVDTTGLEMANKHVFGPQASSETGVAEGYVLKPVYPIFFNTGTRVAIKCKNSKFSEKAKLDSPIKAKVELTENDKRLLEIFSEYVTWNRVSNVLSHIGSVTAKDFGRVMGLTMKDIINEAAREGHDLLFADNPSAVLKELTILIQNTIRSKWHEVLE

SEQ ID NO: 929 - DNA, 1038 bp, synthetic construct
  misc_feature 1..1038: note = variant of RNA ligase 2 from Klebsiella phage KP179
  source 1..1038: mol_type = other DNA
atgcatcaccatcaccatcacggtggcagcaacacgtttgcgtattattcaagtctggaaaaccattacaataataagttcattgagaagatccgtggtgcaggcttcctgatgcacaccgtggaatgggtagctcgcgagaagattcatggaacgaactttagcgttatcattactccgaccgaaatcgtcccagccaaacgcacagggccgatcttggaaggcgagtcgttctttggtcacgaaattatcatgaaaaaatataaagactccttcgtgaaggtgcagaacatgctgaatgccatggatcttgttagcgtgcaaatctttggcgaatttgcgggtggtggcattcagaaaggcgtcgattacggagacaaagatttctatgtgtttgacatcctgtctgatagcgggaacgagaaagtttactgggatgactatcgcgtcgaatcgttttgcaccacgctcggtctgaaattagcgcctctgctgggacgtggtagtttcgctgaactgtcccagtacccaaacgatttcaaaagcattgtgaaccgttataatgaattggttgatacgacgggcctggagatggccaataaacacgtctttggtccgcaagcgtcttctgaaactggcgtagcagaaggctacgttcttaaacccgtctatccgatcttctttaataccggtacgcgcgtggcgattaaatgcaagaactccaaattttcggagaaagccaagctggactcgccaattaaggcgagtgtggaactgacggagaacgataaacgtctgctcgaaatctttagcgagtatgttacctggaatcgcgtcagtaacgtactgtcacatattggctcagtgaccgcaaaagattttgggcgtgttatgggtctgacgatgaaagacatcattaatgaagcagcacgcgaaggccatgatctgttgttcgctgataacccgtcggcggtgctgaaggagctgaccattctcatccagaacacgattcgttccaaatggcacgaagttctggag

SEQ ID NO: 930 - protein, 346 aa, synthetic construct
  REGION 1..346: note = variant of RNA ligase 2 from Klebsiella phage KP179
MHHHHHHGGSNTFAYYSSLENHYNNKFIEKIRGAGFLMHTVEWVAREKIHGTNFSVIITPTEIVPAKRTGPILEGESFFGHEIIMKKYKDSFVKVQNMLNAMDLVSVQIFGEFAGGGIQKGVDYGDKDFYVFDILSDSGNEKVYWDDYRVESFCTTLGLKLAPLLGRGSFAELSQYPNDFKSIVNRYNELVDTTGLEMANKHVFGPQASSETGVAEGYVLKPVYPIFFNTGTRVAIKCKNSKFSEKAKLDSPIKASVELTENDKRLLEIFSEYVTWNRVSNVLSHIGSVTAKDFGRVMGLTMKDIINEAAREGHDLLFADNPSAVLKELTILIQNTIRSKWHEVLE

SEQ ID NO: 931 - DNA, 1038 bp, synthetic construct
  misc_feature 1..1038: note = variant of RNA ligase 2 from Klebsiella phage KP179
  source 1..1038: mol_type = other DNA
atgcatcaccatcaccatcacggtggcagcaacacgtttgcgtattattcaagtctggaaaaccattacaataataagttcattgagaagatccgtggtgcaggcttcctgatgcacaccgtggaatgggtagctcgcgagaagattcatggaacgaactttagcgttatcattactccgaccgaaatcgtcccagccaaacgcacagggccgatcttggaaggcgagtcgttctttggtcacgaaattatcatgaaaaaatataaagactccttcgtgaaggtgcagaacatgctgaatgccatggatcttgttagcgtgcaaatctttggcgaatttgcgggtggtggcattcagaaaggcgtcgattacggagacaaagatttctatgtgtttgacatcctgtctgatagcgggaacgagaaagtttactgggatgactatcgcgtcgaatcgttttgcaccacgctcggtctgaaattagcgcctctgctgggacgtggtagtttcgctgaactgtcccagtacccaaacgatttcaaaagcattgtgaaccgttataatgaattggttgatacgacgggcctggagatggccaataaacacgtctttggtccgcaagcgtcttctgaaactggcgtagcagaaggctacgttcttaaacccgtctatccgatcttctttaataccggtacgcgcgtggcgattaaatgcaagaactccaaattttcggagaaagccaagctggactcgccaattaagtataaggtggaactgacggagaacgataaacgtctgctcgaaatctttagcgagtatgttacctggaatcgcgtcagtaacgtactgtcacatattggctcagtgaccgcaaaagattttgggcgtgttatgggtctgacgatgaaagacatcattaatgaagcagcacgcgaaggccatgatctgttgttcgctgataacccgtcggcggtgctgaaggagctgaccattctcatccagaacacgattcgttccaaatggcacgaagttctggag

SEQ ID NO: 932 - protein, 346 aa, synthetic construct
  REGION 1..346: note = variant of RNA ligase 2 from Klebsiella phage KP179
MHHHHHHGGSNTFAYYSSLENHYNNKFIEKIRGAGFLMHTVEWVAREKIHGTNFSVIITPTEIVPAKRTGPILEGESFFGHEIIMKKYKDSFVKVQNMLNAMDLVSVQIFGEFAGGGIQKGVDYGDKDFYVFDILSDSGNEKVYWDDYRVESFCTTLGLKLAPLLGRGSFAELSQYPNDFKSIVNRYNELVDTTGLEMANKHVFGPQASSETGVAEGYVLKPVYPIFFNTGTRVAIKCKNSKFSEKAKLDSPIKYKVELTENDKRLLEIFSEYVTWNRVSNVLSHIGSVTAKDFGRVMGLTMKDIINEAAREGHDLLFADNPSAVLKELTILIQNTIRSKWHEVLE

SEQ ID NO: 933 - DNA, 1038 bp, synthetic construct
  misc_feature 1..1038: note = variant of RNA ligase 2 from Klebsiella phage KP179
  source 1..1038: mol_type = other DNA
atgcatcaccatcaccatcacggtggcagcaacacgtttgcgtattattcaagtctggaaaaccattacaataataagttcattgagaagatccgtggtgcaggcttcctgatgcacaccgtggaatgggtagctcgcgagaagattcatggaacgaactttagcgttatcattactccgaccgaaatcgtcccagccaaacgcacagggccgatcttggaaggcgagtcgttctttggtcacgaaattatcatgaaaaaatataaagactccttcgtgaaggtgcagaacatgctgaatgccatggatcttgttagcgtgcaaatctttggcgaatttgcgggtggtggcattcagaaaggcgtcgattacggagacaaagatttctatgtgtttgacatcctgtctgatagcgggaacgagaaagtttactgggatgactatcgcgtcgaatcgttttgcaccacgctcggtctgaaattagcgcctctgctgggacgtggtagtttcgctgaactgtcccagtacccaaacgatttcaaaagcattgtgaaccgttataatgaattggttgatacgacgggcctggagatggccaataaacacgtctttggtccgcaagcgtcttctgaaactggcgtagcagaaggctacgttcttaaacccgtctatccgatcttctttaataccggtacgcgcgtggcgattaaatgcaagaactccaaattttcggagaaagccaagctggactcgccaattaagtctaaggtggaactgacggagaacgataaacgtctgctcgaaatctttagcgagtatgttacctggaatcgcgtcagtaacgtactgtcacatattggctcagtgaccgcaaaagattttgggcgtgttatgggtctgacgatgaaagacatcattaatgaagcagcacgcgaaggccatgatctgttgttcgctgataacccgtcggcggtgctgaaggagctgaccattctcatccagaacacgattcgttccaaatggcacgaagttctggag

SEQ ID NO: 934 - protein, 346 aa, synthetic construct
  REGION 1..346: note = variant of RNA ligase 2 from Klebsiella phage KP179
MHHHHHHGGSNTFAYYSSLENHYNNKFIEKIRGAGFLMHTVEWVAREKIHGTNFSVIITPTEIVPAKRTGPILEGESFFGHEIIMKKYKDSFVKVQNMLNAMDLVSVQIFGEFAGGGIQKGVDYGDKDFYVFDILSDSGNEKVYWDDYRVESFCTTLGLKLAPLLGRGSFAELSQYPNDFKSIVNRYNELVDTTGLEMANKHVFGPQASSETGVAEGYVLKPVYPIFFNTGTRVAIKCKNSKFSEKAKLDSPIKSKVELTENDKRLLEIFSEYVTWNRVSNVLSHIGSVTAKDFGRVMGLTMKDIINEAAREGHDLLFADNPSAVLKELTILIQNTIRSKWHEVLE

SEQ ID NO: 935 - DNA, 1038 bp, synthetic construct
  misc_feature 1..1038: note = variant of RNA ligase 2 from Klebsiella phage KP179
  source 1..1038: mol_type = other DNA
atgcatcaccatcaccatcacggtggcagcaacacgtttgcgtattattcaagtctggaaaaccattacaataataagttcattgagaagatccgtggtgcaggcttcctggagcacaccgtggaatgggtagctcgcgagaagattcatggaacgaactttagcgttatcattactccgaccgaaatcgtcccagccaaacgcacagggccgatcttggaaggcgagtcgttctttggtcacgaaattatcatgaaaaaatataaagactccttcgtgaaggtgcagaacatgctgaatgccatggatcttgttagcgtgcaaatctttggcgaatttgcgggtggtggcattcagaaaggcgtcgattacggagacaaagatttctatgtgtttgacatcctgtctgatagcgggaacgagaaagtttactgggatgactatcgcgtcgaatcgttttgcaccacgctcggtctgaaattagcgcctctgctgggacgtggtagtttcgctgaactgtcccagtacccaaacgatttcaaaagcattgtgaaccgttataatgaattggttgatacgacgggcctggagatggccaataaacacgtctttggtccgcaagcgtcttctgaaactggcgtagcagaaggctacgttcttaaacccgtctatccgatcttctttaataccggtacgcgcgtggcgattaaatgcaagaactccaaattttcggagaaagccaagctggactcgccaattaaggcgaaggtggaactgacggagaacgataaacgtctgctcgaaatctttagcgagtatgttacctggaatcgcgtcagtaacgtactgtcacatattggctcagtgaccgcaaaagattttgggcgtgttatgggtctgacgatgaaagacatcattaatgaagcagcacgcgaaggccatgatctgttgttcgctgataacccgtcggcggtgctgaaggagctgaccattctcatccagaacacgattcgttccaaatggcacgaagttctggag

SEQ ID NO: 936 - protein, 346 aa, synthetic construct
  REGION 1..346: note = variant of RNA ligase 2 from Klebsiella phage KP179
MHHHHHHGGSNTFAYYSSLENHYNNKFIEKIRGAGFLEHTVEWVAREKIHGTNFSVIITPTEIVPAKRTGPILEGESFFGHEIIMKKYKDSFVKVQNMLNAMDLVSVQIFGEFAGGGIQKGVDYGDKDFYVFDILSDSGNEKVYWDDYRVESFCTTLGLKLAPLLGRGSFAELSQYPNDFKSIVNRYNELVDTTGLEMANKHVFGPQASSETGVAEGYVLKPVYPIFFNTGTRVAIKCKNSKFSEKAKLDSPIKAKVELTENDKRLLEIFSEYVTWNRVSNVLSHIGSVTAKDFGRVMGLTMKDIINEAAREGHDLLFADNPSAVLKELTILIQNTIRSKWHEVLE

SEQ ID NO: 937 - DNA, 1038 bp, synthetic construct
  misc_feature 1..1038: note = variant of RNA ligase 2 from Klebsiella phage KP179
  source 1..1038: mol_type = other DNA
atgcatcaccatcaccatcacggtggcagcaacatgtttgcgtattattcaagtctggaaaaccattacaataataagttcattgagaagatccgtggtgcaggcttcctgatgcacaccgtggaatgggtagctcgcgagaagattcatggaacgaactttagcgttatcattactccgaccgaaatcgtcccagccaaacgcacagggccgatcttggaaggcgagtcgttctttggtcacgaaattatcatgaaaaaatataaagactccttcgtgaaggtgcagaacatgctgaatgccatggatcttgttagcgtgcaaatctttggcgaatttgcgggtggtggcattcagaaaggcgtcgattacggagacaaagatttctatgtgtttgacatcctgtctgatagcgggaacgagaaagtttactgggatgactatcgcgtcgaatcgttttgcaccacgctcggtctgaaattagcgcctctgctgggacgtggtagtttcgctgaactgtcccagtacccaaacgatttcaaaagcattgtgaaccgttataatgaattggttgatacgacgggcctggagatggccaataaacacgtctttggtccgcaagcgtcttctgaaactggcgtagcagaaggctacgttcttaaacccgtctatccgatcttctttaataccggtacgcgcgtggcgattaaatgcaagaactccaaattttcggagaaagccaagctggactcgccaattaaggcgaaggtggaactgacggagaacgataaacgtctgctcgaaatctttagcgagtatgttacctggaatcgcgtcagtaacgtactgtcacatattggctcagtgaccgcaaaagattttgggcgtgttatgggtctgacgatgaaagacatcattaatgaagcagcacgcgaaggccatgatctgttgttcgctgataacccgtcggcggtgctgaaggagctgaccattctcatccagaacacgattcgttccaaatggcacgaagttctggag

SEQ ID NO: 938 - protein, 346 aa, synthetic construct
  REGION 1..346: note = variant of RNA ligase 2 from Klebsiella phage KP179
MHHHHHHGGSNMFAYYSSLENHYNNKFIEKIRGAGFLMHTVEWVAREKIHGTNFSVIITPTEIVPAKRTGPILEGESFFGHEIIMKKYKDSFVKVQNMLNAMDLVSVQIFGEFAGGGIQKGVDYGDKDFYVFDILSDSGNEKVYWDDYRVESFCTTLGLKLAPLLGRGSFAELSQYPNDFKSIVNRYNELVDTTGLEMANKHVFGPQASSETGVAEGYVLKPVYPIFFNTGTRVAIKCKNSKFSEKAKLDSPIKAKVELTENDKRLLEIFSEYVTWNRVSNVLSHIGSVTAKDFGRVMGLTMKDIINEAAREGHDLLFADNPSAVLKELTILIQNTIRSKWHEVLE

SEQ ID NO: 939 - DNA, 1038 bp, synthetic construct
  misc_feature 1..1038: note = variant of RNA ligase 2 from Klebsiella phage KP179
  source 1..1038: mol_type = other DNA
atgcatcaccatcaccatcacggtggcagcaacacgtttgcgtattattcaagtctggaaaaccattacaataataagttcattgagaagatccgtggtgcaggcttcctgatgcacaccgtggaatgggtagctcgcgagaagattcatggaacgaactttagcgttatcattactccgaccgaaatcgtcccagccaaacgcacagggccgatcttggaaggcgagtcgttctttggtcacgaaattatcatgaaaaaatataaagactccttcgtgaaggtgcagaacatgctgaatgccatggatcttgttagcgtgcaaatctttggcgaatttgcgggtggtggcattcagaaaggcgtcgattacggagacaaagatttctatgtgtttgacatcctgtctgatagcgggaacgagaaagtttactgggatgactatcgcgtcgaatcgttttgcaccacgctcggtctgaaattagcgcctctgctgggacgtggtagtttcgctgaactgtcccagtacccaaacgatttcaaaagcattgtgaaccgttataatgaattggttgatacgacgggcctggagatggccaataaacacgtctttggtccgcaagcgtcttctgaaactggcgtagcagaaggctacgttcttaaacccgtctatccgatcttctttaataccggtacgcgcgtggcgattaaatgcaagaactccaaattttcggagaaagccaagctggacacgccaattaaggcgaaggtggaactgacggagaacgataaacgtctgctcgaaatctttagcgagtatgttacctggaatcgcgtcagtaacgtactgtcacatattggctcagtgaccgcaaaagattttgggcgtgttatgggtctgacgatgaaagacatcattaatgaagcagcacgcgaaggccatgatctgttgttcgctgataacccgtcggcggtgctgaaggagctgaccattctcatccagaacacgattcgttccaaatggcacgaagttctggag

SEQ ID NO: 940 - protein, 346 aa, synthetic construct
  REGION 1..346: note = variant of RNA ligase 2 from Klebsiella phage KP179
MHHHHHHGGSNTFAYYSSLENHYNNKFIEKIRGAGFLMHTVEWVAREKIHGTNFSVIITPTEIVPAKRTGPILEGESFFGHEIIMKKYKDSFVKVQNMLNAMDLVSVQIFGEFAGGGIQKGVDYGDKDFYVFDILSDSGNEKVYWDDYRVESFCTTLGLKLAPLLGRGSFAELSQYPNDFKSIVNRYNELVDTTGLEMANKHVFGPQASSETGVAEGYVLKPVYPIFFNTGTRVAIKCKNSKFSEKAKLDTPIKAKVELTENDKRLLEIFSEYVTWNRVSNVLSHIGSVTAKDFGRVMGLTMKDIINEAAREGHDLLFADNPSAVLKELTILIQNTIRSKWHEVLE

SEQ ID NO: 941 - DNA, 1038 bp, synthetic construct
  misc_feature 1..1038: note = variant of RNA ligase 2 from Klebsiella phage KP179
  source 1..1038: mol_type = other DNA
atgcatcaccatcaccatcacggtggcagcaacacgtttgcgtattattcaagtctggaaaaccattacaataataagttcattgagaagatccgtggtgcaggcttcctgatgcacaccgtggaatgggtagctcgcgagaagattcatggaacgaactttagcgttatcattactccgaccgaaatcgtcccagccaaacgcacagggccgatcttggaaggcgagtcgttctttggtcacgaaattatcatgaaaaaatataaagactccttcgtgaaggtgcagaacatgctgaatgccatggatcttgttagcgtgcaaatctttggcgaatttgcgggtggtggcattcagaaaggcgtcgattacggagacaaagatttctatgtgtttgacatcctgtctgatagcgggaacgagaaagtttactgggatgactatcgcgtcgaatcgttttgcaccacgctcggtctgaaattagcgcctctgctgggacgtggtagtttcgctgaactgtcccagtacccaaacgatttcaaaagcattgtgaaccgttataatgaattggttgatacgacgggcctggagatggccaataaacacgtctttggtccgcaagcgtcttctgaaactggcgtagcagaaggctacgttcttaaacccgtctatccgatcttctttaataccggtacgcgcgtggcgattaaatgcaagaactccaaattttcggagaaagccaagctggactcgccaattaaggtgaaggtggaactgacggagaacgataaacgtctgctcgaaatctttagcgagtatgttacctggaatcgcgtcagtaacgtactgtcacatattggctcagtgaccgcaaaagattttgggcgtgttatgggtctgacgatgaaagacatcattaatgaagcagcacgcgaaggccatgatctgttgttcgctgataacccgtcggcggtgctgaaggagctgaccattctcatccagaacacgattcgttccaaatggcacgaagttctggag

SEQ ID NO: 942 - protein, 346 aa, synthetic construct
  REGION 1..346: note = variant of RNA ligase 2 from Klebsiella phage KP179
MHHHHHHGGSNTFAYYSSLENHYNNKFIEKIRGAGFLMHTVEWVAREKIHGTNFSVIITPTEIVPAKRTGPILEGESFFGHEIIMKKYKDSFVKVQNMLNAMDLVSVQIFGEFAGGGIQKGVDYGDKDFYVFDILSDSGNEKVYWDDYRVESFCTTLGLKLAPLLGRGSFAELSQYPNDFKSIVNRYNELVDTTGLEMANKHVFGPQASSETGVAEGYVLKPVYPIFFNTGTRVAIKCKNSKFSEKAKLDSPIKVKVELTENDKRLLEIFSEYVTWNRVSNVLSHIGSVTAKDFGRVMGLTMKDIINEAAREGHDLLFADNPSAVLKELTILIQNTIRSKWHEVLE

SEQ ID NO: 943 - DNA, 1038 bp, synthetic construct
  misc_feature 1..1038: note = variant of RNA ligase 2 from Klebsiella phage KP179
  source 1..1038: mol_type = other DNA
atgcatcaccatcaccatcacggtggcagcaacacgtttgcgtattattcaagtctggaaaaccattacaataataagttcattgataagatccgtggtgcaggcttcctgatgcacaccgtggaatgggtagctcgcgagaagattcatggaacgaactttagcgttatcattactccgaccgaaatcgtcccagccaaacgcacagggccgatcttggaaggcgagtcgttctttggtcacgaaattatcatgaaaaaatataaagactccttcgtgaaggtgcagaacatgctgaatgccatggatcttgttagcgtgcaaatctttggcgaatttgcgggtggtggcattcagaaaggcgtcgattacggagacaaagatttctatgtgtttgacatcctgtctgatagcgggaacgagaaagtttactgggatgactatcgcgtcgaatcgttttgcaccacgctcggtctgaaattagcgcctctgctgggacgtggtagtttcgctgaactgtcccagtacccaaacgatttcaaaagcattgtgaaccgttataatgaattggttgatacgacgggcctggagatggccaataaacacgtctttggtccgcaagcgtcttctgaaactggcgtagcagaaggctacgttcttaaacccgtctatccgatcttctttaataccggtacgcgcgtggcgattaaatgcaagaactccaaattttcggagaaagccaagctggactcgccaattaaggcgaaggtggaactgacggagaacgataaacgtctgctcgaaatctttagcgagtatgttacctggaatcgcgtcagtaacgtactgtcacatattggctcagtgaccgcaaaagattttgggcgtgttatgggtctgacgatgaaagacatcattaatgaagcagcacgcgaaggccatgatctgttgttcgctgataacccgtcggcggtgctgaaggagctgaccattctcatccagaacacgattcgttccaaatggcacgaagttctggag

SEQ ID NO: 944 - protein, 346 aa, synthetic construct
  REGION 1..346: note = variant of RNA ligase 2 from Klebsiella phage KP179
MHHHHHHGGSNTFAYYSSLENHYNNKFIDKIRGAGFLMHTVEWVAREKIHGTNFSVIITPTEIVPAKRTGPILEGESFFGHEIIMKKYKDSFVKVQNMLNAMDLVSVQIFGEFAGGGIQKGVDYGDKDFYVFDILSDSGNEKVYWDDYRVESFCTTLGLKLAPLLGRGSFAELSQYPNDFKSIVNRYNELVDTTGLEMANKHVFGPQASSETGVAEGYVLKPVYPIFFNTGTRVAIKCKNSKFSEKAKLDSPIKAKVELTENDKRLLEIFSEYVTWNRVSNVLSHIGSVTAKDFGRVMGLTMKDIINEAAREGHDLLFADNPSAVLKELTILIQNTIRSKWHEVLE

SEQ ID NO: 945 - DNA, 1038 bp, synthetic construct
  misc_feature 1..1038: note = variant of RNA ligase 2 from Klebsiella phage KP179
  source 1..1038: mol_type = other DNA
atgcatcaccatcaccatcacggtggcagcaacacgtttgcgtattattcaagtctggaaaaccattacaataataagttcattgagaagatccgtggtgcaggcttcctgatgcacaccgtggaatgggtagctcgcgagaagattcatggaacgaactttagcgttatcattactccgaccgaaatcgtcccagccaaacgcacagggccgatcttggaaggcgagtcgttctttggtcacgaaattatcatgaaaaaatataaagactccttcgtgaaggtgcagaacatgctgaatgccatggatcttgttagcgtgcaaatctttggcgaatttgcgggtggtggcattcagaaaggcgtcgattacggagacaaagatttctatgtgtttgacatcctgtctgatagcgggaacgagaaagtttactgggatgactatcgcgtcgaatcgttttgcaccacgctcggtctgaaattagcgcctctgctgggacgtggtagtttcgctgaactgtcccagtacccaaacgatttcaaaagcattgtgaaccgttataatgaattggttgatacgacgggcctggagatggccaataaacacgtctttggtccgcaagcgtcttctgaaactggcgtagcagaaggctacgttcttaaacccgtctatccgatcttctttaataccggtacgcgcgtggcgattaaatgcaagaactccaaattttcggagaaaaggaagctggactcgccaattaaggcgaaggtggaactgacggagaacgataaacgtctgctcgaaatctttagcgagtatgttacctggaatcgcgtcagtaacgtactgtcacatattggctcagtgaccgcaaaagattttgggcgtgttatgggtctgacgatgaaagacatcattaatgaagcagcacgcgaaggccatgatctgttgttcgctgataacccgtcggcggtgctgaaggagctgaccattctcatccagaacacgattcgttccaaatggcacgaagttctggag

SEQ ID NO: 946 - protein, 346 aa, synthetic construct
  REGION 1..346: note = variant of RNA ligase 2 from Klebsiella phage KP179
MHHHHHHGGSNTFAYYSSLENHYNNKFIEKIRGAGFLMHTVEWVAREKIHGTNFSVIITPTEIVPAKRTGPILEGESFFGHEIIMKKYKDSFVKVQNMLNAMDLVSVQIFGEFAGGGIQKGVDYGDKDFYVFDILSDSGNEKVYWDDYRVESFCTTLGLKLAPLLGRGSFAELSQYPNDFKSIVNRYNELVDTTGLEMANKHVFGPQASSETGVAEGYVLKPVYPIFFNTGTRVAIKCKNSKFSEKRKLDSPIKAKVELTENDKRLLEIFSEYVTWNRVSNVLSHIGSVTAKDFGRVMGLTMKDIINEAAREGHDLLFADNPSAVLKELTILIQNTIRSKWHEVLE

SEQ ID NO: 947 - DNA, 1038 bp, synthetic construct
  misc_feature 1..1038: note = variant of RNA ligase 2 from Klebsiella phage KP179
  source 1..1038: mol_type = other DNA
atgcatcaccatcaccatcacggtggcagcaacacgtttgcgtattattcaagtctggaaaaccattacaatgcgaagttcattgagaagatccgtggtgcaggcttcctgatgcacaccgtggaatgggtagctcgcgagaagattcatggaacgaactttagcgttatcattactccgaccgaaatcgtcccagccaaacgcacagggccgatcttggaaggcgagtcgttctttggtcacgaaattatcatgaaaaaatataaagactccttcgtgaaggtgcagaacatgctgaatgccatggatcttgttagcgtgcaaatctttggcgaatttgcgggtggtggcattcagaaaggcgtcgattacggagacaaagatttctatgtgtttgacatcctgtctgatagcgggaacgagaaagtttactgggatgactatcgcgtcgaatcgttttgcaccacgctcggtctgaaattagcgcctctgctgggacgtggtagtttcgctgaactgtcccagtacccaaacgatttcaaaagcattgtgaaccgttataatgaattggttgatacgacgggcctggagatggccaataaacacgtctttggtccgcaagcgtcttctgaaactggcgtagcagaaggctacgttcttaaacccgtctatccgatcttctttaataccggtacgcgcgtggcgattaaatgcaagaactccaaattttcggagaaagccaagctggactcgccaattaaggcgaaggtggaactgacggagaacgataaacgtctgctcgaaatctttagcgagtatgttacctggaatcgcgtcagtaacgtactgtcacatattggctcagtgaccgcaaaagattttgggcgtgttatgggtctgacgatgaaagacatcattaatgaagcagcacgcgaaggccatgatctgttgttcgctgataacccgtcggcggtgctgaaggagctgaccattctcatccagaacacgattcgttccaaatggcacgaagttctggag

SEQ ID NO: 948 - protein, 346 aa, synthetic construct
  REGION 1..346: note = variant of RNA ligase 2 from Klebsiella phage KP179
MHHHHHHGGSNTFAYYSSLENHYNAKFIEKIRGAGFLMHTVEWVAREKIHGTNFSVIITPTEIVPAKRTGPILEGESFFGHEIIMKKYKDSFVKVQNMLNAMDLVSVQIFGEFAGGGIQKGVDYGDKDFYVFDILSDSGNEKVYWDDYRVESFCTTLGLKLAPLLGRGSFAELSQYPNDFKSIVNRYNELVDTTGLEMANKHVFGPQASSETGVAEGYVLKPVYPIFFNTGTRVAIKCKNSKFSEKAKLDSPIKAKVELTENDKRLLEIFSEYVTWNRVSNVLSHIGSVTAKDFGRVMGLTMKDIINEAAREGHDLLFADNPSAVLKELTILIQNTIRSKWHEVLE

SEQ ID NO: 949 - DNA, 1038 bp, synthetic construct
  misc_feature 1..1038: note = variant of RNA ligase 2 from Klebsiella phage KP179
  source 1..1038: mol_type = other DNA
atgcatcaccatcaccatcacggtggcagcaacacgtttgcgtattattcaagtctggaaaaccattacaataataagttcattgagaagatccgtggtgcaggcttcctgatgcacaccgtggaatgggtagctcgcgagaagattcatggaacgaactttagcgttatcattactccgaccgaaatcgtcccagccaaacgcacagggccgatcttggaaggcgagtcgttctttggtcacgaaattatcatgaaaaaatataaagactccttcgtgaaggtgcagaacatgctgaatgccatggatcttgttagcgtgcaaatctttggcgaatttgcgggtggtggcattcagaaaggcgtcgattacggagacaaagatttctatgtgtttgacatcctgtctgatagcgggaacgagaaagtttactgggatgactatcgcgtcgaatcgttttgcaccacgctcggtctgaaattagcgcctctgctgggacgtggtagtttcgctgaactgtcccagtacccaaacgatttcaaaagcattgtgaaccgttataatgaattggttgatacgacgggcctggagatggccaataaacacgtctttggtccgcaagcgtcttctgaaactggcgtagcagaaggctacgttcttaaacccgtctatccgatcttctttaataccggtacgcgcgtggcgattaaatgcaagaactccaaattttcggagaaagccaagctggactcgccaattaaggcggaggtggaactgacggagaacgataaacgtctgctcgaaatctttagcgagtatgttacctggaatcgcgtcagtaacgtactgtcacatattggctcagtgaccgcaaaagattttgggcgtgttatgggtctgacgatgaaagacatcattaatgaagcagcacgcgaaggccatgatctgttgttcgctgataacccgtcggcggtgctgaaggagctgaccattctcatccagaacacgattcgttccaaatggcacgaagttctggag

SEQ ID NO: 950 - protein, 346 aa, synthetic construct
  REGION 1..346: note = variant of RNA ligase 2 from Klebsiella phage KP179
MHHHHHHGGSNTFAYYSSLENHYNNKFIEKIRGAGFLMHTVEWVAREKIHGTNFSVIITPTEIVPAKRTGPILEGESFFGHEIIMKKYKDSFVKVQNMLNAMDLVSVQIFGEFAGGGIQKGVDYGDKDFYVFDILSDSGNEKVYWDDYRVESFCTTLGLKLAPLLGRGSFAELSQYPNDFKSIVNRYNELVDTTGLEMANKHVFGPQASSETGVAEGYVLKPVYPIFFNTGTRVAIKCKNSKFSEKAKLDSPIKAEVELTENDKRLLEIFSEYVTWNRVSNVLSHIGSVTAKDFGRVMGLTMKDIINEAAREGHDLLFADNPSAVLKELTILIQNTIRSKWHEVLE

SEQ ID NO: 951 - DNA, 1038 bp, synthetic construct
  misc_feature 1..1038: note = variant of RNA ligase 2 from Klebsiella phage KP179
  source 1..1038: mol_type = other DNA
atgcatcaccatcaccatcacggtggcagcaacacgtttgcgtattattcaagtctggaaaaccattacaataataagttcattgagaagatccgtggtgcaggcttcctgatgcacaccgtggaatgggtagctcgcgagaagattcatggaacgaactttagcgttatcattactccgaccgaaatcgtcccagccaaacgcacagggccgatcttggaaggcgagtcgttctttggtcacgaaattatcatgaaaaaatataaagactccttcgtgaaggtgcagaacatgctgaatgccatggatcttgttagcgtgcaaatctttggcgaatttgcgggtggtggcattcagaaaggcgtcgattacggagacaaagatttctatgtgtttgacatcctgtctgatagcgggaacgagaaagtttactgggatgactatcgcgtcgaatcgttttgcaccacgctcggtctgaaattagcgcctctgctgggacgtggtagtttcgctgaactgtcccagtacccaaacgatttcaaaagcattgtgaaccgttataatgaattggttgatacgacgggcctggagatggccaataaacacgtctttggtccgcaagcgtcttctgaaactggcgtagcagaaggctacgttcttaaacccgtctatccgatcttctttaataccggtacgcgcgtggcgattaaatgcaagaactccaaattttcggagaaagccaagctggactcggctattaaggcgaaggtggaactgacggagaacgataaacgtctgctcgaaatctttagcgagtatgttacctggaatcgcgtcagtaacgtactgtcacatattggctcagtgaccgcaaaagattttgggcgtgttatgggtctgacgatgaaagacatcattaatgaagcagcacgcgaaggccatgatctgttgttcgctgataacccgtcggcggtgctgaaggagctgaccattctcatccagaacacgattcgttccaaatggcacgaagttctggag

SEQ ID NO: 952 - protein, 346 aa, synthetic construct
  REGION 1..346: note = variant of RNA ligase 2 from Klebsiella phage KP179
MHHHHHHGGSNTFAYYSSLENHYNNKFIEKIRGAGFLMHTVEWVAREKIHGTNFSVIITPTEIVPAKRTGPILEGESFFGHEIIMKKYKDSFVKVQNMLNAMDLVSVQIFGEFAGGGIQKGVDYGDKDFYVFDILSDSGNEKVYWDDYRVESFCTTLGLKLAPLLGRGSFAELSQYPNDFKSIVNRYNELVDTTGLEMANKHVFGPQASSETGVAEGYVLKPVYPIFFNTGTRVAIKCKNSKFSEKAKLDSAIKAKVELTENDKRLLEIFSEYVTWNRVSNVLSHIGSVTAKDFGRVMGLTMKDIINEAAREGHDLLFADNPSAVLKELTILIQNTIRSKWHEVLE

SEQ ID NO: 953 - DNA, 1038 bp, synthetic construct
  misc_feature 1..1038: note = variant of RNA ligase 2 from Klebsiella phage KP179
  source 1..1038: mol_type = other DNA
atgcatcaccatcaccatcacggtggcagcaacacgtttgcgtattattcaagtctggaaaaccattacaataataagttcattgagaagatccgtggtgcaggcttcctgatgcacaccgtggaatgggtagctcgcgagaagattcatggaacgaactttagcgttatcattactccgaccgaaatcgtcccagccaaacgcacagggccgatcttggaaggcgagtcgttctttggtcacgaaattatcatgaaaaaatataaagactccttcgtgaaggtgcagaacatgctgaatgccatggatcttgttagcgtgcaaatctttggcgaatttgcgggtggtggcattcagaaaggcgtcgattacggagacaaagatttctatgtgtttgacatcctgtctgatagcgggaacgagaaagtttactgggatgactatcgcgtcgaatcgttttgcaccacgctcggtctgaaattagcgcctctgctgggacgtggtagtttcgctgaactgtcccagtacccaaacgatttcaaaagcattgtgaaccgttataatgaattggttgatacgacgggcctggagatggccaataaacacgtctttggtccgcaagcgtcttctgaaactggcgtagcagaaggctacgttcttaaacccgtctatccgatcttctttaataccggtacgcgcgtggcgattaaatgcaagaactccaaattttcggagaaagccaagctggactcgccaattaaggcgaaggtggaactgacggataacgataaacgtctgctcgaaatctttagcgagtatgttacctggaatcgcgtcagtaacgtactgtcacatattggctcagtgaccgcaaaagattttgggcgtgttatgggtctgacgatgaaagacatcattaatgaagcagcacgcgaaggccatgatctgttgttcgctgataacccgtcggcggtgctgaaggagctgaccattctcatccagaacacgattcgttccaaatggcacgaagttctggag

SEQ ID NO: 954 - protein, 346 aa, synthetic construct
  REGION 1..346: note = variant of RNA ligase 2 from Klebsiella phage KP179
MHHHHHHGGSNTFAYYSSLENHYNNKFIEKIRGAGFLMHTVEWVAREKIHGTNFSVIITPTEIVPAKRTGPILEGESFFGHEIIMKKYKDSFVKVQNMLNAMDLVSVQIFGEFAGGGIQKGVDYGDKDFYVFDILSDSGNEKVYWDDYRVESFCTTLGLKLAPLLGRGSFAELSQYPNDFKSIVNRYNELVDTTGLEMANKHVFGPQASSETGVAEGYVLKPVYPIFFNTGTRVAIKCKNSKFSEKAKLDSPIKAKVELTDNDKRLLEIFSEYVTWNRVSNVLSHIGSVTAKDFGRVMGLTMKDIINEAAREGHDLLFADNPSAVLKELTILIQNTIRSKWHEVLE

SEQ ID NO: 955 - DNA, 1038 bp, synthetic construct
  misc_feature 1..1038: note = variant of RNA ligase 2 from Klebsiella phage KP179
  source 1..1038: mol_type = other DNA
atgcatcaccatcaccatcacggtggcagcaacacgtttgcgtattattcaagtctggaaaaccattacaataataagttcattgagaagatccgtggtgcaggcttcctgatgcacaccgtggaatgggtagctcgcgagaagattcatggaacgaactttagcgttatcattactccgaccgaaatcgtcccagccaaacgcacagggccgatcttggaaggcgagtcgttctttggtcacgaaattatcatgaaaaaatataaagactccttcgtgaaggtgcagaacatgctgaatgccatggatcttgttagcgtgcaaatctttggcgaatttgcgggtggtggcattcagaaaggcgtcgattacggagacaaagatttctatgtgtttgacatcctgtctgatagcgggaacgagaaagtttactgggatgactatcgcgtcgaatcgttttgcaccactctcggtctgaaattagcgcctctgctgggacgtggtagtttcgctgaactgtcccagtacccaaacgatttcaaaagcattgtgaaccgttataatgaattggttgacacggtcggcctggagatggccaataaacacgtctttggtccgcaagcgtcttctgaaactggcgtagcagaaggctacgttcttaaacccgtctatccgatcttctttaataccggtacgcgcgtggcgattaaatgcaagaactccaaattttcggagaaagccaagctggactcgccaattagtgcgaaggtggaactgacggagaacgataaacgtctgctcgaaatctttagcgagtatgttacctggaatcgcgtcagtaacgtactgtcacatattggctcagtgaccgcaaaagattttgggcgtgtttcgggtctgacgatgaaagacatcattaatgaagcagcacgcgaaggccatgatctgttgttcgctgataacccgtcggcggtgctgaaggagctgactggcctcatccagaacacgattcgctccaaatggcacgaagttctggag

SEQ ID NO: 956 - protein, 346 aa, synthetic construct
  REGION 1..346: note = variant of RNA ligase 2 from Klebsiella phage KP179
MHHHHHHGGSNTFAYYSSLENHYNNKFIEKIRGAGFLMHTVEWVAREKIHGTNFSVIITPTEIVPAKRTGPILEGESFFGHEIIMKKYKDSFVKVQNMLNAMDLVSVQIFGEFAGGGIQKGVDYGDKDFYVFDILSDSGNEKVYWDDYRVESFCTTLGLKLAPLLGRGSFAELSQYPNDFKSIVNRYNELVDTVGLEMANKHVFGPQASSETGVAEGYVLKPVYPIFFNTGTRVAIKCKNSKFSEKAKLDSPISAKVELTENDKRLLEIFSEYVTWNRVSNVLSHIGSVTAKDFGRVSGLTMKDIINEAAREGHDLLFADNPSAVLKELTGLIQNTIRSKWHEVLE

SEQ ID NO: 957 - DNA, 1038 bp, synthetic construct
  misc_feature 1..1038: note = variant of RNA ligase 2 from Klebsiella phage KP179
  source 1..1038: mol_type = other DNA
atgcatcaccatcaccatcacggtggcagcaacacgtttgcgtattattcacacctggaaaaccattacaataataagttcattgagaagatccgtggtgcaggcttcctgatgcacaccgtggaatgggtagctcgcgagaagattcatggaacgaactttagcgttatcattactccgaccgaaatcgtcccagccaaacgcacagggccgatcttggaaggcgagtcgttctttggtcacgaaattatcatgaaaaaatataaagactccttcgtgaaggtgcagaacatgctgaatgccatggatcttgttagcgtgcaaatctttggcgaatttgcgggtggtggcattcagaaaggcgtcgattacggagacaaagatttctatgtgtttgacatcctgtctgatagcgggaacgagaaagtttactgggatgactatcgcgtcgaatcgttttgcaccactctcggtctgaaattagcgcctctgctgggacgtggtagtttcgctgaactgtcccagtacccaaacgatttcaaaagcattgtgaaccgttataatgaattggttgacacggtcggcctggagatggccaataaacacgtctttggtccgcaagcgtcttctgaaactggcgtagcagaaggctacgttcttaaacccgtctatccgatcttctttaataccggtacgcgcgtggcgattaaatgcaagaactccaaattttcggagaaagccaagctggactcgccaattagtgcgaaggtggaactgacggagaacgataaacgtctgctcgaaatctttagcgagtatgttacctggaatcgcgtcagtaacgtactgtcacatattggctcagtgaccgcaaaagattttgggcgtgtttcgggtctgacgatgaaagacatcattaatgaagcagcacgcgaaggccatgatctgttgttcgctgataacccgtcggcggtgctgaaggagctgactggcctcatccagaacacgattcgttccaaatggcacgaagttctggag

SEQ ID NO: 958 - protein, 346 aa, synthetic construct
  REGION 1..346: note = variant of RNA ligase 2 from Klebsiella phage KP179
MHHHHHHGGSNTFAYYSHLENHYNNKFIEKIRGAGFLMHTVEWVAREKIHGTNFSVIITPTEIVPAKRTGPILEGESFFGHEIIMKKYKDSFVKVQNMLNAMDLVSVQIFGEFAGGGIQKGVDYGDKDFYVFDILSDSGNEKVYWDDYRVESFCTTLGLKLAPLLGRGSFAELSQYPNDFKSIVNRYNELVDTVGLEMANKHVFGPQASSETGVAEGYVLKPVYPIFFNTGTRVAIKCKNSKFSEKAKLDSPISAKVELTENDKRLLEIFSEYVTWNRVSNVLSHIGSVTAKDFGRVSGLTMKDIINEAAREGHDLLFADNPSAVLKELTGLIQNTIRSKWHEVLE

SEQ ID NO: 959 - DNA, 1038 bp, synthetic construct
  misc_feature 1..1038: note = variant of RNA ligase 2 from Klebsiella phage KP179
  source 1..1038: mol_type = other DNA
atgcatcaccatcaccatcacggtggcagcaacacgtttgcgtattattcaagtctggaaaaccattacaataataagttcattgagaagatccgtggggcaggcttcctgatgcacaccgtggaatgggtagctcgcgagaagattcatggaacgaactttagcgttatcattactccgaccgaaatcgtcccagccaaacgcacagggccgatcttggaaggcgagtcgttctttggtcacgaaattatcatgaaaaaatataaagactccttcgtgaaggtgcagaacatgctgaatgccatggatcttgttagcgtgcaaatctttggcgaatttgcgggtggtggcattcagaaaggcgtcgattacggagacaaagatttctatgtgtttgacatcctgtctgatagcgggaacgagaaagtttactgggatgactatcgcgtcgaatcgttttgcaccacgctcggtctgaaattagcgcctctgctgggacgtggtagtttcgctgaactgtcccagtacccaaacgatttcaaaagcattgtgaaccgttataatgaattggttgacacggtcggcctggagatggccaataaacacgtctttggtccgcaagcgtcttctgaaactggcgtagcagaaggctacgttcttaaacccgtctatccgatcttctttaataccggtacgcgcgtggcgattaaatgcaagaactccaaattttcggagaaatcgaagctggactcgccaattaaggcgaaggtggaactgacggagaacgataaacgtctgctcgaaatctttagcgagtatgttacctggaatcgcgtcagtaacgtactgtcacatattggctcagtgaccgcaaaagattttgggcgtgtttcgggtctgacgatgaaagacatcattaatgaagcagcacgcgaaggccatgatctgtggttcgctgataacccgtcggcggtgctgaaggagctgactggcctcatccagaacacgattcgttccaaatggcacgaagttctggag

SEQ ID NO: 960 - protein, 346 aa, synthetic construct
  REGION 1..346: note = variant of RNA ligase 2 from Klebsiella phage KP179
MHHHHHHGGSNTFAYYSSLENHYNNKFIEKIRGAGFLMHTVEWVAREKIHGTNFSVIITPTEIVPAKRTGPILEGESFFGHEIIMKKYKDSFVKVQNMLNAMDLVSVQIFGEFAGGGIQKGVDYGDKDFYVFDILSDSGNEKVYWDDYRVESFCTTLGLKLAPLLGRGSFAELSQYPNDFKSIVNRYNELVDTVGLEMANKHVFGPQASSETGVAEGYVLKPVYPIFFNTGTRVAIKCKNSKFSEKSKLDSPIKAKVELTENDKRLLEIFSEYVTWNRVSNVLSHIGSVTAKDFGRVSGLTMKDIINEAAREGHDLWFADNPSAVLKELTGLIQNTIRSKWHEVLE

SEQ ID NO: 961 - DNA, 1038 bp, synthetic construct
  misc_feature 1..1038: note = variant of RNA ligase 2 from Klebsiella phage KP179
  source 1..1038: mol_type = other DNA
atgcatcaccatcaccatcacggtggcagcaacacgtttgcgtattattcaagtctggaaaaccattacaataataagttcattgagaagatccgtggggcaggcttcgcgatgcacaccgtggaatgggtagctcgcgagaagattcatggaacgaactttagcgttatcattactccgaccgaaatcgtcccagccaaacgcacagggccgatcttggaaggcgagtcgttctttggtcacgaaattatcatgaaaaaatataaagactccttcgtgaaggtgcagaacatgctgaatgccatggatcttgttagcgtgcaaatctttggcgaatttgcgggtggtggcattcagaaaggcgtcgattacggagacaaagatttctatgtgtttgacatcctgtctgatagcgggaacgagaaagtttactgggatgactatcgcgtcgaatcgttttgcaccacgctcggtctgaaattagcgcctctgctgggacgtggtagtttcgctgaactgtcccagtacccaaacgatttcaaaagcattgtgaaccgttataatgaattggttgacacggtcggcctggagatggccaataaacacgtctttggtccgcaagcgtcttctgaaactggcgtagcagaaggctacgttcttaaacccgtctatccgatcttctttaataccggtacgcgcgtggcgattaaatgcaagaactccaaattttcggagaaagccaagctggactcgccaattaaggcgaaggtggaactgacggagaacgataaacgtctgctcgaaatctttagcgagtatgttacctggaatcgcgtcagtaacgtactgtcacatattggctcagtgaccgcaaaagattttgggcgtgtttcgggtctgacgatgaaagacatcattaatgaagcagcacgcgaaggccatgatctgtggttcgctgataacccgtcggcggtgctgaaggagctgactggcctcatccagaacacgattcgttccaaatggcgcgaagttctggag

SEQ ID NO: 962 - protein, 346 aa, synthetic construct
  REGION 1..346: note = variant of RNA ligase 2 from Klebsiella phage KP179
MHHHHHHGGSNTFAYYSSLENHYNNKFIEKIRGAGFAMHTVEWVAREKIHGTNFSVIITPTEIVPAKRTGPILEGESFFGHEIIMKKYKDSFVKVQNMLNAMDLVSVQIFGEFAGGGIQKGVDYGDKDFYVFDILSDSGNEKVYWDDYRVESFCTTLGLKLAPLLGRGSFAELSQYPNDFKSIVNRYNELVDTVGLEMANKHVFGPQASSETGVAEGYVLKPVYPIFFNTGTRVAIKCKNSKFSEKAKLDSPIKAKVELTENDKRLLEIFSEYVTWNRVSNVLSHIGSVTAKDFGRVSGLTMKDIINEAAREGHDLWFADNPSAVLKELTGLIQNTIRSKWREVLE

SEQ ID NO: 963 - DNA, 1038 bp, synthetic construct
  misc_feature 1..1038: note = variant of RNA ligase 2 from Klebsiella phage KP179
  source 1..1038: mol_type = other DNA
atgcatcaccatcaccatcacggtggcagcaacacgtttgcgtattattcaagtctggaaaaccattacaataataagttcattgagaagatccgtctggcaggcttcctgatgcacaccgtggaatgggtagctcgcgagaagattcatggaacgaactttagcgttatcattactccgaccgaaatcgtcccagccaaacgcacagggccgatcttggaaggcgagtcgttctttggtcacgaaattatcatgaaaaaatataaagactccttcgtgaaggtgcagaacatgctgaatgccatggatcttgttagcgtgcaaatctttggcgaatttgcgggtggtggcattcagaaaggcgtcgattacggagacaaagatttctatgtgtttgacatcctgtctgatagcgggaacgagaaagtttactgggatgactatcgcgtcgaatcgttttgcaccacgctcggtctgaaattagcgcctctgctgggacgtggtagtttcgctgaactgtcccagtacccaaacgatttcaaaagcattgtgaaccgttataatgaattggttgacacggtcggcctggagatggccaataaacacgtctttggtccgcaagcgtcttctgaaactggcgtagcagaaggctacgttcttaaacccgtctatccgatcttctttaataccggtacgcgcgtggcgattaaatgcaagaactccaaattttcggagaaagccaagctggactcgccaattaaggcgaaggtggaactgacggagaacgataaacgtctgctcgaaatctttagcgagtatgttacctggaatcgcgtcagtaacgtactgtcacatattggctcagtgaccgcaaaagattttgggcgtgtttcgggtctgacgatgaaagacatcattaatgaagcagcacgcgaaggccatgatctgctgttcgctgataacccgtcggcggtgctgaaggagctgactggcctcatccagaacacgattcgttccaaatggcacgaagttctggag

SEQ ID NO: 964 - protein, 346 aa, synthetic construct
  REGION 1..346: note = variant of RNA ligase 2 from Klebsiella phage KP179
MHHHHHHGGSNTFAYYSSLENHYNNKFIEKIRLAGFLMHTVEWVAREKIHGTNFSVIITPTEIVPAKRTGPILEGESFFGHEIIMKKYKDSFVKVQNMLNAMDLVSVQIFGEFAGGGIQKGVDYGDKDFYVFDILSDSGNEKVYWDDYRVESFCTTLGLKLAPLLGRGSFAELSQYPNDFKSIVNRYNELVDTVGLEMANKHVFGPQASSETGVAEGYVLKPVYPIFFNTGTRVAIKCKNSKFSEKAKLDSPIKAKVELTENDKRLLEIFSEYVTWNRVSNVLSHIGSVTAKDFGRVSGLTMKDIINEAAREGHDLLFADNPSAVLKELTGLIQNTIRSKWHEVLE

SEQ ID NO: 965 - DNA, 1038 bp, synthetic construct
  misc_feature 1..1038: note = variant of RNA ligase 2 from Klebsiella phage KP179
  source 1..1038: mol_type = other DNA
atgcatcaccatcaccatcacggtggcagcaacacgtttgcgtattattcaagtctggaaaaccattacaataataagttcattgagaagatccgtggggcaggcttcctgatgcacaccgtggaatgggtagctcgcgagaagattcatggaacgaactttagcgttatcattactccgaccgaaatcgtcccagccaaacgcacagggccgatcttggaaggcgagtcgttctttggtcacgaaattatcatgaaaaaatataaagactccttcgtgaaggtgcagaacatgctgaatgccatggatcttgttagcgtgcaaatctttggcgaatttgcgggtggtggcattcagaaaggcgtcgattacggagacaaagatttctatgtgtttgacatcctgtctgatagcgggaacgagaaagtttactgggatgactatcgcgtcgaatcgttttgcaccacgctcggtctgaaattagcgcctctgctgggacgtggtagtttcgctgaactgtcccagtacccaaacgatttcaaaagcattgtgaaccgttataatgaattggttgacacggtcggcctggagatggccaataaacacgtctttggtccgcaagcgtcttctgaaactggcgtagcagaaggctacgttcttaaacccgtctatccgatcttctttaataccggtacgcgcgtggcgattaaatgcaagaactccaaattttcggagaaatcgaagctggactcgccaattaaggcgaaggtggaactgacggagaacgataaacgtctgctcgaaatctttagcgagtatgttacctggaatcgcgtcagtaacgtactgtcacatattggctcagtgaccgcaaaagattttgggcgtgtttcgggtctgacgatgaaagacatcattaatgaagcagcacgcgaaggccatgatctgttcttcgctgataacccgtcggcggtgctgaaggagctgactggcctcatccagaacacgattcgttccaaatggcacgaagttctggag

SEQ ID NO: 966 - protein, 346 aa, synthetic construct
  REGION 1..346: note = variant of RNA ligase 2 from Klebsiella phage KP179
MHHHHHHGGSNTFAYYSSLENHYNNKFIEKIRGAGFLMHTVEWVAREKIHGTNFSVIITPTEIVPAKRTGPILEGESFFGHEIIMKKYKDSFVKVQNMLNAMDLVSVQIFGEFAGGGIQKGVDYGDKDFYVFDILSDSGNEKVYWDDYRVESFCTTLGLKLAPLLGRGSFAELSQYPNDFKSIVNRYNELVDTVGLEMANKHVFGPQASSETGVAEGYVLKPVYPIFFNTGTRVAIKCKNSKFSEKSKLDSPIKAKVELTENDKRLLEIFSEYVTWNRVSNVLSHIGSVTAKDFGRVSGLTMKDIINEAAREGHDLFFADNPSAVLKELTGLIQNTIRSKWHEVLE

SEQ ID NO: 967 - DNA, 1038 bp, synthetic construct
  misc_feature 1..1038: note = variant of RNA ligase 2 from Klebsiella phage KP179
  source 1..1038: mol_type = other DNA
atgcatcaccatcaccatcacggtggcagcaacacgtttgcgtattattcacacctggaaaaccattacaataataagttcattgagaagatccgtggtgcaggcttcctgatgcacaccgtggaatgggtagctcgcgagaagattcatggaacgaactttagcgttatcattactccgaccgaaatcgtcccagccaaacgcacagggccgatcttggaaggcgagtcgttctttggtcacgaaattatcatgaaaaaatataaagactccttcgtgaaggtgcagaacatgctgaatgccatggatcttgttagcgtgcaaatctttggcgaatttgcgggtggtggcattcagaaaggcgtcgattacggagacaaagatttctatgtgtttgacatcctgtctgatagcgggaacgagaaagtttactgggatgactatcgcgtcgaatcgttttgcaccgggctcggtctgaaattagcgcctctgctgggacgtggtagtttcgctgaactgtcccagtacccaaacgatttcaaaagcattgtgaaccgttataatgaattggttgacacggtcggcctggagatggccaataaacacgtctttggtccgcaagcgtcttctgaaactggcgtagcagaaggctacgttcttaaacccgtctatccgatcttctttaataccggtacgcgcgtggcgattaaatgcaagaactccaaattttcggagaaagccaagctggactcgccaattagtgcgaaggtggaactgacggagaacgataaacgtctgctcgaaatctttagcgagtatgttacctggaatcgcgtcagtaacgtactgtcacatattggctcagtgaccgcaaaagattttgggcgtgtttcgggtctgacgatgaaagacatcattaacgaagcagcacgcgaaggccatgatctgttgttcgctgataacccgtcggcggtgctgaaggagctgactggcctcatccagaacacgattcgctccaaatggcacgaagttctggag

SEQ ID NO: 968 - protein, 346 aa, synthetic construct
  REGION 1..346: note = variant of RNA ligase 2 from Klebsiella phage KP179
MHHHHHHGGSNTFAYYSHLENHYNNKFIEKIRGAGFLMHTVEWVAREKIHGTNFSVIITPTEIVPAKRTGPILEGESFFGHEIIMKKYKDSFVKVQNMLNAMDLVSVQIFGEFAGGGIQKGVDYGDKDFYVFDILSDSGNEKVYWDDYRVESFCTGLGLKLAPLLGRGSFAELSQYPNDFKSIVNRYNELVDTVGLEMANKHVFGPQASSETGVAEGYVLKPVYPIFFNTGTRVAIKCKNSKFSEKAKLDSPISAKVELTENDKRLLEIFSEYVTWNRVSNVLSHIGSVTAKDFGRVSGLTMKDIINEAAREGHDLLFADNPSAVLKELTGLIQNTIRSKWHEVLE

SEQ ID NO: 969 - DNA, 1038 bp, synthetic construct
  misc_feature 1..1038: note = variant of RNA ligase 2 from Klebsiella phage KP179
  source 1..1038: mol_type = other DNA
atgcatcaccatcaccatcacggtggcagcaacacgtttgcgtattattcacacctggaaaaccattacaataataagttcattgagaagatccgtggtgcaggcttcctgatgcacaccgtggaatgggtagctcgcgagaagattcatggaacgaactttagcgttatcattactccgaccgaaatcgtcccagccaaacgcacagggccgatcttggaaggcgagtcgttctttggtcacgaaattatcatgaaaaaatataaagactccttcgtgaaggtgcagaacatgctgaatgccatggatcttgttagcgtgcaaatctttggcgaatttgcgggtggtggcattcagaaaggcgtcgattacggagacaaagatttctatgtgtttgacatcctgtctgatagcgggaacgagaaagtttactgggatgactatcgcgtcgaatcgttttgcaccactctcggtctgaaattagcgcctctgctgggacgtggtagtttcgctgaactgtcccagtacccaaacgatttcaaaagcattgtgaaccgttataatgaattggttgacacggtcggcctggagatggccaataaacacgtctttggtccgcaagcgtcttctgaaactggcgtagcagaaggctacgttcttaaacccgtctatccgatcttctttaataccggtacgcgcgtggcgattaaatgcaagaactccaaattttcggagaaagccaagctggactcgccaattaaagcgaaggtggaactgacggagaacgataaacgtctgctcgaaatctttagcgagtatgttacctggaatcgcgtcagtaacgtactgtcacatattggctcagtgaccgcaaaagattttgggcgtgtttcgggtctgacgatgaaagacatcattaacgaagcagcacgcgaaggccatgatctgttgttcgctgataacccgtcggcggtgctgaaggagctgactggcctcatccagaacacgattcgctccaaatggcacgaagttctggag

SEQ ID NO: 970 - protein, 346 aa, synthetic construct
  REGION 1..346: note = variant of RNA ligase 2 from Klebsiella phage KP179
MHHHHHHGGSNTFAYYSHLENHYNNKFIEKIRGAGFLMHTVEWVAREKIHGTNFSVIITPTEIVPAKRTGPILEGESFFGHEIIMKKYKDSFVKVQNMLNAMDLVSVQIFGEFAGGGIQKGVDYGDKDFYVFDILSDSGNEKVYWDDYRVESFCTTLGLKLAPLLGRGSFAELSQYPNDFKSIVNRYNELVDTVGLEMANKHVFGPQASSETGVAEGYVLKPVYPIFFNTGTRVAIKCKNSKFSEKAKLDSPIKAKVELTENDKRLLEIFSEYVTWNRVSNVLSHIGSVTAKDFGRVSGLTMKDIINEAAREGHDLLFADNPSAVLKELTGLIQNTIRSKWHEVLE

SEQ ID NO: 971 - DNA, 1038 bp, synthetic construct
  misc_feature 1..1038: note = variant of RNA ligase 2 from Klebsiella phage KP179
  source 1..1038: mol_type = other DNA
atgcatcaccatcaccatcacggtggcagcaacacgtttgcgtattattcaagtctggaaaaccattacaataataagttcattgagaagatccgtggtgcaggcttcctgatgcacaccgtggaatgggtagctcgcgagaagattcatggaacgaactttagcgttatcattactccgaccgaaatcgtcccagccaaacgcacagggccgatcttggaaggcgagtcgttctttggtcacgaaattatcatgaaaaaatataaagactccttcgtgaaggtgcagaacatgctgaatgccatggatcttgttagcgtgcaaatctttggcgaatttgcgggtggtggcattcagaaaggcgtcgattacggagacaaagatttctatgtgtttgacatcctgtctgatagcgggaacgagaaagtttactgggatgactatcgcgtcgaatcgttttgcaccgggctcggtctgaaattagcgcctctgctgggacgtggtagtttcgctgaactgtcccagtacccaaacgatttcaaaagcattgtgaaccgttataatgaattggttgacacggtcggcctggagatggccaataaacacgtctttggtccgcaagcgtcttctgaaactggcgtagcagaaggctacgttcttaaacccgtctatccgatcttctttaataccggtacgcgcgtggcgattaaatgcaagaactccaaattttcggagaaagccaagctggactcgccaattaaagcgaaggtggaactgacggagaacgataaacgtctgctcgaaatctttagcgagtatgttacctggaatcgcgtcagtaacgtactgtcacatattggctcagtgaccgcaaaagattttgggcgtgtttcgggtctgacgatgaaagacatcattaacgaagcagcacgcgaaggccatgatctgttgttcgctgataacccgtcggcggtgctgaaggagctgactggcctcatccagaacacgattcgttccaaatggcacgaagttctggag

SEQ ID NO: 972 - protein, 346 aa, synthetic construct
  REGION 1..346: note = variant of RNA ligase 2 from Klebsiella phage KP179
MHHHHHHGGSNTFAYYSSLENHYNNKFIEKIRGAGFLMHTVEWVAREKIHGTNFSVIITPTEIVPAKRTGPILEGESFFGHEIIMKKYKDSFVKVQNMLNAMDLVSVQIFGEFAGGGIQKGVDYGDKDFYVFDILSDSGNEKVYWDDYRVESFCTGLGLKLAPLLGRGSFAELSQYPNDFKSIVNRYNELVDTVGLEMANKHVFGPQASSETGVAEGYVLKPVYPIFFNTGTRVAIKCKNSKFSEKAKLDSPIKAKVELTENDKRLLEIFSEYVTWNRVSNVLSHIGSVTAKDFGRVSGLTMKDIINEAAREGHDLLFADNPSAVLKELTGLIQNTIRSKWHEVLE

SEQ ID NO: 973 - DNA, 1038 bp, synthetic construct
  misc_feature 1..1038: note = variant of RNA ligase 2 from Klebsiella phage KP179
  source 1..1038: mol_type = other DNA
atgcatcaccatcaccatcacggtggcagcaacacgtttgcgtattattcaagtctggaaaaccattacaataataagttcattgagaagatccgtggtgcaggcttcctgatgcacaccgtggaatgggtagctcgcgagaagattcatggaacgaactttagcgttatcattactccgaccgaaatcgtcccagccaaacgcacagggccgatcttggaaggcgagtcgttctttggtcacgaaattatcatgaaaaaatataaagactccttcgtgaaggtgcagaacatgctgaatgccatggatcttgttagcgtgcaaatctttggcgaatttgcgggtggtggcattcagaaaggcgtcgattacggagacaaagatttctatgtgtttgacatcctgtctgatagcgggaacgagaaagtttactgggatgactatcgcgtcgaatcgttttgcaccacgctcggtctgaaattagcgcctctgctgggacgtggtagtttcgctgaactgtcccagtacccaaacgatttcaaaagcattgtgaaccgttataatgaattggttgacacggtcggcctggagatggccaataaacacgtctttggtccgcaagcgtcttctgaaactggcgtagcagaaggctacgttcttaaacccgtctatccgatcttctttaataccggtacgcgcgtggcgattaaatgcaagaactccaaattttcggagaaagccaagctggactcgccaattagtgcgaaggtggaactgacggagaacgataaacgtctgctcgaaatctttagcgagtatgttacctggaatcgcgtcagtaacgtactgtcacatattggctcagtgaccgcaaaagattttgggcgtgtttcgggtctgacgatgaaagacatcattaatgaagcagcacgcgaaggccatgatctgttgttcgctgataacccgtcggcggtgctgaaggagctgactggcctcatccagaacacgattctgtccaaatggcacgaagttctggag

SEQ ID NO: 974 - protein, 346 aa, synthetic construct
  REGION 1..346: note = variant of RNA ligase 2 from Klebsiella phage KP179
MHHHHHHGGSNTFAYYSSLENHYNNKFIEKIRGAGFLMHTVEWVAREKIHGTNFSVIITPTEIVPAKRTGPILEGESFFGHEIIMKKYKDSFVKVQNMLNAMDLVSVQIFGEFAGGGIQKGVDYGDKDFYVFDILSDSGNEKVYWDDYRVESFCTTLGLKLAPLLGRGSFAELSQYPNDFKSIVNRYNELVDTVGLEMANKHVFGPQASSETGVAEGYVLKPVYPIFFNTGTRVAIKCKNSKFSEKAKLDSPISAKVELTENDKRLLEIFSEYVTWNRVSNVLSHIGSVTAKDFGRVSGLTMKDIINEAAREGHDLLFADNPSAVLKELTGLIQNTILSKWHEVLE

SEQ ID NO: 975 - DNA, 1038 bp, synthetic construct
  misc_feature 1..1038: note = variant of RNA ligase 2 from Klebsiella phage KP179
  source 1..1038: mol_type = other DNA
atgcatcaccatcaccatcacggtggcagcaacacgtttgcgtattattcaagtctggaaaaccattacaataataagttcattgagaagatccgtggtgcaggcttcctgatgcacaccgtggaatgggtagctcgcgagaagattcatggaacgaactttagcgttatcattactccgaccgaaatcgtcccagccaaacgcacagggccgatcttggaaggcgagtcgttctttggtcacgaaattatcatgaaaaaatataaagactccttcgtgaaggtgcagaacatgctgaatgccatggatcttgttagcgtgcaaatctttggcgaatttgcgggtggtggcattcagaaaggcgtcgattacggagacaaagatttctatgtgtttgacatcctgtctgatagcgggaacgagaaagtttactgggatgactatcgcgtcgaatcgttttgcaccactctcggtctgaaattagcgcctctgctgggacgtggtagtttcgctgaactgtcccagtacccaaacgatttcaaaagcattgtgaaccgttataatgaattggttgacacggtcggcctggagatggccaataaacacgtctttggtccgcaagcgtcttctgaaactggcgtagcagaaggctacgttcttaaacccgtctatccgatcttctttaataccggtacgcgcgtggcgattaaatgcaagaactccaaattttcggagaaagccaagctggactcgccaattagtgcgaaggtggaactgacggagaacgataaacgtctgctcgaaatctttagcgagtatgttacctggaatcgcgtcagtaacgtactgtcacatattggctcagtgaccgcaaaagattttgggcgtgtttcgggtctgacgatgaaagacatcattcgcgaagcagcacgcgaaggccatgatctgttgttcgctgataacccgtcggcggtgctgaaggagctgactggcctcatccagaacacgattcgttccaaatggcacgaagttctggag

SEQ ID NO: 976 - protein, 346 aa, synthetic construct
  REGION 1..346: note = variant of RNA ligase 2 from Klebsiella phage KP179
MHHHHHHGGSNTFAYYSSLENHYNNKFIEKIRGAGFLMHTVEWVAREKIHGTNFSVIITPTEIVPAKRTGPILEGESFFGHEIIMKKYKDSFVKVQNMLNAMDLVSVQIFGEFAGGGIQKGVDYGDKDFYVFDILSDSGNEKVYWDDYRVESFCTTLGLKLAPLLGRGSFAELSQYPNDFKSIVNRYNELVDTVGLEMANKHVFGPQASSETGVAEGYVLKPVYPIFFNTGTRVAIKCKNSKFSEKAKLDSPISAKVELTENDKRLLEIFSEYVTWNRVSNVLSHIGSVTAKDFGRVSGLTMKDIIREAAREGHDLLFADNPSAVLKELTGLIQNTIRSKWHEVLE

SEQ ID NO: 977 - DNA, 1038 bp, synthetic construct
  misc_feature 1..1038: note = variant of RNA ligase 2 from Klebsiella phage KP179
  source 1..1038: mol_type = other DNA
atgcatcaccatcaccatcacggtggcagcaacacgtttgcgtattattcaagtctggaaaaccattacaataataagttcattgagaagatccgtctggcaggcttcgcgatgcacaccgtggaatgggtagctcgcgagaagattcatggaacgaactttagcgttatcattactccgaccgaaatcgtcccagccaaacgcacagggccgatcttggaaggcgagtcgttctttggtcacgaaattatcatgaaaaaatataaagactccttcgtgaaggtgcagaacatgctgaatgccatggatcttgttagcgtgcaaatctttggcgaatttgcgggtggtggcattcagaaaggcgtcgattacggagacaaagatttctatgtgtttgacatcctgtctgatagcgggaacgagaaagtttactgggatgactatcgcgtcgaatcgttttgcaccacgctcggtctgaaattagcgcctctgctgggacgtggtagtttcgctgaactgtcccagtacccaaacgatttcaaaagcattgtgaaccgttataatgaattggttgacacggtcggcctggagatggccaataaacacgtctttggtccgcaagcgtcttctgaaactggcgtagcagaaggctacgttcttaaacccgtctatccgatcttctttaataccggtacgcgcgtggcgattaaatgcaagaactccaaattttcggagaaagccaagctggactcgccaattaaggcgaaggtggaactgacggagaacgataaacgtctgctcgaaatctttagcgagtatgttacctggaatcgcgtcagtaacgtactgtcacatattggctcagtgaccgcaaaagattttgggcgtgtttcgggtctgacgatgaaagacatcattaatgaagcagcacgcgaaggccatgatctgtggttcgctgataacccgtcggcggtgctgaaggagctgactggcctcatccagaacacgattcgttccaaatggcacgaagttctggag

SEQ ID NO: 978 - protein, 346 aa, synthetic construct
  REGION 1..346: note = variant of RNA ligase 2 from Klebsiella phage KP179
MHHHHHHGGSNTFAYYSSLENHYNNKFIEKIRLAGFAMHTVEWVAREKIHGTNFSVIITPTEIVPAKRTGPILEGESFFGHEIIMKKYKDSFVKVQNMLNAMDLVSVQIFGEFAGGGIQKGVDYGDKDFYVFDILSDSGNEKVYWDDYRVESFCTTLGLKLAPLLGRGSFAELSQYPNDFKSIVNRYNELVDTVGLEMANKHVFGPQASSETGVAEGYVLKPVYPIFFNTGTRVAIKCKNSKFSEKAKLDSPIKAKVELTENDKRLLEIFSEYVTWNRVSNVLSHIGSVTAKDFGRVSGLTMKDIINEAAREGHDLWFADNPSAVLKELTGLIQNTIRSKWHEVLE

SEQ ID NO: 979 - DNA, 1038 bp, synthetic construct
  misc_feature 1..1038: note = variant of RNA ligase 2 from Klebsiella phage KP179
  source 1..1038: mol_type = other DNA
atgcatcaccatcaccatcacggtggcagcaacacgtttgcgtattattcaagtctggaaaaccattacaataataagttcattgagaagatccgtggggcaggcttcgcgatgcacaccgtggaatgggtagctcgcgagaagattcatggaacgaactttagcgttatcattactccgaccgaaatcgtcccagccaaacgcacagggccgatcttggaaggcgagtcgttctttggtcacgaaattatcatgaaaaaatataaagactccttcgtgaaggtgcagaacatgctgaatgccatggatcttgttagcgtgcaaatctttggcgaatttgcgggtggtggcattcagaaaggcgtcgattacggagacaaagatttctatgtgtttgacatcctgtctgatagcgggaacgagaaagtttactgggatgactatcgcgtcgaatcgttttgcaccacgctcggtctgaaattagcgcctctgctgggacgtggtagtttcgctgaactgtcccagtacccaaacgatttcaaaagcattgtgaaccgttataatgaattggttgacacggtcggcctggagatggccaataaacacgtctttggtccgcaagcgtcttctgaaactggcgtagcagaaggctacgttcttaaacccgtctatccgatcttctttaataccggtacgcgcgtggcgattaaatgcaagaactccaaattttcggagaaagccaagctggactcgccaattaaggcgaaggtggaactgacggagaacgataaacgtctgctcgaaatctttagcgagtatgttacctggaatcgcgtcagtaacgtactgtcacatattggctcagtgaccgcaaaagattttgggcgtgtttcgggtctgacgatgaaagacatcattaatgaagcagcacgcgaaggccatgatctgctgttcgctgataacccgtcggcggtgctgaaggagctgactggcctcatccagaacacgattcgttccaaatggcacgaagttctggag

SEQ ID NO: 980 - protein, 346 aa, synthetic construct
  REGION 1..346: note = variant of RNA ligase 2 from Klebsiella phage KP179
MHHHHHHGGSNTFAYYSSLENHYNNKFIEKIRGAGFAMHTVEWVAREKIHGTNFSVIITPTEIVPAKRTGPILEGESFFGHEIIMKKYKDSFVKVQNMLNAMDLVSVQIFGEFAGGGIQKGVDYGDKDFYVFDILSDSGNEKVYWDDYRVESFCTTLGLKLAPLLGRGSFAELSQYPNDFKSIVNRYNELVDTVGLEMANKHVFGPQASSETGVAEGYVLKPVYPIFFNTGTRVAIKCKNSKFSEKAKLDSPIKAKVELTENDKRLLEIFSEYVTWNRVSNVLSHIGSVTAKDFGRVSGLTMKDIINEAAREGHDLLFADNPSAVLKELTGLIQNTIRSKWHEVLE

SEQ ID NO: 981 - DNA, 1038 bp, synthetic construct
  misc_feature 1..1038: note = variant of RNA ligase 2 from Klebsiella phage KP179
  source 1..1038: mol_type = other DNA
atgcatcaccatcaccatcacggtggcagcaacacgtttgcgtattattcaagtctggaaaaccattacaataataagttcattgagaagatccgtggggcaggcttcgcgatgcacaccgtggaatgggtagctcgcgagaagattcatggaacgaactttagcgttatcattactccgaccgaaatcgtcccagccaaacgcacagggccgatcttggaaggcgagtcgttctttggtcacgaaattatcatgaaaaaatataaagactccttcgtgaaggtgcagaacatgctgaatgccatggatcttgttagcgtgcaaatctttggcgaatttgcgggtggtggcattcagaaaggcgtcgattacggagacaaagatttctatgtgtttgacatcctgtctgatagcgggaacgagaaagtttactgggatgactatcgcgtcgaatcgttttgcaccggtctcggtctgaaattagcgcctctgctgggacgtggtagtttcgctgaactgtcccagtacccaaacgatttcaaaagcattgtgaaccgttataatgaattggttgacacggtcggcctggagatggccaataaacacgtctttggtccgcaagcgtcttctgaaactggcgtagcagaaggctacgttcttaaacccgtctatccgatcttctttaataccggtacgcgcgtggcgattaaatgcaagaactccaaattttcggagaaagccaagctggactcgccaattaaggcgaaggtggaactgacggagaacgataaacgtctgctcgaaatctttagcgagtatgttacctggaatcgcgtcagtaacgtactgtcacatattggctcagtgaccgcaaaagattttgggcgtgtttcgggtctgacgatgaaagacatcattaatgaagcagcacgcgaaggccatgatctgtggttcgctgataacccgtcggcggtgctgaaggagctgactggcctcatccagaacacgattcgttccaaatggcacgaagttctggag

SEQ ID NO: 982 - protein, 346 aa, synthetic construct
  REGION 1..346: note = variant of RNA ligase 2 from Klebsiella phage KP179
MHHHHHHGGSNTFAYYSSLENHYNNKFIEKIRGAGFAMHTVEWVAREKIHGTNFSVIITPTEIVPAKRTGPILEGESFFGHEIIMKKYKDSFVKVQNMLNAMDLVSVQIFGEFAGGGIQKGVDYGDKDFYVFDILSDSGNEKVYWDDYRVESFCTGLGLKLAPLLGRGSFAELSQYPNDFKSIVNRYNELVDTVGLEMANKHVFGPQASSETGVAEGYVLKPVYPIFFNTGTRVAIKCKNSKFSEKAKLDSPIKAKVELTENDKRLLEIFSEYVTWNRVSNVLSHIGSVTAKDFGRVSGLTMKDIINEAAREGHDLWFADNPSAVLKELTGLIQNTIRSKWHEVLE

SEQ ID NO: 983 - DNA, 1038 bp, synthetic construct
  misc_feature 1..1038: note = variant of RNA ligase 2 from Klebsiella phage KP179
  source 1..1038: mol_type = other DNA
atgcatcaccatcaccatcacggtggcagcaacacgtttgcgtattattcaagtctggaaaaccattacaataataagttcattgagaagatccgtggtgcaggcttcctgatgcacaccgtggaatgggtagctcgcgagaagattcatggaacgaactttagcgttatcattactccgaccgaaatcgtcccagccaaacgcacagggccgatcttggaaggcgagtcgttctttggtcacgaaattatcatgaaaaaatataaagactccttcgtgaaggtgcagaacatgctgaatgccatggatcttgttagcgtgcaaatctttggcgaatttgcgggtggtggcattcagaaaggcgtcgattacggagacaaagatttctatgtgtttgacatcctgtctgatagcgggaacgagaaagtttactgggatgactatcgcgtcgaatcgttttgcaccggtctcggtctgaaattagcgcctctgctgggacgtggtagtttcgctgaactgtcccagtacccaaacgatttcaaaagcattgtgaaccgttataatgaattggttgacacggtcggcctggagatggccaataaacacgtctttggtccgcaagcgtcttctgaaactggcgtagcagaaggctacgttcttaaacccgtctatccgatcttctttaataccggtacgcgcgtggcgattaaatgcaagaactccaaattttcggagaaagccaagctggactcgccaattaaggcgaaggtggaactgacggagaacgataaattcctgctcgaaatctttagcgagtatgttacctggaatcgcgtcagtaacgtactgtcacatattggctcagtgaccgcaaaagattttgggcgtgtttcgggtctgacgatgaaagacatcattaatgaagcagcacgcgaaggccatgatctgtggttcgctgataacccgtcggcggtgctgaaggagctgactggcctcatccagaacacgattcgttccaaatggcacgaagttctggag

SEQ ID NO: 984 - protein, 346 aa, synthetic construct
  REGION 1..346: note = variant of RNA ligase 2 from Klebsiella phage KP179
MHHHHHHGGSNTFAYYSSLENHYNNKFIEKIRGAGFLMHTVEWVAREKIHGTNFSVIITPTEIVPAKRTGPILEGESFFGHEIIMKKYKDSFVKVQNMLNAMDLVSVQIFGEFAGGGIQKGVDYGDKDFYVFDILSDSGNEKVYWDDYRVESFCTGLGLKLAPLLGRGSFAELSQYPNDFKSIVNRYNELVDTVGLEMANKHVFGPQASSETGVAEGYVLKPVYPIFFNTGTRVAIKCKNSKFSEKAKLDSPIKAKVELTENDKFLLEIFSEYVTWNRVSNVLSHIGSVTAKDFGRVSGLTMKDIINEAAREGHDLWFADNPSAVLKELTGLIQNTIRSKWHEVLE

SEQ ID NO: 985 - DNA, 1038 bp, synthetic construct
  misc_feature 1..1038: note = variant of RNA ligase 2 from Klebsiella phage KP179
  source 1..1038: mol_type = other DNA
atgcatcaccatcaccatcacggtggcagcaacacgtttgcgtattattcaagtctggaaaaccattacaataataagttcattgagaagatccgtggggcaggcttcctgatgcacaccgtggaatgggtagctcgcgagaagattcatggaacgaactttagcgttatcattactccgaccgaaatcgtcccagccaaacgcacagggccgatcttggaaggcgagtcgttctttggtcacgaaattatcatgaaaaaatataaagactccttcgtgaaggtgcagaacatgctgaatgccatggatcttgttagcgtgcaaatctttggcgaatttgcgggtggtggcattcagaaaggcgtcgattacggagacaaagatttctatgtgtttgacatcctgtctgatagcgggaacgagaaagtttactgggatgactatcgcgtcgaatcgttttgcaccacgctcggtctgaaattagcgcctctgctgggacgtggtagtttcgctgaactgtcccagtacccaaacgatttcaaaagcattgtgaaccgttataatgaattggttgacacggtcggcctggagatggccaataaacacgtctttggtccgcaagcgtcttctgaaactggcgtagcagaaggctacgttcttaaacccgtctatccgatcttctttaataccggtacgcgcgtggcgattaaatgcaagaactccaaattttcggagaaagccaagctggactcgccaattaaggcgaaggtggaactgacggagaacgataaattcctgctcgaaatctttagcgagtatgttacctggaatcgcgtcagtaacgtactgtcacatattggctcagtgaccgcaaaagattttgggcgtgtttcgggtctgacgatgaaagacatcattaatgaagcagcacgcgaaggccatgatctgtggttcgctgataacccgtcggcggtgctgaaggagctgactggcctcatccagaacacgattcgttccaaatggcacgaagttctggag

SEQ ID NO: 986 - protein, 346 aa, synthetic construct
  REGION 1..346: note = variant of RNA ligase 2 from Klebsiella phage KP179
MHHHHHHGGSNTFAYYSSLENHYNNKFIEKIRGAGFLMHTVEWVAREKIHGTNFSVIITPTEIVPAKRTGPILEGESFFGHEIIMKKYKDSFVKVQNMLNAMDLVSVQIFGEFAGGGIQKGVDYGDKDFYVFDILSDSGNEKVYWDDYRVESFCTTLGLKLAPLLGRGSFAELSQYPNDFKSIVNRYNELVDTVGLEMANKHVFGPQASSETGVAEGYVLKPVYPIFFNTGTRVAIKCKNSKFSEKAKLDSPIKAKVELTENDKFLLEIFSEYVTWNRVSNVLSHIGSVTAKDFGRVSGLTMKDIINEAAREGHDLWFADNPSAVLKELTGLIQNTIRSKWHEVLE

SEQ ID NO: 987 - DNA, 1038 bp, synthetic construct
  misc_feature 1..1038: note = variant of RNA ligase 2 from Klebsiella phage KP179
  source 1..1038: mol_type = other DNA
atgcatcaccatcaccatcacggtggcagcaacacgtttgcgtattattcaagtctggaaaaccattacaataataagttcattgagaagatccgtggtgcaggcttcctgatgcacaccgtggaatgggtagctcgcgagaagattcatggaacgaactttagcgttatcattactccgaccgaaatcgtcccagccaaacgcacagggccgatcttggaaggcgagtcgttctttggtcacgaaattatcatgaaaaaatataaagactccttcgtgaaggtgcagaacatgctgaatgccatggatcttgttagcgtgcaaatctttggcgaatttgcgggtggtggcattcagaaaggcgtcgattacggagacaaagatttctatgtgtttgacatcctgtctgatagcgggaacgagaaagtttactgggatgactatcgcgtcgaatcgttttgcaccgggctcggtctgaaattagcgcctctgctgggacgtggtagtttcgctgaactgtcccagtacccaaacgatttcaaaagcattgtgaaccgttataatgaattggttgacacggtcggcctggagatggccaataaacacgtctttggtccgcaagcgtcttctgaaactggcgtagcagaaggctacgttcttaaacccgtctatccgatcttctttaataccggtacgcgcgtggcgattaaatgcaagaactccaaattttcggagaaagccaagctggactcgccaattagtgcgaaggtggaactgacggagaacgataaacgtctgctcgaaatctttagcgagtatgttacctggaatcgcgtcagtaacgtactgtcacatattggctcagtgaccgcaaaagattttgggcgtgtttcgggtctgacgatgaaagacatcattaatgaagcagcacgcgaaggccatgatctgttgttcgctgataacccgtcggcggtgctgaaggagctgactggcctcatccagaacacgattcgttccaaatggcacgaagttctggag

SEQ ID NO: 988 - protein, 346 aa, synthetic construct
  REGION 1..346: note = variant of RNA ligase 2 from Klebsiella phage KP179
MHHHHHHGGSNTFAYYSSLENHYNNKFIEKIRGAGFLMHTVEWVAREKIHGTNFSVIITPTEIVPAKRTGPILEGESFFGHEIIMKKYKDSFVKVQNMLNAMDLVSVQIFGEFAGGGIQKGVDYGDKDFYVFDILSDSGNEKVYWDDYRVESFCTGLGLKLAPLLGRGSFAELSQYPNDFKSIVNRYNELVDTVGLEMANKHVFGPQASSETGVAEGYVLKPVYPIFFNTGTRVAIKCKNSKFSEKAKLDSPISAKVELTENDKRLLEIFSEYVTWNRVSNVLSHIGSVTAKDFGRVSGLTMKDIINEAAREGHDLLFADNPSAVLKELTGLIQNTIRSKWHEVLE

SEQ ID NO: 989 - DNA, 1038 bp, synthetic construct
  misc_feature 1..1038: note = variant of RNA ligase 2 from Klebsiella phage KP179
  source 1..1038: mol_type = other DNA
atgcatcaccatcaccatcacggtggcagcaacacgtttgcgtattattcaagtctggaaaaccattacaataataagttcattgagaagatccgtctggcaggcttcctgatgcacaccgtggaatgggtagctcgcgagaagattcatggaacgaactttagcgttatcattactccgaccgaaatcgtcccagccaaacgcacagggccgatcttggaaggcgagtcgttctttggtcacgaaattatcatgaaaaaatataaagactccttcgtgaaggtgcagaacatgctgaatgccatggatcttgttagcgtgcaaatctttggcgaatttgcgggtggtggcattcagaaaggcgtcgattacggagacaaagatttctatgtgtttgacatcctgtctgatagcgggaacgagaaagtttactgggatgactatcgcgtcgaatcgttttgcaccggtctcggtctgaaattagcgcctctgctgggacgtggtagtttcgctgaactgtcccagtacccaaacgatttcaaaagcattgtgaaccgttataatgaattggttgacacggtcggcctggagatggccaataaacacgtctttggtccgcaagcgtcttctgaaactggcgtagcagaaggctacgttcttaaacccgtctatccgatcttctttaataccggtacgcgcgtggcgattaaatgcaagaactccaaattttcggagaaagccaagctggactcgccaattaaggcgaaggtggaactgacggagaacgataaacgtctgctcgaaatctttagcgagtatgttacctggaatcgcgtcagtaacgtactgtcacatattggctcagtgaccgcaaaagattttgggcgtgtttcgggtctgacgatgaaagacatcattaatgaagcagcacgcgaaggccatgatctgtggttcgctgataacccgtcggcggtgctgaaggagctgactggcctcatccagaacacgattcgttccaaatggcacgaagttctggag

SEQ ID NO: 990 - protein, 346 aa, synthetic construct
  REGION 1..346: note = variant of RNA ligase 2 from Klebsiella phage KP179
MHHHHHHGGSNTFAYYSSLENHYNNKFIEKIRLAGFLMHTVEWVAREKIHGTNFSVIITPTEIVPAKRTGPILEGESFFGHEIIMKKYKDSFVKVQNMLNAMDLVSVQIFGEFAGGGIQKGVDYGDKDFYVFDILSDSGNEKVYWDDYRVESFCTGLGLKLAPLLGRGSFAELSQYPNDFKSIVNRYNELVDTVGLEMANKHVFGPQASSETGVAEGYVLKPVYPIFFNTGTRVAIKCKNSKFSEKAKLDSPIKAKVELTENDKRLLEIFSEYVTWNRVSNVLSHIGSVTAKDFGRVSGLTMKDIINEAAREGHDLWFADNPSAVLKELTGLIQNTIRSKWHEVLE

SEQ ID NO: 991 - DNA, 1038 bp, synthetic construct
  misc_feature 1..1038: note = variant of RNA ligase 2 from Klebsiella phage KP179
  source 1..1038: mol_type = other DNA
atgcatcaccatcaccatcacggtggcagcaacacgtttgcgtattattcaagtctggaaaaccattacaataataagttcattgagaagatccgtggtgcaggcttcctgatgcacaccgtggaatgggtagctcgcgagaagattcatggaacgaactttagcgttatcattactccgaccgaaatcgtcccagccaaacgcacagggccgatcttggaaggcgagtcgttctttggtcacgaaattatcatgaaaaaatataaagactccttcgtgaaggtgcagaacatgctgaatgccatggatcttgttagcgtgcaaatctttggcgaatttgcgggtggtggcattcagaaaggcgtcgattacggagacaaagatttctatgtgtttgacatcctgtctgatagcgggaacgagaaagtttactgggatgactatcgcgtcgaatcgttttgcaccacgctcggtctgaaattagcgcctctgctgggacgtggtagtttcgctgaactgtcccagtacccaaacgatttcaaaagcattgtgaaccgttataatgaattggttgacacggtcggcctggagatggccaataaacacgtctttggtccgcaagcgtcttctgaaactggcgtagcagaaggctacgttcttaaacccgtctatccgatcttctttaataccggtacgcgcgtggcgattaaatgcaagaactccaaattttcggagaaagccaagctggactcgccaattaaggcgaaggtggaactgacggagaacgataaacgtctgctcgaaatctttagcgagtatgttacctggaatcgcgtcagtaacgtactgtcacatattggctcagtgaccgcaaaagattttgggcgtgtttcgggtctgacgatgaaagacatcattaatgaagcagcacgcgaaggccatgatctgttcttcgctgataacccgtcggcggtgctgaaggagctgactggcctcatccagaacacgattcgttccaaatggcacgaagttctggag

SEQ ID NO: 992 - protein, 346 aa, synthetic construct
  REGION 1..346: note = variant of RNA ligase 2 from Klebsiella phage KP179
MHHHHHHGGSNTFAYYSSLENHYNNKFIEKIRGAGFLMHTVEWVAREKIHGTNFSVIITPTEIVPAKRTGPILEGESFFGHEIIMKKYKDSFVKVQNMLNAMDLVSVQIFGEFAGGGIQKGVDYGDKDFYVFDILSDSGNEKVYWDDYRVESFCTTLGLKLAPLLGRGSFAELSQYPNDFKSIVNRYNELVDTVGLEMANKHVFGPQASSETGVAEGYVLKPVYPIFFNTGTRVAIKCKNSKFSEKAKLDSPIKAKVELTENDKRLLEIFSEYVTWNRVSNVLSHIGSVTAKDFGRVSGLTMKDIINEAAREGHDLFFADNPSAVLKELTGLIQNTIRSKWHEVLE

SEQ ID NO: 993 - DNA, 1038 bp, synthetic construct
  misc_feature 1..1038: note = variant of RNA ligase 2 from Klebsiella phage KP179
  source 1..1038: mol_type = other DNA
atgcatcaccatcaccatcacggtggcagcaacacgtttgcgtattattcaagtctggaaaaccattacaataataagttcattgagaagatccgtggggcaggcttcctgatgcacaccgtggaatgggtagctcgcgagaagattcatggaacgaactttagcgttatcattactccgaccgaaatcgtcccagccaaacgcacagggccgatcttggaaggcgagtcgttctttggtcacgaaattatcatgaaaaaatataaagactccttcgtgaaggtgcagaacatgctgaatgccatggatcttgttagcgtgcaaatctttggcgaatttgcgggtggtggcattcagaaaggcgtcgattacggagacaaagatttctatgtgtttgacatcctgtctgatagcgggaacgagaaagtttactgggatgactatcgcgtcgaatcgttttgcaccggtctcggtctgaaattagcgcctctgctgggacgtggtagtttcgctgaactgtcccagtacccaaacgatttcaaaagcattgtgaaccgttataatgaattggttgacacggtcggcctggagatggccaataaacacgtctttggtccgcaagcgtcttctgaaactggcgtagcagaaggctacgttcttaaacccgtctatccgatcttctttaataccggtacgcgcgtggcgattaaatgcaagaactccaaattttcggagaaagccaagctggactcgccaattaaggcgaaggtggaactgacggagaacgataaacgtctgctcgaaatctttagcgagtatgttacctggaatcgcgtcagtaacgtactgtcacatattggctcagtgaccgcaaaagattttgggcgtgtttcgggtctgacgatgaaagacatcattaatgaagcagcacgcgaaggccatgatctgttcttcgctgataacccgtcggcggtgctgaaggagctgactggcctcatccagaacacgattcgttccaaatggcacgaagttctggag

SEQ ID NO: 994 - protein, 346 aa, synthetic construct
  REGION 1..346: note = variant of RNA ligase 2 from Klebsiella phage KP179
MHHHHHHGGSNTFAYYSSLENHYNNKFIEKIRGAGFLMHTVEWVAREKIHGTNFSVIITPTEIVPAKRTGPILEGESFFGHEIIMKKYKDSFVKVQNMLNAMDLVSVQIFGEFAGGGIQKGVDYGDKDFYVFDILSDSGNEKVYWDDYRVESFCTGLGLKLAPLLGRGSFAELSQYPNDFKSIVNRYNELVDTVGLEMANKHVFGPQASSETGVAEGYVLKPVYPIFFNTGTRVAIKCKNSKFSEKAKLDSPIKAKVELTENDKRLLEIFSEYVTWNRVSNVLSHIGSVTAKDFGRVSGLTMKDIINEAAREGHDLFFADNPSAVLKELTGLIQNTIRSKWHEVLE

SEQ ID NO: 995 - DNA, 1038 bp, synthetic construct
  misc_feature 1..1038: note = variant of RNA ligase 2 from Klebsiella phage KP179
  source 1..1038: mol_type = other DNA
atgcatcaccatcaccatcacggtggcagcaacacgtttgcgtattattcaagtctggaaaaccattacaataataagttcattgagaagatccgtggtgcaggcttcctgatgcacaccgtggaatgggtagctcgcgagaagattcatggaacgaactttagcgttatcattactccgaccgaaatcgtcccagccaaacgcacagggccgatcttggaaggcgagtcgttctttggtcacgaaattatcatgaaaaaatataaagactccttcgtgaaggtgcagaacatgctgaatgccatggatcttgttagcgtgcaaatctttggcgaatttgcgggtggtggcattcagaaaggcgtcgattacggagacaaagatttctatgtgtttgacatcctgtctgatagcgggaacgagaaagtttactgggatgactatcgcgtcgaatcgttttgcaccacgctcggtctgaaattagcgcctctgctgggacgtggtagtttcgctgaactgtcccagtacccaaacgatttcaaaagcattgtgaaccgttataatgaattggttgacacggtcggcctggagatggccaataaacacgtctttggtccgcaagcgtcttctgaaactggcgtagcagaaggctacgttcttaaacccgtctatccgatcttctttaataccggtacgcgcgtggcgattaaatgcaagaactccaaattttcggagaaagccaagctggactcgccaattaaggcgaaggtggaactgacggagaacgataaacgtctgctcgaaatctttagcgagtatgttacctggaatcgcgtcagtaacgtactgtcacatattggctcagtgaccgcaaaagattttgggcgtgtttcgggtctgacgatgaaagacatcattaatgaagcagcacgcgaaggccatgatctgtggttcgctgataacccgtcggcggtgctgaaggagctgactggcctcatccagaacacgattcgttccaaatggcacgaagttctggag

SEQ ID NO: 996 - protein, 346 aa, synthetic construct
  REGION 1..346: note = variant of RNA ligase 2 from Klebsiella phage KP179
MHHHHHHGGSNTFAYYSSLENHYNNKFIEKIRGAGFLMHTVEWVAREKIHGTNFSVIITPTEIVPAKRTGPILEGESFFGHEIIMKKYKDSFVKVQNMLNAMDLVSVQIFGEFAGGGIQKGVDYGDKDFYVFDILSDSGNEKVYWDDYRVESFCTTLGLKLAPLLGRGSFAELSQYPNDFKSIVNRYNELVDTVGLEMANKHVFGPQASSETGVAEGYVLKPVYPIFFNTGTRVAIKCKNSKFSEKAKLDSPIKAKVELTENDKRLLEIFSEYVTWNRVSNVLSHIGSVTAKDFGRVSGLTMKDIINEAAREGHDLWFADNPSAVLKELTGLIQNTIRSKWHEVLE

SEQ ID NO: 997 - DNA, 1038 bp, synthetic construct
  misc_feature 1..1038: note = variant of RNA ligase 2 from Klebsiella phage KP179
  source 1..1038: mol_type = other DNA
atgcatcaccatcaccatcacggtggcagcaacacgtttgcgtattattcaagtctggaaaaccattacaataataagttcattgagaagatccgtggtgcaggcttcctgatgcacaccgtggaatgggtagctcgcgagaagattcatggaacgaactttagcgttatcattactccgaccgaaatcgtcccagccaaacgcacagggccgatcttggaaggcgagtcgttctttggtcacgaaattatcatgaaaaaatataaagactccttcgtgaaggtgcagaacatgctgaatgccatggatcttgttagcgtgcaaatctttggcgaatttgcgggtggtggcattcagaaaggcgtcgattacggagacaaagatttctatgtgtttgacatcctgtctgatagcgggaacgagaaagtttactgggatgactatcgcgtcgaatcgttttgcaccggtctcggtctgaaattagcgcctctgctgggacgtggtagtttcgctgaactgtcccagtacccaaacgatttcaaaagcattgtgaaccgttataatgaattggttgacacggtcggcctggagatggccaataaacacgtctttggtccgcaagcgtcttctgaaactggcgtagcagaaggctacgttcttaaacccgtctatccgatcttctttaataccggtacgcgcgtggcgattaaatgcaagaactccaaattttcggagaaagccaagctggactcgccaattaaggcgaaggtggaactgacggagaacgataaacgtctgctcgaaatctttagcgagtatgttacctggaatcgcgtcagtaacgtactgtcacatattggctcagtgaccgcaaaagattttgggcgtgtttcgggtctgacgatgaaagacatcattaatgaagcagcacgcgaaggccatgatctgtggttcgctgataacccgtcggcggtgctgaaggagctgactggcctcatccagaacacgattcgttccaaatggcacgaagttctggag

SEQ ID NO: 998 - protein, 346 aa, synthetic construct
  REGION 1..346: note = variant of RNA ligase 2 from Klebsiella phage KP179
MHHHHHHGGSNTFAYYSSLENHYNNKFIEKIRGAGFLMHTVEWVAREKIHGTNFSVIITPTEIVPAKRTGPILEGESFFGHEIIMKKYKDSFVKVQNMLNAMDLVSVQIFGEFAGGGIQKGVDYGDKDFYVFDILSDSGNEKVYWDDYRVESFCTGLGLKLAPLLGRGSFAELSQYPNDFKSIVNRYNELVDTVGLEMANKHVFGPQASSETGVAEGYVLKPVYPIFFNTGTRVAIKCKNSKFSEKAKLDSPIKAKVELTENDKRLLEIFSEYVTWNRVSNVLSHIGSVTAKDFGRVSGLTMKDIINEAAREGHDLWFADNPSAVLKELTGLIQNTIRSKWHEVLE

SEQ ID NO: 999 - DNA, 1038 bp, synthetic construct
  misc_feature 1..1038: note = variant of RNA ligase 2 from Klebsiella phage KP179
  source 1..1038: mol_type = other DNA
atgcatcaccatcaccatcacggtggcagcaacacgtttgcgtattattcaagtctggaaaaccattacaataataagttcattgagaagatccgtggggcaggcttcgcgatgcacaccgtggaatgggtagctcgcgagaagattcatggaacgaactttagcgttatcattactccgaccgaaatcgtcccagccaaacgcacagggccgatcttggaaggcgagtcgttctttggtcacgaaattatcatgaaaaaatataaagactccttcgtgaaggtgcagaacatgctgaatgccatggatcttgttagcgtgcaaatctttggcgaatttgcgggtggtggcattcagaaaggcgtcgattacggagacaaagatttctatgtgtttgacatcctgtctgatagcgggaacgagaaagtttactgggatgactatcgcgtcgaatcgttttgcaccacgctcggtctgaaattagcgcctctgctgggacgtggtagtttcgctgaactgtcccagtacccaaacgatttcaaaagcattgtgaaccgttataatgaattggttgacacggtcggcctggagatggccaataaacacgtctttggtccgcaagcgtcttctgaaactggcgtagcagaaggctacgttcttaaacccgtctatccgatcttctttaataccggtacgcgcgtggcgattaaatgcaagaactccaaattttcggagaaagccaagctggactcgccaattaaggcgaaggtggaactgacggagaacgataaacgtctgctcgaaatctttagcgagtatgttacctggaatcgcgtcagtaacgtactgtcacatattggctcagtgaccgcaaaagattttgggcgtgtttcgggtctgacgatgaaagacatcattaatgaagcagcacgcgaaggccatgatctgtggttcgctgataacccgtcggcggtgctgaaggagctgactggcctcatccagaacacgattcgttccaaatggcacgaagttctggag

SEQ ID NO: 1000 - protein, 346 aa, synthetic construct
  REGION 1..346: note = variant of RNA ligase 2 from Klebsiella phage KP179
MHHHHHHGGSNTFAYYSSLENHYNNKFIEKIRGAGFAMHTVEWVAREKIHGTNFSVIITPTEIVPAKRTGPILEGESFFGHEIIMKKYKDSFVKVQNMLNAMDLVSVQIFGEFAGGGIQKGVDYGDKDFYVFDILSDSGNEKVYWDDYRVESFCTTLGLKLAPLLGRGSFAELSQYPNDFKSIVNRYNELVDTVGLEMANKHVFGPQASSETGVAEGYVLKPVYPIFFNTGTRVAIKCKNSKFSEKAKLDSPIKAKVELTENDKRLLEIFSEYVTWNRVSNVLSHIGSVTAKDFGRVSGLTMKDIINEAAREGHDLWFADNPSAVLKELTGLIQNTIRSKWHEVLE

SEQ ID NO: 1001 - DNA, 1038 bp, synthetic construct
  misc_feature 1..1038: note = variant of RNA ligase 2 from Klebsiella phage KP179
  source 1..1038: mol_type = other DNA
atgcatcaccatcaccatcacggtggcagcaacacgtttgcgtattattcacacctggaaaaccattacaataataagttcattgagaagatccgtggtgcaggcttcctgatgcacaccgtggaatgggtagctcgcgagaagattcatggaacgaactttagcgttatcattactccgaccgaaatcgtcccagccaaacgcacagggccgatcttggaaggcgagtcgttctttggtcacgaaattatcatgaaaaaatataaagactccttcgtgaaggtgcagaacatgctgaatgccatggatcttgttagcgtgcaaatctttggcgaatttgcgggtggtggcattcagaaaggcgtcgattacggagacaaagatttctatgtgtttgacatcctgtctgatagcgggaacgagaaagtttactgggatgactatcgcgtcgaatcgttttgcaccactctcggtctgaaattagcgcctctgctgggacgtggtagtttcgctgaactgtcccagtacccaaacgatttcaaaagcattgtgaaccgttataatgaattggttgacacggtcggcctggagatggccaataaacacgtctttggtccgcaagcgtcttctgaaactggcgtagcagaaggctacgttcttaaacccgtctatccgatcttctttaataccggtacgcgcgtggcgattaaatgcaagaactccaaattttcggagaaagccaagctggactcgccaattaaggcgaaggtggaactgacggagaacgataaacgtctgctcgaaatctttagcgagtatgttacctggaatcgcgtcagtaacgtactgtcacatattggctcagtgaccgcaaaagattttgggcgtgtttcgggtctgacgatgaaagacatcattaacgaagcagcacgcgaaggccatgatctgttgttcgctgataacccgtcggcggtgctgaaggagctgactggcctcatccagaacacgattatgtccaaatggcacgaagttctggag

SEQ ID NO: 1002 - protein, 346 aa, synthetic construct
  REGION 1..346: note = variant of RNA ligase 2 from Klebsiella phage KP179
MHHHHHHGGSNTFAYYSHLENHYNNKFIEKIRGAGFLMHTVEWVAREKIHGTNFSVIITPTEIVPAKRTGPILEGESFFGHEIIMKKYKDSFVKVQNMLNAMDLVSVQIFGEFAGGGIQKGVDYGDKDFYVFDILSDSGNEKVYWDDYRVESFCTTLGLKLAPLLGRGSFAELSQYPNDFKSIVNRYNELVDTVGLEMANKHVFGPQASSETGVAEGYVLKPVYPIFFNTGTRVAIKCKNSKFSEKAKLDSPIKAKVELTENDKRLLEIFSEYVTWNRVSNVLSHIGSVTAKDFGRVSGLTMKDIINEAAREGHDLLFADNPSAVLKELTGLIQNTIMSKWHEVLE

SEQ ID NO: 1003 - DNA, 1038 bp, synthetic construct
  misc_feature 1..1038: note = variant of RNA ligase 2 from Klebsiella phage KP179
  source 1..1038: mol_type = other DNA
atgcatcaccatcaccatcacggtggcagcaacacgtttgcgtattattcaagtctggaaaaccattacaataataagttcattgagaagatccgtggtgcaggcttcctgatgcacaccgtggaatgggtagctcgcgagaagattcatggaacgaactttagcgttatcattactccgaccgaaatcgtcccagccaaacgcacagggccgatcttggaaggcgagtcgttctttggtcacgaaattatcatgaaaaaatataaagactccttcgtgaaggtgcagaacatgctgaatgccatggatcttgttagcgtgcaaatctttggcgaatttgcgggtggtggcattcagaaaggcgtcgattacggagacaaagatttctatgtgtttgacatcctgtctgatagcgggaacgagaaagtttactgggatgactatcgcgtcgaatcgttttgcaccacgctcggtctgaaattagcgcctctgctgggacgtggtagtttcgctgaactgtcccagtacccaaacgatttcaaaagcattgtgaaccgttataatgaattggttgacacggtcggcctggagatggccaataaacacgtctttggtccgcaagcgtcttctgaaactggcgtagcagaaggctacgttcttaaacccgtctatccgatcttctttaataccggtacgcgcgtggcgattaaatgcaagaactccaaattttcggagaaagccaagctggactcgccaattaaggcgaaggtggaactgacggagaacgataaacgtctgctcgaaatctttagcgagtatgttacctggaatcgcgtcagtaacgtactgtcacatattggctcagtgaccgcaaaagattttgggcgtgtttcgggtctgacgatgaaagacatcattaacgaagcagcacgcgaaggccatgatctgttgttcgctgataacccgtcggcggtgctgaaggagctgactggcctcatccagaacacgattatgtccaaatggcacgaagttctggag

SEQ ID NO: 1004 - protein, 346 aa, synthetic construct
  REGION 1..346: note = variant of RNA ligase 2 from Klebsiella phage KP179
MHHHHHHGGSNTFAYYSSLENHYNNKFIEKIRGAGFLMHTVEWVAREKIHGTNFSVIITPTEIVPAKRTGPILEGESFFGHEIIMKKYKDSFVKVQNMLNAMDLVSVQIFGEFAGGGIQKGVDYGDKDFYVFDILSDSGNEKVYWDDYRVESFCTTLGLKLAPLLGRGSFAELSQYPNDFKSIVNRYNELVDTVGLEMANKHVFGPQASSETGVAEGYVLKPVYPIFFNTGTRVAIKCKNSKFSEKAKLDSPIKAKVELTENDKRLLEIFSEYVTWNRVSNVLSHIGSVTAKDFGRVSGLTMKDIINEAAREGHDLLFADNPSAVLKELTGLIQNTIMSKWHEVLE

SEQ ID NO: 1005 - DNA, 1038 bp, synthetic construct
  misc_feature 1..1038: note = variant of RNA ligase 2 from Klebsiella phage KP179
  source 1..1038: mol_type = other DNA
atgcatcaccatcaccatcacggtggcagcaacacgtttgcgtattattcaagtctggaaaaccattacaataataagttcattgagaagatccgtggggcaggcttcctgatgcacaccgtggaatgggtagctcgcgagaagattcatggaacgaactttagcgttatcattactccgaccgaaatcgtcccagccaaacgcacagggccgatcttggaaggcgagtcgttctttggtcacgaaattatcatgaaaaaatataaagactccttcgtgaaggtgcagaacatgctgaatgccatggatcttgttagcgtgcaaatctttggcgaatttgcgggtggtggcattcagaaaggcgtcgattacggagacaaagatttctatgtgtttgacatcctgtctgatagcgggaacgagaaagtttactgggatgactatcgcgtcgaatcgttttgcaccggtctcggtctgaaattagcgcctctgctgggacgtggtagtttcgctgaactgtcccagtacccaaacgatttcaaaagcattgtgaaccgttataatgaattggttgacacggtcggcctggagatggccaataaacacgtctttggtccgcaagcgtcttctgaaactggcgtagcagaaggctacgttcttaaacccgtctatccgatcttctttaataccggtacgcgcgtggcgattaaatgcaagaactccaaattttcggagaaatcgaagctggactcgccaattaaggcgaaggtggaactgacggagaacgataaacgtctgctcgaaatctttagcgagtatgttacctggaatcgcgtcagtaacgtactgtcacatattggctcagtgaccgcaaaagattttgggcgtgtttcgggtctgacgatgaaagacatcattaatgaagcagcacgcgaaggccatgatctgtggttcgctgataacccgtcggcggtgctgaaggagctgactggcctcatccagaacacgattcgttccaaatggcacgaagttctggag

SEQ ID NO: 1006 - protein, 346 aa, synthetic construct
  REGION 1..346: note = variant of RNA ligase 2 from Klebsiella phage KP179
MHHHHHHGGSNTFAYYSSLENHYNNKFIEKIRGAGFLMHTVEWVAREKIHGTNFSVIITPTEIVPAKRTGPILEGESFFGHEIIMKKYKDSFVKVQNMLNAMDLVSVQIFGEFAGGGIQKGVDYGDKDFYVFDILSDSGNEKVYWDDYRVESFCTGLGLKLAPLLGRGSFAELSQYPNDFKSIVNRYNELVDTVGLEMANKHVFGPQASSETGVAEGYVLKPVYPIFFNTGTRVAIKCKNSKFSEKSKLDSPIKAKVELTENDKRLLEIFSEYVTWNRVSNVLSHIGSVTAKDFGRVSGLTMKDIINEAAREGHDLWFADNPSAVLKELTGLIQNTIRSKWHEVLE

SEQ ID NO: 1007 - DNA, 1038 bp, synthetic construct
  misc_feature 1..1038: note = variant of RNA ligase 2 from Klebsiella phage KP179
  source 1..1038: mol_type = other DNA
atgcatcaccatcaccatcacggtggcagcaacacgtttgcgtattattcacacctggaaaaccattacaataataagttcattgagaagatccgtggtgcaggcttcctgatgcacaccgtggaatgggtagctcgcgagaagattcatggaacgaactttagcgttatcattactccgaccgaaatcgtcccagccaaacgcacagggccgatcttggaaggcgagtcgttctttggtcacgaaattatcatgaaaaaatataaagactccttcgtgaaggtgcagaacatgctgaatgccatggatcttgttagcgtgcaaatctttggcgaatttgcgggtggtggcattcagaaaggcgtcgattacggagacaaagatttctatgtgtttgacatcctgtctgatagcgggaacgagaaagtttactgggatgactatcgcgtcgaatcgttttgcaccactctcggtctgaaattagcgcctctgctgggacgtggtagtttcgctgaactgtcccagtacccaaacgatttcaaaagcattgtgaaccgttataatgaattggttgacacggtcggcctggagatggccaataaacacgtctttggtccgcaagcgtcttctgaaactggcgtagcagaaggctacgttcttaaacccgtctatccgatcttctttaataccggtacgcgcgtggcgattaaatgcaagaactccaaattttcggagaaagccaagctggactcgccaattaaggcgaaggtggaactgacggagaacgataaacgtctgctcgaaatctttagcgagtatgttacctggaatcgcgtcagtaacgtactgtcacatattggctcagtgaccgcaaaagattttgggcgtgtttcgggtctgacgatgaaagacatcattaatgaagcagcacgcgaaggccatgatctgttgttcgctgataacccgtcggcggtgctgaaggagctgactggcctcatccagaacacgattctgtccaaatggcacgaagttctggag

SEQ ID NO: 1008 - protein, 346 aa, synthetic construct
  REGION 1..346: note = variant of RNA ligase 2 from Klebsiella phage KP179
MHHHHHHGGSNTFAYYSHLENHYNNKFIEKIRGAGFLMHTVEWVAREKIHGTNFSVIITPTEIVPAKRTGPILEGESFFGHEIIMKKYKDSFVKVQNMLNAMDLVSVQIFGEFAGGGIQKGVDYGDKDFYVFDILSDSGNEKVYWDDYRVESFCTTLGLKLAPLLGRGSFAELSQYPNDFKSIVNRYNELVDTVGLEMANKHVFGPQASSETGVAEGYVLKPVYPIFFNTGTRVAIKCKNSKFSEKAKLDSPIKAKVELTENDKRLLEIFSEYVTWNRVSNVLSHIGSVTAKDFGRVSGLTMKDIINEAAREGHDLLFADNPSAVLKELTGLIQNTILSKWHEVLE

SEQ ID NO: 1009 - DNA, 1038 bp, synthetic construct
  misc_feature 1..1038: note = variant of RNA ligase 2 from Klebsiella phage KP179
  source 1..1038: mol_type = other DNA
atgcatcaccatcaccatcacggtggcagcaacacgtttgcgtattattcaagtctggaaaaccattacaataataagttcattgagaagatccgtctggcaggcttcctgatgcacaccgtggaatgggtagctcgcgagaagattcatggaacgaactttagcgttatcattactccgaccgaaatcgtcccagccaaacgcacagggccgatcttggaaggcgagtcgttctttggtcacgaaattatcatgaaaaaatataaagactccttcgtgaaggtgcagaacatgctgaatgccatggatcttgttagcgtgcaaatctttggcgaatttgcgggtggtggcattcagaaaggcgtcgattacggagacaaagatttctatgtgtttgacatcctgtctgatagcgggaacgagaaagtttactgggatgactatcgcgtcgaatcgttttgcaccacgctcggtctgaaattagcgcctctgctgggacgtggtagtttcgctgaactgtcccagtacccaaacgatttcaaaagcattgtgaaccgttataatgaattggttgacacggtcggcctggagatggccaataaacacgtctttggtccgcaagcgtcttctgaaactggcgtagcagaaggctacgttcttaaacccgtctatccgatcttctttaataccggtacgcgcgtggcgattaaatgcaagaactccaaattttcggagaaagccaagctggactcgccaattaaggcgaaggtggaactgacggagaacgataaacgtctgctcgaaatctttagcgagtatgttacctggaatcgcgtcagtaacgtactgtcacatattggctcagtgaccgcaaaagattttgggcgtgtttcgggtctgacgatgaaagacatcattaatgaagcagcacgcgaaggccatgatctgtggttcgctgataacccgtcggcggtgctgaaggagctgactggcctcatccagaacacgattcgttccaaatggcacgaagttctggag

SEQ ID NO: 1010 - protein, 346 aa, synthetic construct
  REGION 1..346: note = variant of RNA ligase 2 from Klebsiella phage KP179
MHHHHHHGGSNTFAYYSSLENHYNNKFIEKIRLAGFLMHTVEWVAREKIHGTNFSVIITPTEIVPAKRTGPILEGESFFGHEIIMKKYKDSFVKVQNMLNAMDLVSVQIFGEFAGGGIQKGVDYGDKDFYVFDILSDSGNEKVYWDDYRVESFCTTLGLKLAPLLGRGSFAELSQYPNDFKSIVNRYNELVDTVGLEMANKHVFGPQASSETGVAEGYVLKPVYPIFFNTGTRVAIKCKNSKFSEKAKLDSPIKAKVELTENDKRLLEIFSEYVTWNRVSNVLSHIGSVTAKDFGRVSGLTMKDIINEAAREGHDLWFADNPSAVLKELTGLIQNTIRSKWHEVLE

SEQ ID NO: 1011 - DNA, 1038 bp, synthetic construct
  misc_feature 1..1038: note = variant of RNA ligase 2 from Klebsiella phage KP179
  source 1..1038: mol_type = other DNA
atgcatcaccatcaccatcacggtggcagcaacacgtttgcgtattattcaagtctggaaaaccattacaataataagttcattgagaagatccgtggggcaggcttcgcgatgcacaccgtggaatgggtagctcgcgagaagattcatggaacgaactttagcgttatcattactccgaccgaaatcgtcccagccaaacgcacagggccgatcttggaaggcgagtcgttctttggtcacgaaattatcatgaaaaaatataaagactccttcgtgaaggtgcagaacatgctgaatgccatggatcttgttagcgtgcaaatctttggcgaatttgcgggtggtggcattcagaaaggcgtcgattacggagacaaagatttctatgtgtttgacatcctgtctgatagcgggaacgagaaagtttactgggatgactatcgcgtcgaatcgttttgcaccacgctcggtctgaaattagcgcctctgctgggacgtggtagtttcgctgaactgtcccagtacccaaacgatttcaaaagcattgtgaaccgttataatgaattggttgacacggtcggcctggagatggccaataaacacgtctttggtccgcaagcgtcttctgaaactggcgtagcagaaggctacgttcttaaacccgtctatccgatcttctttaataccggtacgcgcgtggcgattaaatgcaagaactccaaattttcggagaaatcgaagctggactcgccaattaaggcgaaggtggaactgacggagaacgataaattcctgctcgaaatctttagcgagtatgttacctggaatcgcgtcagtaacgtactgtcacatattggctcagtgaccgcaaaagattttgggcgtgtttcgggtctgacgatgaaagacatcattaatgaagcagcacgcgaaggccatgatctgttcttcgctgataacccgtcggcggtgctgaaggagctgactggcctcatccagaacacgattcgttccaaatggcacgaagttctggag

SEQ ID NO: 1012 - protein, 346 aa, synthetic construct
  REGION 1..346: note = variant of RNA ligase 2 from Klebsiella phage KP179
MHHHHHHGGSNTFAYYSSLENHYNNKFIEKIRGAGFAMHTVEWVAREKIHGTNFSVIITPTEIVPAKRTGPILEGESFFGHEIIMKKYKDSFVKVQNMLNAMDLVSVQIFGEFAGGGIQKGVDYGDKDFYVFDILSDSGNEKVYWDDYRVESFCTTLGLKLAPLLGRGSFAELSQYPNDFKSIVNRYNELVDTVGLEMANKHVFGPQASSETGVAEGYVLKPVYPIFFNTGTRVAIKCKNSKFSEKSKLDSPIKAKVELTENDKFLLEIFSEYVTWNRVSNVLSHIGSVTAKDFGRVSGLTMKDIINEAAREGHDLFFADNPSAVLKELTGLIQNTIRSKWHEVLE

SEQ ID NO: 1013 - DNA, 1038 bp, synthetic construct
  misc_feature 1..1038: note = variant of RNA ligase 2 from Klebsiella phage KP179
  source 1..1038: mol_type = other DNA
atgcatcaccatcaccatcacggtggcagcaacacgtttgcgtattattcaagtctggaaaaccattacaataataagttcattgagaagatccgtggggcaggcttcgcgatgcacaccgtggaatgggtagctcgcgagaagattcatggaacgaactttagcgttatcattactccgaccgaaatcgtcccagccaaacgcacagggccgatcttggaaggcgagtcgttctttggtcacgaaattatcatgaaaaaatataaagactccttcgtgaaggtgcagaacatgctgaatgccatggatcttgttagcgtgcaaatctttggcgaatttgcgggtggtggcattcagaaaggcgtcgattacggagacaaagatttctatgtgtttgacatcctgtctgatagcgggaacgagaaagtttactgggatgactatcgcgtcgaatcgttttgcaccacgctcggtctgaaattagcgcctctgctgggacgtggtagtttcgctgaactgtcccagtacccaaacgatttcaaaagcattgtgaaccgttataatgaattggttgacacggtcggcctggagatggccaataaacacgtctttggtccgcaagcgtcttctgaaactggcgtagcagaaggctacgttcttaaacccgtctatccgatcttctttaataccggtacgcgcgtggcgattaaatgcaagaactccaaattttcggagaaagccaagctggactcgccaattaaggcgaaggtggaactgacggagaacgataaacgtctgctcgaaatctttagcgagtatgttacctggaatcgcgtcagtaacgtactgtcacatattggctcagtgaccgcaaaagattttgggcgtgtttcgggtctgacgatgaaagacatcattaatgaagcagcacgcgaaggccatgatctgttcttcgctgataacccgtcggcggtgctgaaggagctgactggcctcatccagaacacgattcgttccaaatggcacgaagttctggag

SEQ ID NO: 1014 - protein, 346 aa, synthetic construct
  REGION 1..346: note = variant of RNA ligase 2 from Klebsiella phage KP179
MHHHHHHGGSNTFAYYSSLENHYNNKFIEKIRGAGFAMHTVEWVAREKIHGTNFSVIITPTEIVPAKRTGPILEGESFFGHEIIMKKYKDSFVKVQNMLNAMDLVSVQIFGEFAGGGIQKGVDYGDKDFYVFDILSDSGNEKVYWDDYRVESFCTTLGLKLAPLLGRGSFAELSQYPNDFKSIVNRYNELVDTVGLEMANKHVFGPQASSETGVAEGYVLKPVYPIFFNTGTRVAIKCKNSKFSEKAKLDSPIKAKVELTENDKRLLEIFSEYVTWNRVSNVLSHIGSVTAKDFGRVSGLTMKDIINEAAREGHDLFFADNPSAVLKELTGLIQNTIRSKWHEVLE

SEQ ID NO: 1015 - DNA, 1038 bp, synthetic construct
  misc_feature 1..1038: note = variant of RNA ligase 2 from Klebsiella phage KP179
  source 1..1038: mol_type = other DNA
atgcatcaccatcaccatcacggtggcagcaacacgtttgcgtattattcaagtctggaaaaccattacaataataagttcattgagaagatccgtctggcaggcttcgcgatgcacaccgtggaatgggtagctcgcgagaagattcatggaacgaactttagcgttatcattactccgaccgaaatcgtcccagccaaacgcacagggccgatcttggaaggcgagtcgttctttggtcacgaaattatcatgaaaaaatataaagactccttcgtgaaggtgcagaacatgctgaatgccatggatcttgttagcgtgcaaatctttggcgaatttgcgggtggtggcattcagaaaggcgtcgattacggagacaaagatttctatgtgtttgacatcctgtctgatagcgggaacgagaaagtttactgggatgactatcgcgtcgaatcgttttgcaccggtctcggtctgaaattagcgcctctgctgggacgtggtagtttcgctgaactgtcccagtacccaaacgatttcaaaagcattgtgaaccgttataatgaattggttgacacggtcggcctggagatggccaataaacacgtctttggtccgcaagcgtcttctgaaactggcgtagcagaaggctacgttcttaaacccgtctatccgatcttctttaataccggtacgcgcgtggcgattaaatgcaagaactccaaattttcggagaaagccaagctggactcgccaattaaggcgaaggtggaactgacggagaacgataaacgtctgctcgaaatctttagcgagtatgttacctggaatcgcgtcagtaacgtactgtcacatattggctcagtgaccgcaaaagattttgggcgtgtttcgggtctgacgatgaaagacatcattaatgaagcagcacgcgaaggccatgatctgtggttcgctgataacccgtcggcggtgctgaaggagctgactggcctcatccagaacacgattcgttccaaatggcacgaagttctggag

SEQ ID NO: 1016 - protein, 346 aa, synthetic construct
  REGION 1..346: note = variant of RNA ligase 2 from Klebsiella phage KP179
MHHHHHHGGSNTFAYYSSLENHYNNKFIEKIRLAGFAMHTVEWVAREKIHGTNFSVIITPTEIVPAKRTGPILEGESFFGHEIIMKKYKDSFVKVQNMLNAMDLVSVQIFGEFAGGGIQKGVDYGDKDFYVFDILSDSGNEKVYWDDYRVESFCTGLGLKLAPLLGRGSFAELSQYPNDFKSIVNRYNELVDTVGLEMANKHVFGPQASSETGVAEGYVLKPVYPIFFNTGTRVAIKCKNSKFSEKAKLDSPIKAKVELTENDKRLLEIFSEYVTWNRVSNVLSHIGSVTAKDFGRVSGLTMKDIINEAAREGHDLWFADNPSAVLKELTGLIQNTIRSKWHEVLE

SEQ ID NO: 1017 - DNA, 1038 bp, synthetic construct
  misc_feature 1..1038: note = variant of RNA ligase 2 from Klebsiella phage KP179
  source 1..1038: mol_type = other DNA
atgcatcaccatcaccatcacggtggcagcaacacgtttgcgtattattcaagtctggaaaaccattacaataataagttcattgagaagatccgtggtgcaggcttcctgatgcacaccgtggaatgggtagctcgcgagaagattcatggaacgaactttagcgttatcattactccgaccgaaatcgtcccagccaaacgcacagggccgatcttggaaggcgagtcgttctttggtcacgaaattatcatgaaaaaatataaagactccttcgtgaaggtgcagaacatgctgaatgccatggatcttgttagcgtgcaaatctttggcgaatttgcgggtggtggcattcagaaaggcgtcgattacggagacaaagatttctatgtgtttgacatcctgtctgatagcgggaacgagaaagtttactgggatgactatcgcgtcgaatcgttttgcaccggtctcggtctgaaattagcgcctctgctgggacgtggtagtttcgctgaactgtcccagtacccaaacgatttcaaaagcattgtgaaccgttataatgaattggttgacacggtcggcctggagatggccaataaacacgtctttggtccgcaagcgtcttctgaaactggcgtagcagaaggctacgttcttaaacccgtctatccgatcttctttaataccggtacgcgcgtggcgattaaatgcaagaactccaaattttcggagaaatcgaagctggactcgccaattaaggcgaaggtggaactgacggagaacgataaacgtctgctcgaaatctttagcgagtatgttacctggaatcgcgtcagtaacgtactgtcacatattggctcagtgaccgcaaaagattttgggtgggtttcgggtctgacgatgaaagacatcattaatgaagcagcacgcgaaggccatgatctgtggttcgctgataacccgtcggcggtgctgaaggagctgactggcctcatccagaacacgattcgttccaaatggcacgaagttctggag

SEQ ID NO: 1018 - protein, 346 aa, synthetic construct
  REGION 1..346: note = variant of RNA ligase 2 from Klebsiella phage KP179
MHHHHHHGGSNTFAYYSSLENHYNNKFIEKIRGAGFLMHTVEWVAREKIHGTNFSVIITPTEIVPAKRTGPILEGESFFGHEIIMKKYKDSFVKVQNMLNAMDLVSVQIFGEFAGGGIQKGVDYGDKDFYVFDILSDSGNEKVYWDDYRVESFCTGLGLKLAPLLGRGSFAELSQYPNDFKSIVNRYNELVDTVGLEMANKHVFGPQASSETGVAEGYVLKPVYPIFFNTGTRVAIKCKNSKFSEKSKLDSPIKAKVELTENDKRLLEIFSEYVTWNRVSNVLSHIGSVTAKDFGWVSGLTMKDIINEAAREGHDLWFADNPSAVLKELTGLIQNTIRSKWHEVLE

SEQ ID NO: 1019 - DNA, 1038 bp, synthetic construct
  misc_feature 1..1038: note = variant of RNA ligase 2 from Klebsiella phage KP179
  source 1..1038: mol_type = other DNA
atgcatcaccatcaccatcacggtggcagcaacacgtttgcgtattattcacacctggaaaaccattacaataataagttcattgagaagatccgtggtgcaggcttcctgatgcacaccgtggaatgggtagctcgcgagaagattcatggaacgaactttagcgttatcattactccgaccgaaatcgtcccagccaaacgcacagggccgatcttggaaggcgagtcgttctttggtcacgaaattatcatgaaaaaatataaagactccttcgtgaaggtgcagaacatgctgaatgccatggatcttgttagcgtgcaaatctttggcgaatttgcgggtggtggcattcagaaaggcgtcgattacggagacaaagatttctatgtgtttgacatcctgtctgatagcgggaacgagaaagtttactgggatgactatcgcgtcgaatcgttttgcaccactctcggtctgaaattagcgcctctgctgggacgtggtagtttcgctgaactgtcccagtacccaaacgatttcaaaagcattgtgaaccgttataatgaattggttgacacggtcggcctggagatggccaataaacacgtctttggtccgcaagcgtcttctgaaactggcgtagcagaaggctacgttcttaaacccgtctatccgatcttctttaataccggtacgcgcgtggcgattaaatgcaagaactccaaattttcggagaaagccaagctggactcgccaattaaagcgaaggtggaactgacggagaacgataaacgtctgctcgaaatctttagcgagtatgttacctggaatcgcgtcagtaacgtactgtcacatattggctcagtgaccgcaaaagattttgggcgtgtttcgggtctgacgatgaaagacatcattcgcgaagcagcacgcgaaggccatgatctgttgttcgctgataacccgtcggcggtgctgaaggagctgactggcctcatccagaacacgattcgttccaaatggcacgaagttctggag

SEQ ID NO: 1020 - protein, 346 aa, synthetic construct
  REGION 1..346: note = variant of RNA ligase 2 from Klebsiella phage KP179
MHHHHHHGGSNTFAYYSHLENHYNNKFIEKIRGAGFLMHTVEWVAREKIHGTNFSVIITPTEIVPAKRTGPILEGESFFGHEIIMKKYKDSFVKVQNMLNAMDLVSVQIFGEFAGGGIQKGVDYGDKDFYVFDILSDSGNEKVYWDDYRVESFCTTLGLKLAPLLGRGSFAELSQYPNDFKSIVNRYNELVDTVGLEMANKHVFGPQASSETGVAEGYVLKPVYPIFFNTGTRVAIKCKNSKFSEKAKLDSPIKAKVELTENDKRLLEIFSEYVTWNRVSNVLSHIGSVTAKDFGRVSGLTMKDIIREAAREGHDLLFADNPSAVLKELTGLIQNTIRSKWHEVLE

SEQ ID NO: 1021 - DNA, 1038 bp, synthetic construct
  misc_feature 1..1038: note = variant of RNA ligase 2 from Klebsiella phage KP179
  source 1..1038: mol_type = other DNA
atgcatcaccatcaccatcacggtggcagcaacacgtttgcgtattattcaagtctggaaaaccattacaataataagttcattgagaagatccgtggggcaggcttcctgatgcacaccgtggaatgggtagctcgcgagaagattcatggaacgaactttagcgttatcattactccgaccgaaatcgtcccagccaaacgcacagggccgatcttggaaggcgagtcgttctttggtcacgaaattatcatgaaaaaatataaagactccttcgtgaaggtgcagaacatgctgaatgccatggatcttgttagcgtgcaaatctttggcgaatttgcgggtggtggcattcagaaaggcgtcgattacggagacaaagatttctatgtgtttgacatcctgtctgatagcgggaacgagaaagtttactgggatgactatcgcgtcgaatcgttttgcaccggtctcggtctgaaattagcgcctctgctgggacgtggtagtttcgctgaactgtcccagtacccaaacgatttcaaaagcattgtgaaccgttataatgaattggttgacacggtcggcctggagatggccaataaacacgtctttggtccgcaagcgtcttctgaaactggcgtagcagaaggctacgttcttaaacccgtctatccgatcttctttaataccggtacgcgcgtggcgattaaatgcaagaactccaaattttcggagaaagcgaagctggactcgccaattaaggcgaaggtggaactgacggagaacgataaacgtctgctcgaaatctttagcgagtatgttacctggaatcgcgtcagtaacgtactgtcacatattggctcagtgaccgcaaaagattttgggtgggtttcgggtctgacgatgaaagacatcattaatgaagcagcacgcgaaggccatgatctgtggttcgctgataacccgtcggcggtgctgaaggagctgactggcctcatccagaacacgattcgttccaaatggcacgaagttctggag

SEQ ID NO: 1022 - protein, 346 aa, synthetic construct
  REGION 1..346: note = variant of RNA ligase 2 from Klebsiella phage KP179
MHHHHHHGGSNTFAYYSSLENHYNNKFIEKIRGAGFLMHTVEWVAREKIHGTNFSVIITPTEIVPAKRTGPILEGESFFGHEIIMKKYKDSFVKVQNMLNAMDLVSVQIFGEFAGGGIQKGVDYGDKDFYVFDILSDSGNEKVYWDDYRVESFCTGLGLKLAPLLGRGSFAELSQYPNDFKSIVNRYNELVDTVGLEMANKHVFGPQASSETGVAEGYVLKPVYPIFFNTGTRVAIKCKNSKFSEKAKLDSPIKAKVELTENDKRLLEIFSEYVTWNRVSNVLSHIGSVTAKDFGWVSGLTMKDIINEAAREGHDLWFADNPSAVLKELTGLIQNTIRSKWHEVLE

SEQ ID NO: 1023 - DNA, 1038 bp, synthetic construct
  misc_feature 1..1038: note = variant of RNA ligase 2 from Klebsiella phage KP179
  source 1..1038: mol_type = other DNA
atgcatcaccatcaccatcacggtggcagcaacacgtttgcgtattattcaagtctggaaaaccattacaataataagttcattgagaagatccgtggggcaggcttcctgatgcacaccgtggaatgggtagctcgcgagaagattcatggaacgaactttagcgttatcattactccgaccgaaatcgtcccagccaaacgcacagggccgatcttggaaggcgagtcgttctttggtcacgaaattatcatgaaaaaatataaagactccttcgtgaaggtgcagaacatgctgaatgccatggatcttgttagcgtgcaaatctttggcgaatttgcgggtggtggcattcagaaaggcgtcgattacggagacaaagatttctatgtgtttgacatcctgtctgatagcgggaacgagaaagtttactgggatgactatcgcgtcgaatcgttttgcaccggtctcggtctgaaattagcgcctctgctgggacgtggtagtttcgctgaactgtcccagtacccaaacgatttcaaaagcattgtgaaccgttataatgaattggttgacacggtcggcctggagatggccaataaacacgtctttggtccgcaagcgtcttctgaaactggcgtagcagaaggctacgttcttaaacccgtctatccgatcttctttaataccggtacgcgcgtggcgattaaatgcaagaactccaaattttcggagaaatcgaagctggactcgccaattaaggcgaaggtggaactgacggagaacgataaacgtctgctcgaaatctttagcgagtatgttacctggaatcgcgtcagtaacgtactgtcacatattggctcagtgaccgcaaaagattttgggcgtgtttcgggtctgacgatgaaagacatcattaatgaagcagcacgcgaaggccatgatctgttgttcgctgataacccgtcggcggtgctgaaggagctgactggcctcatccagaacacgattcgttccaaatggcacgaagttctggag

SEQ ID NO: 1024 - protein, 346 aa, synthetic construct
  REGION 1..346: note = variant of RNA ligase 2 from Klebsiella phage KP179
MHHHHHHGGSNTFAYYSSLENHYNNKFIEKIRGAGFLMHTVEWVAREKIHGTNFSVIITPTEIVPAKRTGPILEGESFFGHEIIMKKYKDSFVKVQNMLNAMDLVSVQIFGEFAGGGIQKGVDYGDKDFYVFDILSDSGNEKVYWDDYRVESFCTGLGLKLAPLLGRGSFAELSQYPNDFKSIVNRYNELVDTVGLEMANKHVFGPQASSETGVAEGYVLKPVYPIFFNTGTRVAIKCKNSKFSEKSKLDSPIKAKVELTENDKRLLEIFSEYVTWNRVSNVLSHIGSVTAKDFGRVSGLTMKDIINEAAREGHDLLFADNPSAVLKELTGLIQNTIRSKWHEVLE

SEQ ID NO: 1025 - DNA, 1038 bp, synthetic construct
  misc_feature 1..1038: note = variant of RNA ligase 2 from Klebsiella phage KP179
  source 1..1038: mol_type = other DNA
atgcatcaccatcaccatcacggtggcagcaacacgtttgcgtattattcaagtctggaaaaccattacaataataagttcattgagaagatccgtggggcaggcttcgcgatgcacaccgtggaatgggtagctcgcgagaagattcatggaacgaactttagcgttatcattactccgaccgaaatcgtcccagccaaacgcacagggccgatcttggaaggcgagtcgttctttggtcacgaaattatcatgaaaaaatataaagactccttcgtgaaggtgcagaacatgctgaatgccatggatcttgttagcgtgcaaatctttggcgaatttgcgggtggtggcattcagaaaggcgtcgattacggagacaaagatttctatgtgtttgacatcctgtctgatagcgggaacgagaaagtttactgggatgactatcgcgtcgaatcgttttgcaccacgctcggtctgaaattagcgcctctgctgggacgtggtagtttcgctgaactgtcccagtacccaaacgatttcaaaagcattgtgaaccgttataatgaattggttgacacggtcggcctggagatggccaataaacacgtctttggtccgcaagcgtcttctgaaactggcgtagcagaaggctacgttcttaaacccgtctatccgatcttctttaataccggtacgcgcgtggcgattaaatgcaagaactccaaattttcggagaaatcgaagctggactcgccaattaaggcgaaggtggaactgacggagaacgataaacgtctgctcgaaatctttagcgagtatgttacctggaatcgcgtcagtaacgtactgtcacatattggctcagtgaccgcaaaagattttgggcgtgtttcgggtctgacgatgaaagacatcattaatgaagcagcacgcgaaggccatgatctgttcttcgctgataacccgtcggcggtgctgaaggagctgactggcctcatccagaacacgattcgttccaaatggcacgaagttctggag

SEQ ID NO: 1026 - protein, 346 aa, synthetic construct
  REGION 1..346: note = variant of RNA ligase 2 from Klebsiella phage KP179
MHHHHHHGGSNTFAYYSSLENHYNNKFIEKIRGAGFAMHTVEWVAREKIHGTNFSVIITPTEIVPAKRTGPILEGESFFGHEIIMKKYKDSFVKVQNMLNAMDLVSVQIFGEFAGGGIQKGVDYGDKDFYVFDILSDSGNEKVYWDDYRVESFCTTLGLKLAPLLGRGSFAELSQYPNDFKSIVNRYNELVDTVGLEMANKHVFGPQASSETGVAEGYVLKPVYPIFFNTGTRVAIKCKNSKFSEKSKLDSPIKAKVELTENDKRLLEIFSEYVTWNRVSNVLSHIGSVTAKDFGRVSGLTMKDIINEAAREGHDLFFADNPSAVLKELTGLIQNTIRSKWHEVLE

SEQ ID NO: 1027 - DNA, 1038 bp, synthetic construct
  misc_feature 1..1038: note = variant of RNA ligase 2 from Klebsiella phage KP179
  source 1..1038: mol_type = other DNA
atgcatcaccatcaccatcacggtggcagcaacacgtttgcgtattattcaagtctggaaaaccattacaataataagttcattgagaagatccgtggggcaggcttcctgatgcacaccgtggaatgggtagctcgcgagaagattcatggaacgaactttagcgttatcattactccgaccgaaatcgtcccagccaaacgcacagggccgatcttggaaggcgagtcgttctttggtcacgaaattatcatgaaaaaatataaagactccttcgtgaaggtgcagaacatgctgaatgccatggatcttgttagcgtgcaaatctttggcgaatttgcgggtggtggcattcagaaaggcgtcgattacggagacaaagatttctatgtgtttgacatcctgtctgatagcgggaacgagaaagtttactgggatgactatcgcgtcgaatcgttttgcaccggtctcggtctgaaattagcgcctctgctgggacgtggtagtttcgctgaactgtcccagtacccaaacgatttcaaaagcattgtgaaccgttataatgaattggttgacacggtcggcctggagatggccaataaacacgtctttggtccgcaagcgtcttctgaaactggcgtagcagaaggctacgttcttaaacccgtctatccgatcttctttaataccggtacgcgcgtggcgattaaatgcaagaactccaaattttcggagaaagccaagctggactcgccaattaaggcgaaggtggaactgacggagaacgataaattcctgctcgaaatctttagcgagtatgttacctggaatcgcgtcagtaacgtactgtcacatattggctcagtgaccgcaaaagattttgggcgtgtttcgggtctgacgatgaaagacatcattaatgaagcagcacgcgaaggccatgatctgttcttcgctgataacccgtcggcggtgctgaaggagctgactggcctcatccagaacacgattcgttccaaatggcacgaagttctggag

SEQ ID NO: 1028 - protein, 346 aa, synthetic construct
  REGION 1..346: note = variant of RNA ligase 2 from Klebsiella phage KP179
MHHHHHHGGSNTFAYYSSLENHYNNKFIEKIRGAGFLMHTVEWVAREKIHGTNFSVIITPTEIVPAKRTGPILEGESFFGHEIIMKKYKDSFVKVQNMLNAMDLVSVQIFGEFAGGGIQKGVDYGDKDFYVFDILSDSGNEKVYWDDYRVESFCTGLGLKLAPLLGRGSFAELSQYPNDFKSIVNRYNELVDTVGLEMANKHVFGPQASSETGVAEGYVLKPVYPIFFNTGTRVAIKCKNSKFSEKAKLDSPIKAKVELTENDKFLLEIFSEYVTWNRVSNVLSHIGSVTAKDFGRVSGLTMKDIINEAAREGHDLFFADNPSAVLKELTGLIQNTIRSKWHEVLE

SEQ ID NO: 1029 - DNA, 1038 bp, synthetic construct
  misc_feature 1..1038: note = variant of RNA ligase 2 from Klebsiella phage KP179
  source 1..1038: mol_type = other DNA
atgcatcaccatcaccatcacggtggcagcaacacgtttgcgtattattcacacctggaaaaccattacaataataagttcattgagaagatccgtggtgcaggcttcctgatgcacaccgtggaatgggtagctcgcgagaagattcatggaacgaactttagcgttatcattactccgaccgaaatcgtcccagccaaacgcacagggccgatcttggaaggcgagtcgttctttggtcacgaaattatcatgaaaaaatataaagactccttcgtgaaggtgcagaacatgctgaatgccatggatcttgttagcgtgcaaatctttggcgaatttgcgggtggtggcattcagaaaggcgtcgattacggagacaaagatttctatgtgtttgacatcctgtctgatagcgggaacgagaaagtttactgggatgactatcgcgtcgaatcgttttgcaccactctcggtctgaaattagcgcctctgctgggacgtggtagtttcgctgaactgtcccagtacccaaacgatttcaaaagcattgtgaaccgttataatgaattggttgacacggtcggcctggagatggccaataaacacgtctttggtccgcaagcgtcttctgaaactggcgtagcagaaggctacgttcttaaacccgtctatccgatcttctttaataccggtacgcgcgtggcgattaaatgcaagaactccaaattttcggagaaagccaagctggactcgccaattagtgcgaaggtggaactgacggagaacgataaacgtctgctcgaaatctttagcgagtatgttacctggaatcgcgtcagtaacgtactgtcacatattggctcagtgaccgcaaaagattttgggcgtgtttcgggtctgacgatgaaagacatcattcgcgaagcagcacgcgaaggccatgatctgttgttcgctgataacccgtcggcggtgctgaaggagctgactggcctcatccagaacacgattcgctccaaatggcacgaagttctggag

SEQ ID NO: 1030 - protein, 346 aa, synthetic construct
  REGION 1..346: note = variant of RNA ligase 2 from Klebsiella phage KP179
MHHHHHHGGSNTFAYYSHLENHYNNKFIEKIRGAGFLMHTVEWVAREKIHGTNFSVIITPTEIVPAKRTGPILEGESFFGHEIIMKKYKDSFVKVQNMLNAMDLVSVQIFGEFAGGGIQKGVDYGDKDFYVFDILSDSGNEKVYWDDYRVESFCTTLGLKLAPLLGRGSFAELSQYPNDFKSIVNRYNELVDTVGLEMANKHVFGPQASSETGVAEGYVLKPVYPIFFNTGTRVAIKCKNSKFSEKAKLDSPISAKVELTENDKRLLEIFSEYVTWNRVSNVLSHIGSVTAKDFGRVSGLTMKDIIREAAREGHDLLFADNPSAVLKELTGLIQNTIRSKWHEVLE

SEQ ID NO: 1031 - DNA, 1038 bp, synthetic construct
  misc_feature 1..1038: note = variant of RNA ligase 2 from Klebsiella phage KP179
  source 1..1038: mol_type = other DNA
atgcatcaccatcaccatcacggtggcagcaacacgtttgcgtattattcaagtctggaaaaccattacaataataagttcattgagaagatccgtggtgcaggcttcctgatgcacaccgtggaatgggtagctcgcgagaagattcatggaacgaactttagcgttatcattactccgaccgaaatcgtcccagccaaacgcacagggccgatcttggaaggcgagtcgttctttggtcacgaaattatcatgaaaaaatataaagactccttcgtgaaggtgcagaacatgctgaatgccatggatcttgttagcgtgcaaatctttggcgaatttgcgggtggtggcattcagaaaggcgtcgattacggagacaaagatttctatgtgtttgacatcctgtctgatagcgggaacgagaaagtttactgggatgactatcgcgtcgaatcgttttgcaccacgctcggtctgaaattagcgcctctgctgggacgtggtagtttcgctgaactgtcccagtacccaaacgatttcaaaagcattgtgaaccgttataatgaattggttgacacggtcggcctggagatggccaataaacacgtctttggtccgcaagcgtcttctgaaactggcgtagcagaaggctacgttcttaaacccgtctatccgatcttctttaataccggtacgcgcgtggcgattaaatgcaagaactccaaattttcggagaaagccaagctggactcgccaattaaagcgaaggtggaactgacggagaacgataaacgtctgctcgaaatctttagcgagtatgttacctggaatcgcgtcagtaacgtactgtcacatattggctcagtgaccgcaaaagattttgggcgtgtttcgggtctgacgatgaaagacatcattcgcgaagcagcacgcgaaggccatgatctgttgttcgctgataacccgtcggcggtgctgaaggagctgactggcctcatccagaacacgattcgctccaaatggcacgaagttctggag

SEQ ID NO: 1032 - protein, 346 aa, synthetic construct
  REGION 1..346: note = variant of RNA ligase 2 from Klebsiella phage KP179
MHHHHHHGGSNTFAYYSSLENHYNNKFIEKIRGAGFLMHTVEWVAREKIHGTNFSVIITPTEIVPAKRTGPILEGESFFGHEIIMKKYKDSFVKVQNMLNAMDLVSVQIFGEFAGGGIQKGVDYGDKDFYVFDILSDSGNEKVYWDDYRVESFCTTLGLKLAPLLGRGSFAELSQYPNDFKSIVNRYNELVDTVGLEMANKHVFGPQASSETGVAEGYVLKPVYPIFFNTGTRVAIKCKNSKFSEKAKLDSPIKAKVELTENDKRLLEIFSEYVTWNRVSNVLSHIGSVTAKDFGRVSGLTMKDIIREAAREGHDLLFADNPSAVLKELTGLIQNTIRSKWHEVLE

SEQ ID NO: 1033 - DNA, 1038 bp, synthetic construct
  misc_feature 1..1038: note = variant of RNA ligase 2 from Klebsiella phage KP179
  source 1..1038: mol_type = other DNA
atgcatcaccatcaccatcacggtggcagcaacacgtttgcgtattattcaagtctggaaaaccattacaataataagttcattgagaagatccgtggggcaggcttcctgatgcacaccgtggaatgggtagctcgcgagaagattcatggaacgaactttagcgttatcattactccgaccgaaatcgtcccagccaaacgcacagggccgatcttggaaggcgagtcgttctttggtcacgaaattatcatgaaaaaatataaagactccttcgtgaaggtgcagaacatgctgaatgccatggatcttgttagcgtgcaaatctttggcgaatttgcgggtggtggcattcagaaaggcgtcgattacggagacaaagatttctatgtgtttgacatcctgtctgatagcgggaacgagaaagtttactgggatgactatcgcgtcgaatcgttttgcaccacgctcggtctgaaattagcgcctctgctgggacgtggtagtttcgctgaactgtcccagtacccaaacgatttcaaaagcattgtgaaccgttataatgaattggttgacacggtcggcctggagatggccaataaacacgtctttggtccgcaagcgtcttctgaaactggcgtagcagaaggctacgttcttaaacccgtctatccgatcttctttaataccggtacgcgcgtggcgattaaatgcaagaactccaaattttcggagaaagccaagctggactcgccaattaaggcgaaggtggaactgacggagaacgataaattcctgctcgaaatctttagcgagtatgttacctggaatcgcgtcagtaacgtactgtcacatattggctcagtgaccgcaaaagattttgggcgtgtttcgggtctgacgatgaaagacatcattaatgaagcagcacgcgaaggccatgatctgctgttcgctgataacccgtcggcggtgctgaaggagctgactggcctcatccagaacacgattcgttccaaatggcacgaagttctggag

SEQ ID NO: 1034 - protein, 346 aa, synthetic construct
  REGION 1..346: note = variant of RNA ligase 2 from Klebsiella phage KP179
MHHHHHHGGSNTFAYYSSLENHYNNKFIEKIRGAGFLMHTVEWVAREKIHGTNFSVIITPTEIVPAKRTGPILEGESFFGHEIIMKKYKDSFVKVQNMLNAMDLVSVQIFGEFAGGGIQKGVDYGDKDFYVFDILSDSGNEKVYWDDYRVESFCTTLGLKLAPLLGRGSFAELSQYPNDFKSIVNRYNELVDTVGLEMANKHVFGPQASSETGVAEGYVLKPVYPIFFNTGTRVAIKCKNSKFSEKAKLDSPIKAKVELTENDKFLLEIFSEYVTWNRVSNVLSHIGSVTAKDFGRVSGLTMKDIINEAAREGHDLLFADNPSAVLKELTGLIQNTIRSKWHEVLE

SEQ ID NO: 1035 - DNA, 1038 bp, synthetic construct
  misc_feature 1..1038: note = variant of RNA ligase 2 from Klebsiella phage KP179
  source 1..1038: mol_type = other DNA
atgcatcaccatcaccatcacggtggcagcaacacgtttgcgtattattcaagtctggaaaaccattacaataataagttcattgagaagatccgtggggcaggcttcctgatgcacaccgtggaatgggtagctcgcgagaagattcatggaacgaactttagcgttatcattactccgaccgaaatcgtcccagccaaacgcacagggccgatcttggaaggcgagtcgttctttggtcacgaaattatcatgaaaaaatataaagactccttcgtgaaggtgcagaacatgctgaatgccatggatcttgttagcgtgcaaatctttggcgaatttgcgggtggtggcattcagaaaggcgtcgattacggagacaaagatttctatgtgtttgacatcctgtctgatagcgggaacgagaaagtttactgggatgactatcgcgtcgaatcgttttgcaccacgctcggtctgaaattagcgcctctgctgggacgtggtagtttcgctgaactgtcccagtacccaaacgatttcaaaagcattgtgaaccgttataatgaattggttgacacggtcggcctggagatggccaataaacacgtctttggtccgcaagcgtcttctgaaactggcgtagcagaaggctacgttcttaaacccgtctatccgatcttctttaataccggtacgcgcgtggcgattaaatgcaagaactccaaattttcggagaaagccaagctggactcgccaattaaggcgaaggtggaactgacggagaacgataaattcctgctcgaaatctttagcgagtatgttacctggaatcgcgtcagtaacgtactgtcacatattggctcagtgaccgcaaaagattttgggcgtgtttcgggtctgacgatgaaagacatcattaatgaagcagcacgcgaaggccatgatctgttcttcgctgataacccgtcggcggtgctgaaggagctgactggcctcatccagaacacgattcgttccaaatggcacgaagttctggag

SEQ ID NO: 1036 - protein, 346 aa, synthetic construct
  REGION 1..346: note = variant of RNA ligase 2 from Klebsiella phage KP179
MHHHHHHGGSNTFAYYSSLENHYNNKFIEKIRGAGFLMHTVEWVAREKIHGTNFSVIITPTEIVPAKRTGPILEGESFFGHEIIMKKYKDSFVKVQNMLNAMDLVSVQIFGEFAGGGIQKGVDYGDKDFYVFDILSDSGNEKVYWDDYRVESFCTTLGLKLAPLLGRGSFAELSQYPNDFKSIVNRYNELVDTVGLEMANKHVFGPQASSETGVAEGYVLKPVYPIFFNTGTRVAIKCKNSKFSEKAKLDSPIKAKVELTENDKFLLEIFSEYVTWNRVSNVLSHIGSVTAKDFGRVSGLTMKDIINEAAREGHDLFFADNPSAVLKELTGLIQNTIRSKWHEVLE

SEQ ID NO: 1037 - DNA, 1038 bp, synthetic construct
  misc_feature 1..1038: note = variant of RNA ligase 2 from Klebsiella phage KP179
  source 1..1038: mol_type = other DNA
atgcatcaccatcaccatcacggtggcagcaacacgtttgcgtattattcaagtctggaaaaccattacaataataagttcattgagaagatccgtctggcaggcttcgcgatgcacaccgtggaatgggtagctcgcgagaagattcatggaacgaactttagcgttatcattactccgaccgaaatcgtcccagccaaacgcacagggccgatcttggaaggcgagtcgttctttggtcacgaaattatcatgaaaaaatataaagactccttcgtgaaggtgcagaacatgctgaatgccatggatcttgttagcgtgcaaatctttggcgaatttgcgggtggtggcattcagaaaggcgtcgattacggagacaaagatttctatgtgtttgacatcctgtctgatagcgggaacgagaaagtttactgggatgactatcgcgtcgaatcgttttgcaccacgctcggtctgaaattagcgcctctgctgggacgtggtagtttcgctgaactgtcccagtacccaaacgatttcaaaagcattgtgaaccgttataatgaattggttgacacggtcggcctggagatggccaataaacacgtctttggtccgcaagcgtcttctgaaactggcgtagcagaaggctacgttcttaaacccgtctatccgatcttctttaataccggtacgcgcgtggcgattaaatgcaagaactccaaattttcggagaaagccaagctggactcgccaattaaggcgaaggtggaactgacggagaacgataaacgtctgctcgaaatctttagcgagtatgttacctggaatcgcgtcagtaacgtactgtcacatattggctcagtgaccgcaaaagattttgggcgtgtttcgggtctgacgatgaaagacatcattaatgaagcagcacgcgaaggccatgatctgttgttcgctgataacccgtcggcggtgctgaaggagctgactggcctcatccagaacacgattcgttccaaatggcacgaagttctggag

SEQ ID NO: 1038 - protein, 346 aa, synthetic construct
  REGION 1..346: note = variant of RNA ligase 2 from Klebsiella phage KP179
MHHHHHHGGSNTFAYYSSLENHYNNKFIEKIRLAGFAMHTVEWVAREKIHGTNFSVIITPTEIVPAKRTGPILEGESFFGHEIIMKKYKDSFVKVQNMLNAMDLVSVQIFGEFAGGGIQKGVDYGDKDFYVFDILSDSGNEKVYWDDYRVESFCTTLGLKLAPLLGRGSFAELSQYPNDFKSIVNRYNELVDTVGLEMANKHVFGPQASSETGVAEGYVLKPVYPIFFNTGTRVAIKCKNSKFSEKAKLDSPIKAKVELTENDKRLLEIFSEYVTWNRVSNVLSHIGSVTAKDFGRVSGLTMKDIINEAAREGHDLLFADNPSAVLKELTGLIQNTIRSKWHEVLE

SEQ ID NO: 1039 - DNA, 1038 bp, synthetic construct
  misc_feature 1..1038: note = variant of RNA ligase 2 from Klebsiella phage KP179
  source 1..1038: mol_type = other DNA
atgcatcaccatcaccatcacggtggcagcaacacgtttgcgtattattcacacctggaaaaccattacaataataagttcattgagaagatccgtggtgcaggcttcctgatgcacaccgtggaatgggtagctcgcgagaagattcatggaacgaactttagcgttatcattactccgaccgaaatcgtcccagccaaacgcacagggccgatcttggaaggcgagtcgttctttggtcacgaaattatcatgaaaaaatataaagactccttcgtgaaggtgcagaacatgctgaatgccatggatcttgttagcgtgcaaatctttggcgaatttgcgggtggtggcattcagaaaggcgtcgattacggagacaaagatttctatgtgtttgacatcctgtctgatagcgggaacgagaaagtttactgggatgactatcgcgtcgaatcgttttgcaccgggctcggtctgaaattagcgcctctgctgggacgtggtagtttcgctgaactgtcccagtacccaaacgatttcaaaagcattgtgaaccgttataatgaattggttgacacggtcggcctggagatggccaataaacacgtctttggtccgcaagcgtcttctgaaactggcgtagcagaaggctacgttcttaaacccgtctatccgatcttctttaataccggtacgcgcgtggcgattaaatgcaagaactccaaattttcggagaaagccaagctggactcgccaattaaggcgaaggtggaactgacggagaacgataaacgtctgctcgaaatctttagcgagtatgttacctggaatcgcgtcagtaacgtactgtcacatattggctcagtgaccgcaaaagattttgggcgtgtttcgggtctgacgatgaaagacatcattaatgaagcagcacgcgaaggccatgatctgttgttcgctgataacccgtcggcggtgctgaaggagctgactggcctcatccagaacacgattcgttccaaatggcacgaagttctggag

SEQ ID NO: 1040 - protein, 346 aa, synthetic construct
  REGION 1..346: note = variant of RNA ligase 2 from Klebsiella phage KP179
MHHHHHHGGSNTFAYYSHLENHYNNKFIEKIRGAGFLMHTVEWVAREKIHGTNFSVIITPTEIVPAKRTGPILEGESFFGHEIIMKKYKDSFVKVQNMLNAMDLVSVQIFGEFAGGGIQKGVDYGDKDFYVFDILSDSGNEKVYWDDYRVESFCTGLGLKLAPLLGRGSFAELSQYPNDFKSIVNRYNELVDTVGLEMANKHVFGPQASSETGVAEGYVLKPVYPIFFNTGTRVAIKCKNSKFSEKAKLDSPIKAKVELTENDKRLLEIFSEYVTWNRVSNVLSHIGSVTAKDFGRVSGLTMKDIINEAAREGHDLLFADNPSAVLKELTGLIQNTIRSKWHEVLE

SEQ ID NO: 1041 - DNA, 1038 bp, synthetic construct
  misc_feature 1..1038: note = variant of RNA ligase 2 from Klebsiella phage KP179
  source 1..1038: mol_type = other DNA
atgcatcaccatcaccatcacggtggcagcaacacgtttgcgtattattcaagtctggaaaaccattacaataataagttcattgagaagatccgtctggcaggcttcctgatgcacaccgtggaatgggtagctcgcgagaagattcatggaacgaactttagcgttatcattactccgaccgaaatcgtcccagccaaacgcacagggccgatcttggaaggcgagtcgttctttggtcacgaaattatcatgaaaaaatataaagactccttcgtgaaggtgcagaacatgctgaatgccatggatcttgttagcgtgcaaatctttggcgaatttgcgggtggtggcattcagaaaggcgtcgattacggagacaaagatttctatgtgtttgacatcctgtctgatagcgggaacgagaaagtttactgggatgactatcgcgtcgaatcgttttgcaccggtctcggtctgaaattagcgcctctgctgggacgtggtagtttcgctgaactgtcccagtacccaaacgatttcaaaagcattgtgaaccgttataatgaattggttgacacggtcggcctggagatggccaataaacacgtctttggtccgcaagcgtcttctgaaactggcgtagcagaaggctacgttcttaaacccgtctatccgatcttctttaataccggtacgcgcgtggcgattaaatgcaagaactccaaattttcggagaaagccaagctggactcgccaattaaggcgaaggtggaactgacggagaacgataaacgtctgctcgaaatctttagcgagtatgttacctggaatcgcgtcagtaacgtactgtcacatattggctcagtgaccgcaaaagattttgggtgggtttcgggtctgacgatgaaagacatcattaatgaagcagcacgcgaaggccatgatctgtggttcgctgataacccgtcggcggtgctgaaggagctgactggcctcatccagaacacgattcgttccaaatggcacgaagttctggag

SEQ ID NO: 1042 - protein, 346 aa, synthetic construct
  REGION 1..346: note = variant of RNA ligase 2 from Klebsiella phage KP179
MHHHHHHGGSNTFAYYSSLENHYNNKFIEKIRLAGFLMHTVEWVAREKIHGTNFSVIITPTEIVPAKRTGPILEGESFFGHEIIMKKYKDSFVKVQNMLNAMDLVSVQIFGEFAGGGIQKGVDYGDKDFYVFDILSDSGNEKVYWDDYRVESFCTGLGLKLAPLLGRGSFAELSQYPNDFKSIVNRYNELVDTVGLEMANKHVFGPQASSETGVAEGYVLKPVYPIFFNTGTRVAIKCKNSKFSEKAKLDSPIKAKVELTENDKRLLEIFSEYVTWNRVSNVLSHIGSVTAKDFGWVSGLTMKDIINEAAREGHDLWFADNPSAVLKELTGLIQNTIRSKWHEVLE

SEQ ID NO: 1043 - DNA, 1038 bp, synthetic construct
  misc_feature 1..1038: note = variant of RNA ligase 2 from Klebsiella phage KP179
  source 1..1038: mol_type = other DNA
atgcatcaccatcaccatcacggtggcagcaacacgtttgcgtattattcacacctggaaaaccattacaataataagttcattgagaagatccgtggtgcaggcttcctgatgcacaccgtggaatgggtagctcgcgagaagattcatggaacgaactttagcgttatcattactccgaccgaaatcgtcccagccaaacgcacagggccgatcttggaaggcgagtcgttctttggtcacgaaattatcatgaaaaaatataaagactccttcgtgaaggtgcagaacatgctgaatgccatggatcttgttagcgtgcaaatctttggcgaatttgcgggtggtggcattcagaaaggcgtcgattacggagacaaagatttctatgtgtttgacatcctgtctgatagcgggaacgagaaagtttactgggatgactatcgcgtcgaatcgttttgcaccgggctcggtctgaaattagcgcctctgctgggacgtggtagtttcgctgaactgtcccagtacccaaacgatttcaaaagcattgtgaaccgttataatgaattggttgacacggtcggcctggagatggccaataaacacgtctttggtccgcaagcgtcttctgaaactggcgtagcagaaggctacgttcttaaacccgtctatccgatcttctttaataccggtacgcgcgtggcgattaaatgcaagaactccaaattttcggagaaagccaagctggactcgccaattagtgcgaaggtggaactgacggagaacgataaacgtctgctcgaaatctttagcgagtatgttacctggaatcgcgtcagtaacgtactgtcacatattggctcagtgaccgcaaaagattttgggcgtgtttcgggtctgacgatgaaagacatcattaatgaagcagcacgcgaaggccatgatctgttgttcgctgataacccgtcggcggtgctgaaggagctgactggcctcatccagaacacgattctgtccaaatggcacgaagttctggag

SEQ ID NO: 1044 - protein, 346 aa, synthetic construct
  REGION 1..346: note = variant of RNA ligase 2 from Klebsiella phage KP179
MHHHHHHGGSNTFAYYSHLENHYNNKFIEKIRGAGFLMHTVEWVAREKIHGTNFSVIITPTEIVPAKRTGPILEGESFFGHEIIMKKYKDSFVKVQNMLNAMDLVSVQIFGEFAGGGIQKGVDYGDKDFYVFDILSDSGNEKVYWDDYRVESFCTGLGLKLAPLLGRGSFAELSQYPNDFKSIVNRYNELVDTVGLEMANKHVFGPQASSETGVAEGYVLKPVYPIFFNTGTRVAIKCKNSKFSEKAKLDSPISAKVELTENDKRLLEIFSEYVTWNRVSNVLSHIGSVTAKDFGRVSGLTMKDIINEAAREGHDLLFADNPSAVLKELTGLIQNTILSKWHEVLE

SEQ ID NO: 1045 - DNA, 1038 bp, synthetic construct
  misc_feature 1..1038: note = variant of RNA ligase 2 from Klebsiella phage KP179
  source 1..1038: mol_type = other DNA
atgcatcaccatcaccatcacggtggcagcaacacgtttgcgtattattcaagtctggaaaaccattacaataataagttcattgagaagatccgtggggcaggcttcgcgatgcacaccgtggaatgggtagctcgcgagaagattcatggaacgaactttagcgttatcattactccgaccgaaatcgtcccagccaaacgcacagggccgatcttggaaggcgagtcgttctttggtcacgaaattatcatgaaaaaatataaagactccttcgtgaaggtgcagaacatgctgaatgccatggatcttgttagcgtgcaaatctttggcgaatttgcgggtggtggcattcagaaaggcgtcgattacggagacaaagatttctatgtgtttgacatcctgtctgatagcgggaacgagaaagtttactgggatgactatcgcgtcgaatcgttttgcaccacgctcggtctgaaattagcgcctctgctgggacgtggtagtttcgctgaactgtcccagtacccaaacgatttcaaaagcattgtgaaccgttataatgaattggttgacacggtcggcctggagatggccaataaacacgtctttggtccgcaagcgtcttctgaaactggcgtagcagaaggctacgttcttaaacccgtctatccgatcttctttaataccggtacgcgcgtggcgattaaatgcaagaactccaaattttcggagaaagccaagctggactcgccaattaaggcgaaggtggaactgacggagaacgataaattcctgctcgaaatctttagcgagtatgttacctggaatcgcgtcagtaacgtactgtcacatattggctcagtgaccgcaaaagattttgggcgtgtttcgggtctgacgatgaaagacatcattaatgaagcagcacgcgaaggccatgatctgttcttcgctgataacccgtcggcggtgctgaaggagctgactggcctcatccagaacacgattcgttccaaatggcacgaagttctggag

SEQ ID NO: 1046 - protein, 346 aa, synthetic construct
  REGION 1..346: note = variant of RNA ligase 2 from Klebsiella phage KP179
MHHHHHHGGSNTFAYYSSLENHYNNKFIEKIRGAGFAMHTVEWVAREKIHGTNFSVIITPTEIVPAKRTGPILEGESFFGHEIIMKKYKDSFVKVQNMLNAMDLVSVQIFGEFAGGGIQKGVDYGDKDFYVFDILSDSGNEKVYWDDYRVESFCTTLGLKLAPLLGRGSFAELSQYPNDFKSIVNRYNELVDTVGLEMANKHVFGPQASSETGVAEGYVLKPVYPIFFNTGTRVAIKCKNSKFSEKAKLDSPIKAKVELTENDKFLLEIFSEYVTWNRVSNVLSHIGSVTAKDFGRVSGLTMKDIINEAAREGHDLFFADNPSAVLKELTGLIQNTIRSKWHEVLE

SEQ ID NO: 1047 - DNA, 1038 bp, synthetic construct
  misc_feature 1..1038: note = variant of RNA ligase 2 from Klebsiella phage KP179
  source 1..1038: mol_type = other DNA
atgcatcaccatcaccatcacggtggcagcaacacgtttgcgtattattcaagtctggaaaaccattacaataataagttcattgagaagatccgtctggcaggcttcgcgatgcacaccgtggaatgggtagctcgcgagaagattcatggaacgaactttagcgttatcattactccgaccgaaatcgtcccagccaaacgcacagggccgatcttggaaggcgagtcgttctttggtcacgaaattatcatgaaaaaatataaagactccttcgtgaaggtgcagaacatgctgaatgccatggatcttgttagcgtgcaaatctttggcgaatttgcgggtggtggcattcagaaaggcgtcgattacggagacaaagatttctatgtgtttgacatcctgtctgatagcgggaacgagaaagtttactgggatgactatcgcgtcgaatcgttttgcaccggtctcggtctgaaattagcgcctctgctgggacgtggtagtttcgctgaactgtcccagtacccaaacgatttcaaaagcattgtgaaccgttataatgaattggttgacacggtcggcctggagatggccaataaacacgtctttggtccgcaagcgtcttctgaaactggcgtagcagaaggctacgttcttaaacccgtctatccgatcttctttaataccggtacgcgcgtggcgattaaatgcaagaactccaaattttcggagaaatcgaagctggactcgccaattaaggcgaaggtggaactgacggagaacgataaacgtctgctcgaaatctttagcgagtatgttacctggaatcgcgtcagtaacgtactgtcacatattggctcagtgaccgcaaaagattttgggcgtgtttcgggtctgacgatgaaagacatcattaatgaagcagcacgcgaaggccatgatctgtggttcgctgataacccgtcggcggtgctgaaggagctgactggcctcatccagaacacgattcgttccaaatggcacgaagttctggag

SEQ ID NO: 1048 - protein, 346 aa, synthetic construct
  REGION 1..346: note = variant of RNA ligase 2 from Klebsiella phage KP179
MHHHHHHGGSNTFAYYSSLENHYNNKFIEKIRLAGFAMHTVEWVAREKIHGTNFSVIITPTEIVPAKRTGPILEGESFFGHEIIMKKYKDSFVKVQNMLNAMDLVSVQIFGEFAGGGIQKGVDYGDKDFYVFDILSDSGNEKVYWDDYRVESFCTGLGLKLAPLLGRGSFAELSQYPNDFKSIVNRYNELVDTVGLEMANKHVFGPQASSETGVAEGYVLKPVYPIFFNTGTRVAIKCKNSKFSEKSKLDSPIKAKVELTENDKRLLEIFSEYVTWNRVSNVLSHIGSVTAKDFGRVSGLTMKDIINEAAREGHDLWFADNPSAVLKELTGLIQNTIRSKWHEVLE

SEQ ID NO: 1049 - DNA, 1038 bp, synthetic construct
  misc_feature 1..1038: note = variant of RNA ligase 2 from Klebsiella phage KP179
  source 1..1038: mol_type = other DNA
atgcatcaccatcaccatcacggtggcagcaacacgtttgcgtattattcaagtctggaaaaccattacaataataagttcattgagaagatccgtggtgcaggcttcctgatgcacaccgtggaatgggtagctcgcgagaagattcatggaacgaactttagcgttatcattactccgaccgaaatcgtcccagccaaacgcacagggccgatcttggaaggcgagtcgttctttggtcacgaaattatcatgaaaaaatataaagactccttcgtgaaggtgcagaacatgctgaatgccatggatcttgttagcgtgcaaatctttggcgaatttgcgggtggtggcattcagaaaggcgtcgattacggagacaaagatttctatgtgtttgacatcctgtctgatagcgggaacgagaaagtttactgggatgactatcgcgtcgaatcgttttgcaccacgctcggtctgaaattagcgcctctgctgggacgtggtagtttcgctgaactgtcccagtacccaaacgatttcaaaagcattgtgaaccgttataatgaattggttgacacggtcggcctggagatggccaataaacacgtctttggtccgcaagcgtcttctgaaactggcgtagcagaaggctacgttcttaaacccgtctatccgatcttctttaataccggtacgcgcgtggcgattaaatgcaagaactccaaattttcggagaaagccaagctggactcgccaattaaggcgaaggtggaactgacggagaacgataaacgtctgctcgaaatctttagcgagtatgttacctggaatcgcgtcagtaacgtactgtcacatattggctcagtgaccgcaaaagattttgggtgggtttcgggtctgacgatgaaagacatcattaatgaagcagcacgcgaaggccatgatctgctgttcgctgataacccgtcggcggtgctgaaggagctgactggcctcatccagaacacgattcgttccaaatggcacgaagttctggag

SEQ ID NO: 1050 - protein, 346 aa, synthetic construct
  REGION 1..346: note = variant of RNA ligase 2 from Klebsiella phage KP179
MHHHHHHGGSNTFAYYSSLENHYNNKFIEKIRGAGFLMHTVEWVAREKIHGTNFSVIITPTEIVPAKRTGPILEGESFFGHEIIMKKYKDSFVKVQNMLNAMDLVSVQIFGEFAGGGIQKGVDYGDKDFYVFDILSDSGNEKVYWDDYRVESFCTTLGLKLAPLLGRGSFAELSQYPNDFKSIVNRYNELVDTVGLEMANKHVFGPQASSETGVAEGYVLKPVYPIFFNTGTRVAIKCKNSKFSEKAKLDSPIKAKVELTENDKRLLEIFSEYVTWNRVSNVLSHIGSVTAKDFGWVSGLTMKDIINEAAREGHDLLFADNPSAVLKELTGLIQNTIRSKWHEVLE

SEQ ID NO: 1051 - DNA, 1038 bp, synthetic construct
  misc_feature 1..1038: note = variant of RNA ligase 2 from Klebsiella phage KP179
  source 1..1038: mol_type = other DNA
atgcatcaccatcaccatcacggtggcagcaacacgtttgcgtattattcaagtctggaaaaccattacaataataagttcattgagaagatccgtctggcaggcttcctgatgcacaccgtggaatgggtagctcgcgagaagattcatggaacgaactttagcgttatcattactccgaccgaaatcgtcccagccaaacgcacagggccgatcttggaaggcgagtcgttctttggtcacgaaattatcatgaaaaaatataaagactccttcgtgaaggtgcagaacatgctgaatgccatggatcttgttagcgtgcaaatctttggcgaatttgcgggtggtggcattcagaaaggcgtcgattacggagacaaagatttctatgtgtttgacatcctgtctgatagcgggaacgagaaagtttactgggatgactatcgcgtcgaatcgttttgcaccacgctcggtctgaaattagcgcctctgctgggacgtggtagtttcgctgaactgtcccagtacccaaacgatttcaaaagcattgtgaaccgttataatgaattggttgacacggtcggcctggagatggccaataaacacgtctttggtccgcaagcgtcttctgaaactggcgtagcagaaggctacgttcttaaacccgtctatccgatcttctttaataccggtacgcgcgtggcgattaaatgcaagaactccaaattttcggagaaagccaagctggactcgccaattaaggcgaaggtggaactgacggagaacgataaacgtctgctcgaaatctttagcgagtatgttacctggaatcgcgtcagtaacgtactgtcacatattggctcagtgaccgcaaaagattttgggtgggtttcgggtctgacgatgaaagacatcattaatgaagcagcacgcgaaggccatgatctgtggttcgctgataacccgtcggcggtgctgaaggagctgactggcctcatccagaacacgattcgttccaaatggcacgaagttctggag

SEQ ID NO: 1052 - protein, 346 aa, synthetic construct
  REGION 1..346: note = variant of RNA ligase 2 from Klebsiella phage KP179
MHHHHHHGGSNTFAYYSSLENHYNNKFIEKIRLAGFLMHTVEWVAREKIHGTNFSVIITPTEIVPAKRTGPILEGESFFGHEIIMKKYKDSFVKVQNMLNAMDLVSVQIFGEFAGGGIQKGVDYGDKDFYVFDILSDSGNEKVYWDDYRVESFCTTLGLKLAPLLGRGSFAELSQYPNDFKSIVNRYNELVDTVGLEMANKHVFGPQASSETGVAEGYVLKPVYPIFFNTGTRVAIKCKNSKFSEKAKLDSPIKAKVELTENDKRLLEIFSEYVTWNRVSNVLSHIGSVTAKDFGWVSGLTMKDIINEAAREGHDLWFADNPSAVLKELTGLIQNTIRSKWHEVLE

SEQ ID NO: 1053 - DNA, 1038 bp, synthetic construct
  misc_feature 1..1038: note = variant of RNA ligase 2 from Klebsiella phage KP179
  source 1..1038: mol_type = other DNA
atgcatcaccatcaccatcacggtggcagcaacacgtttgcgtattattcaagtctggaaaaccattacaataataagttcattgagaagatccgtggtgcaggcttcctgatgcacaccgtggaatgggtagctcgcgagaagattcatggaacgaactttagcgttatcattactccgaccgaaatcgtcccagccaaacgcacagggccgatcttggaaggcgagtcgttctttggtcacgaaattatcatgaaaaaatataaagactccttcgtgaaggtgcagaacatgctgaatgccatggatcttgttagcgtgcaaatctttggcgaatttgcgggtggtggcattcagaaaggcgtcgattacggagacaaagatttctatgtgtttgacatcctgtctgatagcgggaacgagaaagtttactgggatgactatcgcgtcgaatcgttttgcaccggtctcggtctgaaattagcgcctctgctgggacgtggtagtttcgctgaactgtcccagtacccaaacgatttcaaaagcattgtgaaccgttataatgaattggttgacacggtcggcctggagatggccaataaacacgtctttggtccgcaagcgtcttctgaaactggcgtagcagaaggctacgttcttaaacccgtctatccgatcttctttaataccggtacgcgcgtggcgattaaatgcaagaactccaaattttcggagaaatcgaagctggactcgccaattaaggcgaaggtggaactgacggagaacgataaacgtctgctcgaaatctttagcgagtatgttacctggaatcgcgtcagtaacgtactgtcacatattggctcagtgaccgcaaaagattttgggcgtgtttcgggtctgacgatgaaagacatcattaatgaagcagcacgcgaaggccatgatctgttcttcgctgataacccgtcggcggtgctgaaggagctgactggcctcatccagaacacgattcgttccaaatggcacgaagttctggag

SEQ ID NO: 1054 - protein, 346 aa, synthetic construct
  REGION 1..346: note = variant of RNA ligase 2 from Klebsiella phage KP179
MHHHHHHGGSNTFAYYSSLENHYNNKFIEKIRGAGFLMHTVEWVAREKIHGTNFSVIITPTEIVPAKRTGPILEGESFFGHEIIMKKYKDSFVKVQNMLNAMDLVSVQIFGEFAGGGIQKGVDYGDKDFYVFDILSDSGNEKVYWDDYRVESFCTGLGLKLAPLLGRGSFAELSQYPNDFKSIVNRYNELVDTVGLEMANKHVFGPQASSETGVAEGYVLKPVYPIFFNTGTRVAIKCKNSKFSEKSKLDSPIKAKVELTENDKRLLEIFSEYVTWNRVSNVLSHIGSVTAKDFGRVSGLTMKDIINEAAREGHDLFFADNPSAVLKELTGLIQNTIRSKWHEVLE

SEQ ID NO: 1055 - DNA, 1038 bp, synthetic construct
  misc_feature 1..1038: note = variant of RNA ligase 2 from Klebsiella phage KP179
  source 1..1038: mol_type = other DNA
atgcatcaccatcaccatcacggtggcagcaacacgtttgcgtattattcaagtctggaaaaccattacaataataagttcattgagaagatccgtggggcaggcttcctgatgcacaccgtggaatgggtagctcgcgagaagattcatggaacgaactttagcgttatcattactccgaccgaaatcgtcccagccaaacgcacagggccgatcttggaaggcgagtcgttctttggtcacgaaattatcatgaaaaaatataaagactccttcgtgaaggtgcagaacatgctgaatgccatggatcttgttagcgtgcaaatctttggcgaatttgcgggtggtggcattcagaaaggcgtcgattacggagacaaagatttctatgtgtttgacatcctgtctgatagcgggaacgagaaagtttactgggatgactatcgcgtcgaatcgttttgcaccggtctcggtctgaaattagcgcctctgctgggacgtggtagtttcgctgaactgtcccagtacccaaacgatttcaaaagcattgtgaaccgttataatgaattggttgacacggtcggcctggagatggccaataaacacgtctttggtccgcaagcgtcttctgaaactggcgtagcagaaggctacgttcttaaacccgtctatccgatcttctttaataccggtacgcgcgtggcgattaaatgcaagaactccaaattttcggagaaagccaagctggactcgccaattaaggcgaaggtggaactgacggagaacgataaacgtctgctcgaaatctttagcgagtatgttacctggaatcgcgtcagtaacgtactgtcacatattggctcagtgaccgcaaaagattttgggtgggtttcgggtctgacgatgaaagacatcattaatgaagcagcacgcgaaggccatgatctgctgttcgctgataacccgtcggcggtgctgaaggagctgactggcctcatccagaacacgattcgttccaaatggcacgaagttctggag

SEQ ID NO: 1056 - protein, 346 aa, synthetic construct
  REGION 1..346: note = variant of RNA ligase 2 from Klebsiella phage KP179
MHHHHHHGGSNTFAYYSSLENHYNNKFIEKIRGAGFLMHTVEWVAREKIHGTNFSVIITPTEIVPAKRTGPILEGESFFGHEIIMKKYKDSFVKVQNMLNAMDLVSVQIFGEFAGGGIQKGVDYGDKDFYVFDILSDSGNEKVYWDDYRVESFCTGLGLKLAPLLGRGSFAELSQYPNDFKSIVNRYNELVDTVGLEMANKHVFGPQASSETGVAEGYVLKPVYPIFFNTGTRVAIKCKNSKFSEKAKLDSPIKAKVELTENDKRLLEIFSEYVTWNRVSNVLSHIGSVTAKDFGWVSGLTMKDIINEAAREGHDLLFADNPSAVLKELTGLIQNTIRSKWHEVLE

SEQ ID NO: 1057 - DNA, 1038 bp, synthetic construct
  misc_feature 1..1038: note = variant of RNA ligase 2 from Klebsiella phage KP179
  source 1..1038: mol_type = other DNA
atgcatcaccatcaccatcacggtggcagcaacacgtttgcgtattattcaagtctggaaaaccattacaataataagttcattgagaagatccgtggtgcaggcttcctgatgcacaccgtggaatgggtagctcgcgagaagattcatggaacgaactttagcgttatcattactccgaccgaaatcgtcccagccaaacgcacagggccgatcttggaaggcgagtcgttctttggtcacgaaattatcatgaaaaaatataaagactccttcgtgaaggtgcagaacatgctgaatgccatggatcttgttagcgtgcaaatctttggcgaatttgcgggtggtggcattcagaaaggcgtcgattacggagacaaagatttctatgtgtttgacatcctgtctgatagcgggaacgagaaagtttactgggatgactatcgcgtcgaatcgttttgcaccacgctcggtctgaaattagcgcctctgctgggacgtggtagtttcgctgaactgtcccagtacccaaacgatttcaaaagcattgtgaaccgttataatgaattggttgacacggtcggcctggagatggccaataaacacgtctttggtccgcaagcgtcttctgaaactggcgtagcagaaggctacgttcttaaacccgtctatccgatcttctttaataccggtacgcgcgtggcgattaaatgcaagaactccaaattttcggagaaagccaagctggactcgccaattaaggcgaaggtggaactgacggagaacgataaacgtctgctcgaaatctttagcgagtatgttacctggaatcgcgtcagtaacgtactgtcacatattggctcagtgaccgcaaaagattttgggcgtgtttcgggtctgacgatgaaagacatcattaatgaagcagcacgcgaaggccatgatctgttgttcgctgataacccgtcggcggtgctgaaggagctgactggcctcatccagaacacgattctgtccaaatggcacgaagttctggag

SEQ ID NO: 1058 - protein, 346 aa, synthetic construct
  REGION 1..346: note = variant of RNA ligase 2 from Klebsiella phage KP179
MHHHHHHGGSNTFAYYSSLENHYNNKFIEKIRGAGFLMHTVEWVAREKIHGTNFSVIITPTEIVPAKRTGPILEGESFFGHEIIMKKYKDSFVKVQNMLNAMDLVSVQIFGEFAGGGIQKGVDYGDKDFYVFDILSDSGNEKVYWDDYRVESFCTTLGLKLAPLLGRGSFAELSQYPNDFKSIVNRYNELVDTVGLEMANKHVFGPQASSETGVAEGYVLKPVYPIFFNTGTRVAIKCKNSKFSEKAKLDSPIKAKVELTENDKRLLEIFSEYVTWNRVSNVLSHIGSVTAKDFGRVSGLTMKDIINEAAREGHDLLFADNPSAVLKELTGLIQNTILSKWHEVLE

SEQ ID NO: 1059 - DNA, 1038 bp, synthetic construct
  misc_feature 1..1038: note = variant of RNA ligase 2 from Klebsiella phage KP179
  source 1..1038: mol_type = other DNA
atgcatcaccatcaccatcacggtggcagcaacacgtttgcgtattattcaagtctggaaaaccattacaataataagttcattgagaagatccgtggggcaggcttcgcgatgcacaccgtggaatgggtagctcgcgagaagattcatggaacgaactttagcgttatcattactccgaccgaaatcgtcccagccaaacgcacagggccgatcttggaaggcgagtcgttctttggtcacgaaattatcatgaaaaaatataaagactccttcgtgaaggtgcagaacatgctgaatgccatggatcttgttagcgtgcaaatctttggcgaatttgcgggtggtggcattcagaaaggcgtcgattacggagacaaagatttctatgtgtttgacatcctgtctgatagcgggaacgagaaagtttactgggatgactatcgcgtcgaatcgttttgcaccacgctcggtctgaaattagcgcctctgctgggacgtggtagtttcgctgaactgtcccagtacccaaacgatttcaaaagcattgtgaaccgttataatgaattggttgacacggtcggcctggagatggccaataaacacgtctttggtccgcaagcgtcttctgaaactggcgtagcagaaggctacgttcttaaacccgtctatccgatcttctttaataccggtacgcgcgtggcgattaaatgcaagaactccaaattttcggagaaagccaagctggactcgccaattaaggcgaaggtggaactgacggagaacgataaattcctgctcgaaatctttagcgagtatgttacctggaatcgcgtcagtaacgtactgtcacatattggctcagtgaccgcaaaagattttgggcgtgtttcgggtctgacgatgaaagacatcattaatgaagcagcacgcgaaggccatgatctgtggttcgctgataacccgtcggcggtgctgaaggagctgactggcctcatccagaacacgattcgttccaaatggcacgaagttctggag

SEQ ID NO: 1060 - protein, 346 aa, synthetic construct
  REGION 1..346: note = variant of RNA ligase 2 from Klebsiella phage KP179
MHHHHHHGGSNTFAYYSSLENHYNNKFIEKIRGAGFAMHTVEWVAREKIHGTNFSVIITPTEIVPAKRTGPILEGESFFGHEIIMKKYKDSFVKVQNMLNAMDLVSVQIFGEFAGGGIQKGVDYGDKDFYVFDILSDSGNEKVYWDDYRVESFCTTLGLKLAPLLGRGSFAELSQYPNDFKSIVNRYNELVDTVGLEMANKHVFGPQASSETGVAEGYVLKPVYPIFFNTGTRVAIKCKNSKFSEKAKLDSPIKAKVELTENDKFLLEIFSEYVTWNRVSNVLSHIGSVTAKDFGRVSGLTMKDIINEAAREGHDLWFADNPSAVLKELTGLIQNTIRSKWHEVLE

SEQ ID NO: 1061 - DNA, 1038 bp, synthetic construct
  misc_feature 1..1038: note = variant of RNA ligase 2 from Klebsiella phage KP179
  source 1..1038: mol_type = other DNA
atgcatcaccatcaccatcacggtggcagcaacacgtttgcgtattattcaagtctggaaaaccattacaataataagttcattgagaagatccgtggtgcaggcttcctgatgcacaccgtggaatgggtagctcgcgagaagattcatggaacgaactttagcgttatcattactccgaccgaaatcgtcccagccaaacgcacagggccgatcttggaaggcgagtcgttctttggtcacgaaattatcatgaaaaaatataaagactccttcgtgaaggtgcagaacatgctgaatgccatggatcttgttagcgtgcaaatctttggcgaatttgcgggtggtggcattcagaaaggcgtcgattacggagacaaagatttctatgtgtttgacatcctgtctgatagcgggaacgagaaagtttactgggatgactatcgcgtcgaatcgttttgcaccacgctcggtctgaaattagcgcctctgctgggacgtggtagtttcgctgaactgtcccagtacccaaacgatttcaaaagcattgtgaaccgttataatgaattggttgacacggtcggcctggagatggccaataaacacgtctttggtccgcaagcgtcttctgaaactggcgtagcagaaggctacgttcttaaacccgtctatccgatcttctttaataccggtacgcgcgtggcgattaaatgcaagaactccaaattttcggagaaatcgaagctggactcgccaattaaggcgaaggtggaactgacggagaacgataaacgtctgctcgaaatctttagcgagtatgttacctggaatcgcgtcagtaacgtactgtcacatattggctcagtgaccgcaaaagattttgggtgggtttcgggtctgacgatgaaagacatcattaatgaagcagcacgcgaaggccatgatctgttcttcgctgataacccgtcggcggtgctgaaggagctgactggcctcatccagaacacgattcgttccaaatggcacgaagttctggag

SEQ ID NO: 1062 - protein, 346 aa, synthetic construct
  REGION 1..346: note = variant of RNA ligase 2 from Klebsiella phage KP179
MHHHHHHGGSNTFAYYSSLENHYNNKFIEKIRGAGFLMHTVEWVAREKIHGTNFSVIITPTEIVPAKRTGPILEGESFFGHEIIMKKYKDSFVKVQNMLNAMDLVSVQIFGEFAGGGIQKGVDYGDKDFYVFDILSDSGNEKVYWDDYRVESFCTTLGLKLAPLLGRGSFAELSQYPNDFKSIVNRYNELVDTVGLEMANKHVFGPQASSETGVAEGYVLKPVYPIFFNTGTRVAIKCKNSKFSEKSKLDSPIKAKVELTENDKRLLEIFSEYVTWNRVSNVLSHIGSVTAKDFGWVSGLTMKDIINEAAREGHDLFFADNPSAVLKELTGLIQNTIRSKWHEVLE

SEQ ID NO: 1063 - DNA, 1038 bp, synthetic construct
  misc_feature 1..1038: note = variant of RNA ligase 2 from Klebsiella phage KP179
  source 1..1038: mol_type = other DNA
atgcatcaccatcaccatcacggtggcagcaacacgtttgcgtattattcaagtctggaaaaccattacaataataagttcattgagaagatccgtctggcaggcttcctgatgcacaccgtggaatgggtagctcgcgagaagattcatggaacgaactttagcgttatcattactccgaccgaaatcgtcccagccaaacgcacagggccgatcttggaaggcgagtcgttctttggtcacgaaattatcatgaaaaaatataaagactccttcgtgaaggtgcagaacatgctgaatgccatggatcttgttagcgtgcaaatctttggcgaatttgcgggtggtggcattcagaaaggcgtcgattacggagacaaagatttctatgtgtttgacatcctgtctgatagcgggaacgagaaagtttactgggatgactatcgcgtcgaatcgttttgcaccggtctcggtctgaaattagcgcctctgctgggacgtggtagtttcgctgaactgtcccagtacccaaacgatttcaaaagcattgtgaaccgttataatgaattggttgacacggtcggcctggagatggccaataaacacgtctttggtccgcaagcgtcttctgaaactggcgtagcagaaggctacgttcttaaacccgtctatccgatcttctttaataccggtacgcgcgtggcgattaaatgcaagaactccaaattttcggagaaagccaagctggactcgccaattaaggcgaaggtggaactgacggagaacgataaacgtctgctcgaaatctttagcgagtatgttacctggaatcgcgtcagtaacgtactgtcacatattggctcagtgaccgcaaaagattttgggcgtgtttcgggtctgacgatgaaagacatcattaatgaagcagcacgcgaaggccatgatctgttcttcgctgataacccgtcggcggtgctgaaggagctgactggcctcatccagaacacgattcgttccaaatggcacgaagttctggag

SEQ ID NO: 1064 - protein, 346 aa, synthetic construct
  REGION 1..346: note = variant of RNA ligase 2 from Klebsiella phage KP179
MHHHHHHGGSNTFAYYSSLENHYNNKFIEKIRLAGFLMHTVEWVAREKIHGTNFSVIITPTEIVPAKRTGPILEGESFFGHEIIMKKYKDSFVKVQNMLNAMDLVSVQIFGEFAGGGIQKGVDYGDKDFYVFDILSDSGNEKVYWDDYRVESFCTGLGLKLAPLLGRGSFAELSQYPNDFKSIVNRYNELVDTVGLEMANKHVFGPQASSETGVAEGYVLKPVYPIFFNTGTRVAIKCKNSKFSEKAKLDSPIKAKVELTENDKRLLEIFSEYVTWNRVSNVLSHIGSVTAKDFGRVSGLTMKDIINEAAREGHDLFFADNPSAVLKELTGLIQNTIRSKWHEVLE

SEQ ID NO: 1065 - DNA, 1038 bp, synthetic construct
  misc_feature 1..1038: note = variant of RNA ligase 2 from Klebsiella phage KP179
  source 1..1038: mol_type = other DNA
atgcatcaccatcaccatcacggtggcagcaacacgtttgcgtattattcaagtctggaaaaccattacaataataagttcattgagaagatccgtggggcaggcttcgcgatgcacaccgtggaatgggtagctcgcgagaagattcatggaacgaactttagcgttatcattactccgaccgaaatcgtcccagccaaacgcacagggccgatcttggaaggcgagtcgttctttggtcacgaaattatcatgaaaaaatataaagactccttcgtgaaggtgcagaacatgctgaatgccatggatcttgttagcgtgcaaatctttggcgaatttgcgggtggtggcattcagaaaggcgtcgattacggagacaaagatttctatgtgtttgacatcctgtctgatagcgggaacgagaaagtttactgggatgactatcgcgtcgaatcgttttgcaccacgctcggtctgaaattagcgcctctgctgggacgtggtagtttcgctgaactgtcccagtacccaaacgatttcaaaagcattgtgaaccgttataatgaattggttgacacggtcggcctggagatggccaataaacacgtctttggtccgcaagcgtcttctgaaactggcgtagcagaaggctacgttcttaaacccgtctatccgatcttctttaataccggtacgcgcgtggcgattaaatgcaagaactccaaattttcggagaaagcgaagctggactcgccaattaaggcgaaggtggaactgacggagaacgataaacgtctgctcgaaatctttagcgagtatgttacctggaatcgcgtcagtaacgtactgtcacatattggctcagtgaccgcaaaagattttgggtgggtttcgggtctgacgatgaaagacatcattaatgaagcagcacgcgaaggccatgatctgttcttcgctgataacccgtcggcggtgctgaaggagctgactggcctcatccagaacacgattcgttccaaatggcacgaagttctggag

SEQ ID NO: 1066 - protein, 346 aa, synthetic construct
  REGION 1..346: note = variant of RNA ligase 2 from Klebsiella phage KP179
MHHHHHHGGSNTFAYYSSLENHYNNKFIEKIRGAGFAMHTVEWVAREKIHGTNFSVIITPTEIVPAKRTGPILEGESFFGHEIIMKKYKDSFVKVQNMLNAMDLVSVQIFGEFAGGGIQKGVDYGDKDFYVFDILSDSGNEKVYWDDYRVESFCTTLGLKLAPLLGRGSFAELSQYPNDFKSIVNRYNELVDTVGLEMANKHVFGPQASSETGVAEGYVLKPVYPIFFNTGTRVAIKCKNSKFSEKAKLDSPIKAKVELTENDKRLLEIFSEYVTWNRVSNVLSHIGSVTAKDFGWVSGLTMKDIINEAAREGHDLFFADNPSAVLKELTGLIQNTIRSKWHEVLE

SEQ ID NO: 1067 - DNA, 1038 bp, synthetic construct
  misc_feature 1..1038: note = variant of RNA ligase 2 from Klebsiella phage KP179
  source 1..1038: mol_type = other DNA
atgcatcaccatcaccatcacggtggcagcaacacgtttgcgtattattcaagtctggaaaaccattacaataataagttcattgagaagatccgtggggcaggcttcctgatgcacaccgtggaatgggtagctcgcgagaagattcatggaacgaactttagcgttatcattactccgaccgaaatcgtcccagccaaacgcacagggccgatcttggaaggcgagtcgttctttggtcacgaaattatcatgaaaaaatataaagactccttcgtgaaggtgcagaacatgctgaatgccatggatcttgttagcgtgcaaatctttggcgaatttgcgggtggtggcattcagaaaggcgtcgattacggagacaaagatttctatgtgtttgacatcctgtctgatagcgggaacgagaaagtttactgggatgactatcgcgtcgaatcgttttgcaccacgctcggtctgaaattagcgcctctgctgggacgtggtagtttcgctgaactgtcccagtacccaaacgatttcaaaagcattgtgaaccgttataatgaattggttgacacggtcggcctggagatggccaataaacacgtctttggtccgcaagcgtcttctgaaactggcgtagcagaaggctacgttcttaaacccgtctatccgatcttctttaataccggtacgcgcgtggcgattaaatgcaagaactccaaattttcggagaaatcgaagctggactcgccaattaaggcgaaggtggaactgacggagaacgataaacgtctgctcgaaatctttagcgagtatgttacctggaatcgcgtcagtaacgtactgtcacatattggctcagtgaccgcaaaagattttgggtgggtttcgggtctgacgatgaaagacatcattaatgaagcagcacgcgaaggccatgatctgctgttcgctgataacccgtcggcggtgctgaaggagctgactggcctcatccagaacacgattcgttccaaatggcacgaagttctggag

SEQ ID NO: 1068 - protein, 346 aa, synthetic construct
  REGION 1..346: note = variant of RNA ligase 2 from Klebsiella phage KP179
MHHHHHHGGSNTFAYYSSLENHYNNKFIEKIRGAGFLMHTVEWVAREKIHGTNFSVIITPTEIVPAKRTGPILEGESFFGHEIIMKKYKDSFVKVQNMLNAMDLVSVQIFGEFAGGGIQKGVDYGDKDFYVFDILSDSGNEKVYWDDYRVESFCTTLGLKLAPLLGRGSFAELSQYPNDFKSIVNRYNELVDTVGLEMANKHVFGPQASSETGVAEGYVLKPVYPIFFNTGTRVAIKCKNSKFSEKSKLDSPIKAKVELTENDKRLLEIFSEYVTWNRVSNVLSHIGSVTAKDFGWVSGLTMKDIINEAAREGHDLLFADNPSAVLKELTGLIQNTIRSKWHEVLE

SEQ ID NO: 1069 - DNA, 1038 bp, synthetic construct
  misc_feature 1..1038: note = variant of RNA ligase 2 from Klebsiella phage KP179
  source 1..1038: mol_type = other DNA
atgcatcaccatcaccatcacggtggcagcaacacgtttgcgtattattcaagtctggaaaaccattacaataataagttcattgagaagatccgtctggcaggcttcgcgatgcacaccgtggaatgggtagctcgcgagaagattcatggaacgaactttagcgttatcattactccgaccgaaatcgtcccagccaaacgcacagggccgatcttggaaggcgagtcgttctttggtcacgaaattatcatgaaaaaatataaagactccttcgtgaaggtgcagaacatgctgaatgccatggatcttgttagcgtgcaaatctttggcgaatttgcgggtggtggcattcagaaaggcgtcgattacggagacaaagatttctatgtgtttgacatcctgtctgatagcgggaacgagaaagtttactgggatgactatcgcgtcgaatcgttttgcaccggtctcggtctgaaattagcgcctctgctgggacgtggtagtttcgctgaactgtcccagtacccaaacgatttcaaaagcattgtgaaccgttataatgaattggttgacacggtcggcctggagatggccaataaacacgtctttggtccgcaagcgtcttctgaaactggcgtagcagaaggctacgttcttaaacccgtctatccgatcttctttaataccggtacgcgcgtggcgattaaatgcaagaactccaaattttcggagaaagcgaagctggactcgccaattaaggcgaaggtggaactgacggagaacgataaacgtctgctcgaaatctttagcgagtatgttacctggaatcgcgtcagtaacgtactgtcacatattggctcagtgaccgcaaaagattttgggcgtgtttcgggtctgacgatgaaagacatcattaatgaagcagcacgcgaaggccatgatctgttgttcgctgataacccgtcggcggtgctgaaggagctgactggcctcatccagaacacgattcgttccaaatggcacgaagttctggag

SEQ ID NO: 1070 - protein, 346 aa, synthetic construct
  REGION 1..346: note = variant of RNA ligase 2 from Klebsiella phage KP179
MHHHHHHGGSNTFAYYSSLENHYNNKFIEKIRLAGFAMHTVEWVAREKIHGTNFSVIITPTEIVPAKRTGPILEGESFFGHEIIMKKYKDSFVKVQNMLNAMDLVSVQIFGEFAGGGIQKGVDYGDKDFYVFDILSDSGNEKVYWDDYRVESFCTGLGLKLAPLLGRGSFAELSQYPNDFKSIVNRYNELVDTVGLEMANKHVFGPQASSETGVAEGYVLKPVYPIFFNTGTRVAIKCKNSKFSEKAKLDSPIKAKVELTENDKRLLEIFSEYVTWNRVSNVLSHIGSVTAKDFGRVSGLTMKDIINEAAREGHDLLFADNPSAVLKELTGLIQNTIRSKWHEVLE

SEQ ID NO: 1071 - DNA, 1038 bp, synthetic construct
  misc_feature 1..1038: note = variant of RNA ligase 2 from Klebsiella phage KP179
  source 1..1038: mol_type = other DNA
atgcatcaccatcaccatcacggtggcagcaacacgtttgcgtattattcaagtctggaaaaccattacaataataagttcattgagaagatccgtggggcaggcttcctgatgcacaccgtggaatgggtagctcgcgagaagattcatggaacgaactttagcgttatcattactccgaccgaaatcgtcccagccaaacgcacagggccgatcttggaaggcgagtcgttctttggtcacgaaattatcatgaaaaaatataaagactccttcgtgaaggtgcagaacatgctgaatgccatggatcttgttagcgtgcaaatctttggcgaatttgcgggtggtggcattcagaaaggcgtcgattacggagacaaagatttctatgtgtttgacatcctgtctgatagcgggaacgagaaagtttactgggatgactatcgcgtcgaatcgttttgcaccacgctcggtctgaaattagcgcctctgctgggacgtggtagtttcgctgaactgtcccagtacccaaacgatttcaaaagcattgtgaaccgttataatgaattggttgacacggtcggcctggagatggccaataaacacgtctttggtccgcaagcgtcttctgaaactggcgtagcagaaggctacgttcttaaacccgtctatccgatcttctttaataccggtacgcgcgtggcgattaaatgcaagaactccaaattttcggagaaagccaagctggactcgccaattaaggcgaaggtggaactgacggagaacgataaacgtctgctcgaaatctttagcgagtatgttacctggaatcgcgtcagtaacgtactgtcacatattggctcagtgaccgcaaaagattttgggtgggtttcgggtctgacgatgaaagacatcattaatgaagcagcacgcgaaggccatgatctgtggttcgctgataacccgtcggcggtgctgaaggagctgactggcctcatccagaacacgattcgttccaaatggcacgaagttctggag

SEQ ID NO: 1072 - protein, 346 aa, synthetic construct
  REGION 1..346: note = variant of RNA ligase 2 from Klebsiella phage KP179
MHHHHHHGGSNTFAYYSSLENHYNNKFIEKIRGAGFLMHTVEWVAREKIHGTNFSVIITPTEIVPAKRTGPILEGESFFGHEIIMKKYKDSFVKVQNMLNAMDLVSVQIFGEFAGGGIQKGVDYGDKDFYVFDILSDSGNEKVYWDDYRVESFCTTLGLKLAPLLGRGSFAELSQYPNDFKSIVNRYNELVDTVGLEMANKHVFGPQASSETGVAEGYVLKPVYPIFFNTGTRVAIKCKNSKFSEKAKLDSPIKAKVELTENDKRLLEIFSEYVTWNRVSNVLSHIGSVTAKDFGWVSGLTMKDIINEAAREGHDLWFADNPSAVLKELTGLIQNTIRSKWHEVLE

SEQ ID NO: 1073 - DNA, 1038 bp, synthetic construct
  misc_feature 1..1038: note = variant of RNA ligase 2 from Klebsiella phage KP179
  source 1..1038: mol_type = other DNA
atgcatcaccatcaccatcacggtggcagcaacacgtttgcgtattattcaagtctggaaaaccattacaataataagttcattgagaagatccgtggtgcaggcttcctgatgcacaccgtggaatgggtagctcgcgagaagattcatggaacgaactttagcgttatcattactccgaccgaaatcgtcccagccaaacgcacagggccgatcttggaaggcgagtcgttctttggtcacgaaattatcatgaaaaaatataaagactccttcgtgaaggtgcagaacatgctgaatgccatggatcttgttagcgtgcaaatctttggcgaatttgcgggtggtggcattcagaaaggcgtcgattacggagacaaagatttctatgtgtttgacatcctgtctgatagcgggaacgagaaagtttactgggatgactatcgcgtcgaatcgttttgcaccgggctcggtctgaaattagcgcctctgctgggacgtggtagtttcgctgaactgtcccagtacccaaacgatttcaaaagcattgtgaaccgttataatgaattggttgacacggtcggcctggagatggccaataaacacgtctttggtccgcaagcgtcttctgaaactggcgtagcagaaggctacgttcttaaacccgtctatccgatcttctttaataccggtacgcgcgtggcgattaaatgcaagaactccaaattttcggagaaagccaagctggactcgccaattagtgcgaaggtggaactgacggagaacgataaacgtctgctcgaaatctttagcgagtatgttacctggaatcgcgtcagtaacgtactgtcacatattggctcagtgaccgcaaaagattttgggcgtgtttcgggtctgacgatgaaagacatcattcgcgaagcagcacgcgaaggccatgatctgttgttcgctgataacccgtcggcggtgctgaaggagctgactggcctcatccagaacacgattcgctccaaatggcacgaagttctggag

SEQ ID NO: 1074 - protein, 346 aa, synthetic construct
  REGION 1..346: note = variant of RNA ligase 2 from Klebsiella phage KP179
MHHHHHHGGSNTFAYYSSLENHYNNKFIEKIRGAGFLMHTVEWVAREKIHGTNFSVIITPTEIVPAKRTGPILEGESFFGHEIIMKKYKDSFVKVQNMLNAMDLVSVQIFGEFAGGGIQKGVDYGDKDFYVFDILSDSGNEKVYWDDYRVESFCTGLGLKLAPLLGRGSFAELSQYPNDFKSIVNRYNELVDTVGLEMANKHVFGPQASSETGVAEGYVLKPVYPIFFNTGTRVAIKCKNSKFSEKAKLDSPISAKVELTENDKRLLEIFSEYVTWNRVSNVLSHIGSVTAKDFGRVSGLTMKDIIREAAREGHDLLFADNPSAVLKELTGLIQNTIRSKWHEVLE

SEQ ID NO: 1075 - DNA, 1038 bp, synthetic construct
  misc_feature 1..1038: note = variant of RNA ligase 2 from Klebsiella phage KP179
  source 1..1038: mol_type = other DNA
atgcatcaccatcaccatcacggtggcagcaacacgtttgcgtattattcacacctggaaaaccattacaataataagttcattgagaagatccgtggtgcaggcttcctgatgcacaccgtggaatgggtagctcgcgagaagattcatggaacgaactttagcgttatcattactccgaccgaaatcgtcccagccaaacgcacagggccgatcttggaaggcgagtcgttctttggtcacgaaattatcatgaaaaaatataaagactccttcgtgaaggtgcagaacatgctgaatgccatggatcttgttagcgtgcaaatctttggcgaatttgcgggtggtggcattcagaaaggcgtcgattacggagacaaagatttctatgtgtttgacatcctgtctgatagcgggaacgagaaagtttactgggatgactatcgcgtcgaatcgttttgcaccgggctcggtctgaaattagcgcctctgctgggacgtggtagtttcgctgaactgtcccagtacccaaacgatttcaaaagcattgtgaaccgttataatgaattggttgacacggtcggcctggagatggccaataaacacgtctttggtccgcaagcgtcttctgaaactggcgtagcagaaggctacgttcttaaacccgtctatccgatcttctttaataccggtacgcgcgtggcgattaaatgcaagaactccaaattttcggagaaagccaagctggactcgccaattaaagcgaaggtggaactgacggagaacgataaacgtctgctcgaaatctttagcgagtatgttacctggaatcgcgtcagtaacgtactgtcacatattggctcagtgaccgcaaaagattttgggcgtgtttcgggtctgacgatgaaagacatcattcgcgaagcagcacgcgaaggccatgatctgttgttcgctgataacccgtcggcggtgctgaaggagctgactggcctcatccagaacacgattcgctccaaatggcacgaagttctggag

SEQ ID NO: 1076 - protein, 346 aa, synthetic construct
  REGION 1..346: note = variant of RNA ligase 2 from Klebsiella phage KP179
MHHHHHHGGSNTFAYYSHLENHYNNKFIEKIRGAGFLMHTVEWVAREKIHGTNFSVIITPTEIVPAKRTGPILEGESFFGHEIIMKKYKDSFVKVQNMLNAMDLVSVQIFGEFAGGGIQKGVDYGDKDFYVFDILSDSGNEKVYWDDYRVESFCTGLGLKLAPLLGRGSFAELSQYPNDFKSIVNRYNELVDTVGLEMANKHVFGPQASSETGVAEGYVLKPVYPIFFNTGTRVAIKCKNSKFSEKAKLDSPIKAKVELTENDKRLLEIFSEYVTWNRVSNVLSHIGSVTAKDFGRVSGLTMKDIIREAAREGHDLLFADNPSAVLKELTGLIQNTIRSKWHEVLE

SEQ ID NO: 1077 - DNA, 1038 bp, synthetic construct
  misc_feature 1..1038: note = variant of RNA ligase 2 from Klebsiella phage KP179
  source 1..1038: mol_type = other DNA
atgcatcaccatcaccatcacggtggcagcaacacgtttgcgtattattcaagtctggaaaaccattacaataataagttcattgagaagatccgtctggcaggcttcgcgatgcacaccgtggaatgggtagctcgcgagaagattcatggaacgaactttagcgttatcattactccgaccgaaatcgtcccagccaaacgcacagggccgatcttggaaggcgagtcgttctttggtcacgaaattatcatgaaaaaatataaagactccttcgtgaaggtgcagaacatgctgaatgccatggatcttgttagcgtgcaaatctttggcgaatttgcgggtggtggcattcagaaaggcgtcgattacggagacaaagatttctatgtgtttgacatcctgtctgatagcgggaacgagaaagtttactgggatgactatcgcgtcgaatcgttttgcaccacgctcggtctgaaattagcgcctctgctgggacgtggtagtttcgctgaactgtcccagtacccaaacgatttcaaaagcattgtgaaccgttataatgaattggttgacacggtcggcctggagatggccaataaacacgtctttggtccgcaagcgtcttctgaaactggcgtagcagaaggctacgttcttaaacccgtctatccgatcttctttaataccggtacgcgcgtggcgattaaatgcaagaactccaaattttcggagaaagccaagctggactcgccaattaaggcgaaggtggaactgacggagaacgataaattcctgctcgaaatctttagcgagtatgttacctggaatcgcgtcagtaacgtactgtcacatattggctcagtgaccgcaaaagattttgggcgtgtttcgggtctgacgatgaaagacatcattaatgaagcagcacgcgaaggccatgatctgctgttcgctgataacccgtcggcggtgctgaaggagctgactggcctcatccagaacacgattcgttccaaatggcacgaagttctggag

SEQ ID NO: 1078 - protein, 346 aa, synthetic construct
  REGION 1..346: note = variant of RNA ligase 2 from Klebsiella phage KP179
MHHHHHHGGSNTFAYYSSLENHYNNKFIEKIRLAGFAMHTVEWVAREKIHGTNFSVIITPTEIVPAKRTGPILEGESFFGHEIIMKKYKDSFVKVQNMLNAMDLVSVQIFGEFAGGGIQKGVDYGDKDFYVFDILSDSGNEKVYWDDYRVESFCTTLGLKLAPLLGRGSFAELSQYPNDFKSIVNRYNELVDTVGLEMANKHVFGPQASSETGVAEGYVLKPVYPIFFNTGTRVAIKCKNSKFSEKAKLDSPIKAKVELTENDKFLLEIFSEYVTWNRVSNVLSHIGSVTAKDFGRVSGLTMKDIINEAAREGHDLLFADNPSAVLKELTGLIQNTIRSKWHEVLE

SEQ ID NO: 1079 - DNA, 1038 bp, synthetic construct
  misc_feature 1..1038: note = variant of RNA ligase 2 from Klebsiella phage KP179
  source 1..1038: mol_type = other DNA
atgcatcaccatcaccatcacggtggcagcaacatgtttgcgtattattcaagtctggaaaaccattacaatgctaagttcattgacaagatccgtggtgcaggcttcctgatgcacaccgtggaatgggtagctcgcgagaagattcatggaacgaactttagcgttatcattactccgaccgaaatcgtcccagccaaacgcacagggccgatcttggaaggcgagtcgttctttggtcacgaaattatcatgaaaaaatataaagactccttcgtgaaggtgcagaacatgctgaatgccatggatcttgttagcgtgcaaatctttggcgaatttgcgggtggtggcattcagaaaggcgtcgattacggagacaaagatttctatgtgtttgacatcctgtctgatagcgggaacgagaaagtttactgggatgactatcgcgtcgaatcgttttgcaccggtctcggtctgaaattagcgcctctgctgggacgtggtagtttcgctgaactgtcccagtacccaaacgatttcaaaagcattgtgaaccgttataatgaattggttgacacggtcggcctggagatggccaataaacacgtctttggtccgcaagcgtcttctgaaactggcgtagcagaaggctacgttcttaaacccgtctatccgatcttctttaataccggtacgcgcgtggcgattaaatgcaagaactccaaattttcggagaaagccaagctggactcgccaattagtgcgaaggttgaactgacggagaacgataaacgtctgctcgaaatctttagcgagtatgttacctggaatcgcgtcagtaacgtactgtcacatattggctcagtgaccgcaaaagattttgggcgtgtttcgggtctgacgatgaaagacatcattaatgaagcagcacgcgaaggccatgatctgttgttcgctgataacccgtcggcggtgctgaaggagctgactggcctcatccagaacacgattcgctccaaatggcacgaagttctggag

SEQ ID NO: 1080 - protein, 346 aa, synthetic construct
  REGION 1..346: note = variant of RNA ligase 2 from Klebsiella phage KP179
MHHHHHHGGSNMFAYYSSLENHYNAKFIDKIRGAGFLMHTVEWVAREKIHGTNFSVIITPTEIVPAKRTGPILEGESFFGHEIIMKKYKDSFVKVQNMLNAMDLVSVQIFGEFAGGGIQKGVDYGDKDFYVFDILSDSGNEKVYWDDYRVESFCTGLGLKLAPLLGRGSFAELSQYPNDFKSIVNRYNELVDTVGLEMANKHVFGPQASSETGVAEGYVLKPVYPIFFNTGTRVAIKCKNSKFSEKAKLDSPISAKVELTENDKRLLEIFSEYVTWNRVSNVLSHIGSVTAKDFGRVSGLTMKDIINEAAREGHDLLFADNPSAVLKELTGLIQNTIRSKWHEVLE

SEQ ID NO: 1081 - DNA, 1038 bp, synthetic construct
  misc_feature 1..1038: note = variant of RNA ligase 2 from Klebsiella phage KP179
  source 1..1038: mol_type = other DNA
atgcatcaccatcaccatcacggtggcagcaacatgtttgcgtattattcaagtctggaaaaccattacaataataagttcattgagaagatccgtggtgcaggcttcctgatgcacaccgtggaatgggtagctcgcgagaagattcatggaacgaactttagcgttatcattactccgaccgaaatcgtcccagccaaacgcacagggccgatcttggaaggcgagtcgttctttggtcacgaaattatcatgaaaaaatataaagactccttcgtgaaggtgcagaacatgctgaatgccatggatcttgttagcgtgcaaatctttggcgaatttgcgggtggtggcattcagaaaggcgtcgattacggagacaaagatttctatgtgtttgacatcctgtctgatagcgggaacgagaaagtttactgggatgactatcgcgtcgaatcgttttgcaccactctcggtctgaaattagcgcctctgctgggacgtggtagtttcgctgaactgtcccagtacccaaacgatttcaaaagcattgtgaaccgttataatgaattggttgacacggtcggcctggagatggccaataaacacgtctttggtccgcaagcgtcttctgaaactggcgtagcagaaggctacgttcttaaacccgtctatccgatcttctttaataccggtacgcgcgtggcgattaaatgcaagaactccaaattttcggagaaagccaagctggactcgccaattagttatagcgatgaactgacggagaacgataaacgtctgctcgaaatctttagcgagtatgttacctggaatcgcgtcagtaacgtactgtcacatattggctcagtgaccgcaaaagattttgggcgtgtttcgggtctgacgatgaaagacatcattaatgaagcagcacgcgaaggccatgatctgttgttcgctgataacccgtcggcggtgctgaaggagctgactggcctcatccagaacacgattcgctccaaatggcacgaagttctggag

SEQ ID NO: 1082 - protein, 346 aa, synthetic construct
  REGION 1..346: note = variant of RNA ligase 2 from Klebsiella phage KP179
MHHHHHHGGSNMFAYYSSLENHYNNKFIEKIRGAGFLMHTVEWVAREKIHGTNFSVIITPTEIVPAKRTGPILEGESFFGHEIIMKKYKDSFVKVQNMLNAMDLVSVQIFGEFAGGGIQKGVDYGDKDFYVFDILSDSGNEKVYWDDYRVESFCTTLGLKLAPLLGRGSFAELSQYPNDFKSIVNRYNELVDTVGLEMANKHVFGPQASSETGVAEGYVLKPVYPIFFNTGTRVAIKCKNSKFSEKAKLDSPISYSDELTENDKRLLEIFSEYVTWNRVSNVLSHIGSVTAKDFGRVSGLTMKDIINEAAREGHDLLFADNPSAVLKELTGLIQNTIRSKWHEVLE

SEQ ID NO: 1083 - DNA, 1038 bp, synthetic construct
  misc_feature 1..1038: note = variant of RNA ligase 2 from Klebsiella phage KP179
  source 1..1038: mol_type = other DNA
atgcatcaccatcaccatcacggtggcagcaacatgtttgcgtattattcaagtctggaaaaccattacaataataagttcattgagaagatccgtggtgcaggcttcctgatgcacaccgtggaatgggtagctcgcgagaagattcatggaacgaactttagcgttatcattactccgaccgaaatcgtcccagccaaacgcacagggccgatcttggaaggcgagtcgttctttggtcacgaaattatcatgaaaaaatataaagactccttcgtgaaggtgcagaacatgctgaatgccatggatcttgttagcgtgcaaatctttggcgaatttgcgggtggtggcattcagaaaggcgtcgattacggagacaaagatttctatgtgtttgacatcctgtctgatagcgggaacgagaaagtttactgggatgactatcgcgtcgaatcgttttgcaccggtctcggtctgaaattagcgcctctgctgggacgtggtagtttcgctgaactgtcccagtacccaaacgatttcaaaagcattgtgaaccgttataatgaattggttgacacggtcggcctggagatggccaataaacacgtctttggtccgcaagcgtcttctgaaactggcgtagcagaaggctacgttcttaaacccgtctatccgatcttctttaataccggtacgcgcgtggcgattaaatgcaagaactccaaattttcggagaaagccaagctggactcgccaattagtgttaaggttgaactgacggagaacgataaacgtctgctcgaaatctttagcgagtatgttacctggaatcgcgtcagtaacgtactgtcacatattggctcagtgaccgcaaaagattttgggcgtgtttcgggtctgacgatgaaagacatcattaatgaagcagcacgcgaaggccatgatctgttgttcgctgataacccgtcggcggtgctgaaggagctgactggcctcatccagaacacgattcgctccaaatggcacgaagttctggag

SEQ ID NO: 1084 - protein, 346 aa, synthetic construct
  REGION 1..346: note = variant of RNA ligase 2 from Klebsiella phage KP179
MHHHHHHGGSNMFAYYSSLENHYNNKFIEKIRGAGFLMHTVEWVAREKIHGTNFSVIITPTEIVPAKRTGPILEGESFFGHEIIMKKYKDSFVKVQNMLNAMDLVSVQIFGEFAGGGIQKGVDYGDKDFYVFDILSDSGNEKVYWDDYRVESFCTGLGLKLAPLLGRGSFAELSQYPNDFKSIVNRYNELVDTVGLEMANKHVFGPQASSETGVAEGYVLKPVYPIFFNTGTRVAIKCKNSKFSEKAKLDSPISVKVELTENDKRLLEIFSEYVTWNRVSNVLSHIGSVTAKDFGRVSGLTMKDIINEAAREGHDLLFADNPSAVLKELTGLIQNTIRSKWHEVLE

SEQ ID NO: 1085 - DNA, 1038 bp, synthetic construct
  misc_feature 1..1038: note = variant of RNA ligase 2 from Klebsiella phage KP179
  source 1..1038: mol_type = other DNA
atgcatcaccatcaccatcacggtggcagcaacacgtttgcgtattattcaagtctggaaaaccattacaataataagttcattgagaagatccgtggtgcaggcttcctgatgcacaccgtggaatgggtagctcgcgagaagattcatggaacgaactttagcgttatcattactccgaccgaaatcgtcccagccaaacgcacagggccgatcttggaaggcgagtcgttctttggtcacgaaattatcatgaaaaaatataaagactccttcgtgaaggtgcagaacatgctgaatgccatggatcttgttagcgtgcaaatctttggcgaatttgcgggtggtggcattcagaaaggcgtcgattacggagacaaagatttctatgtgtttgacatcctgtctgatagcgggaacgagaaagtttactgggatgactatcgcgtcgaatcgttttgcaccactctcggtctgaaattagcgcctctgctgggacgtggtagtttcgctgaactgtcccagtacccaaacgatttcaaaagcattgtgaaccgttataatgaattggttgacacggtcggcctggagatggccaataaacacgtctttggtccgcaagcgtcttctgaaactggcgtagcagaaggctacgttcttaaacccgtctatccgatcttctttaataccggtacgcgcgtggcgattaaatgcaagaactccaaattttcggagaaacgtaagctggactcggctattagtgcgaaggtggaactgacggagaacgataaacgtctgctcgaaatctttagcgagtatgttacctggaatcgcgtcagtaacgtactgtcacatattggctcagtgaccgcaaaagattttgggcgtgtttcgggtctgacgatgaaagacatcattaatgaagcagcacgcgaaggccatgatctgttgttcgctgataacccgtcggcggtgctgaaggagctgactggcctcatccagaacacgattcgctccaaatggcacgaagttctggag

SEQ ID NO: 1086 - protein, 346 aa, synthetic construct
  REGION 1..346: note = variant of RNA ligase 2 from Klebsiella phage KP179
MHHHHHHGGSNTFAYYSSLENHYNNKFIEKIRGAGFLMHTVEWVAREKIHGTNFSVIITPTEIVPAKRTGPILEGESFFGHEIIMKKYKDSFVKVQNMLNAMDLVSVQIFGEFAGGGIQKGVDYGDKDFYVFDILSDSGNEKVYWDDYRVESFCTTLGLKLAPLLGRGSFAELSQYPNDFKSIVNRYNELVDTVGLEMANKHVFGPQASSETGVAEGYVLKPVYPIFFNTGTRVAIKCKNSKFSEKRKLDSAISAKVELTENDKRLLEIFSEYVTWNRVSNVLSHIGSVTAKDFGRVSGLTMKDIINEAAREGHDLLFADNPSAVLKELTGLIQNTIRSKWHEVLE

SEQ ID NO: 1087 - DNA, 1038 bp, synthetic construct
  misc_feature 1..1038: note = variant of RNA ligase 2 from Klebsiella phage KP179
  source 1..1038: mol_type = other DNA
atgcatcaccatcaccatcacggtggcagcaacatgtttgcgtattattcaagtctggaaaaccattacaatgctaagttcattgagaagatccgtggtgcaggcttcctgatgcacaccgtggaatgggtagctcgcgagaagattcatggaacgaactttagcgttatcattactccgaccgaaatcgtcccagccaaacgcacagggccgatcttggaaggcgagtcgttctttggtcacgaaattatcatgaaaaaatataaagactccttcgtgaaggtgcagaacatgctgaatgccatggatcttgttagcgtgcaaatctttggcgaatttgcgggtggtggcattcagaaaggcgtcgattacggagacaaagatttctatgtgtttgacatcctgtctgatagcgggaacgagaaagtttactgggatgactatcgcgtcgaatcgttttgcaccactctcggtctgaaattagcgcctctgctgggacgtggtagtttcgctgaactgtcccagtacccaaacgatttcaaaagcattgtgaaccgttataatgaattggttgacacggtcggcctggagatggccaataaacacgtctttggtccgcaagcgtcttctgaaactggcgtagcagaaggctacgttcttaaacccgtctatccgatcttctttaataccggtacgcgcgtggcgattaaatgcaagaactccaaattttcggagaaagccaagctggactcgccaattagtgcgaaggttgaactgacggagaacgataaacgtctgctcgaaatctttagcgagtatgttacctggaatcgcgtcagtaacgtactgtcacatattggctcagtgaccgcaaaagattttgggcgtgtttcgggtctgacgatgaaagacatcattaatgaagcagcacgcgaaggccatgatctgttgttcgctgataacccgtcggcggtgctgaaggagctgactggcctcatccagaacacgattcgctccaaatggcacgaagttctggag

SEQ ID NO: 1088 - protein, 346 aa, synthetic construct
  REGION 1..346: note = variant of RNA ligase 2 from Klebsiella phage KP179
MHHHHHHGGSNMFAYYSSLENHYNAKFIEKIRGAGFLMHTVEWVAREKIHGTNFSVIITPTEIVPAKRTGPILEGESFFGHEIIMKKYKDSFVKVQNMLNAMDLVSVQIFGEFAGGGIQKGVDYGDKDFYVFDILSDSGNEKVYWDDYRVESFCTTLGLKLAPLLGRGSFAELSQYPNDFKSIVNRYNELVDTVGLEMANKHVFGPQASSETGVAEGYVLKPVYPIFFNTGTRVAIKCKNSKFSEKAKLDSPISAKVELTENDKRLLEIFSEYVTWNRVSNVLSHIGSVTAKDFGRVSGLTMKDIINEAAREGHDLLFADNPSAVLKELTGLIQNTIRSKWHEVLE

SEQ ID NO: 1089 - DNA, 1038 bp, synthetic construct
  misc_feature 1..1038: note = variant of RNA ligase 2 from Klebsiella phage KP179
  source 1..1038: mol_type = other DNA
atgcatcaccatcaccatcacggtggcagcaacatgtttgcgtattattcaagtctggaaaaccattacaataataagttcattgagaagatccgtggtgcaggcttcctgatgcacaccgtggaatgggtagctcgcgagaagattcatggaacgaactttagcgttatcattactccgaccgaaatcgtcccagccaaacgcacagggccgatcttggaaggcgagtcgttctttggtcacgaaattatcatgaaaaaatataaagactccttcgtgaaggtgcagaacatgctgaatgccatggatcttgttagcgtgcaaatctttggcgaatttgcgggtggtggcattcagaaaggcgtcgattacggagacaaagatttctatgtgtttgacatcctgtctgatagcgggaacgagaaagtttactgggatgactatcgcgtcgaatcgttttgcaccactctcggtctgaaattagcgcctctgctgggacgtggtagtttcgctgaactgtcccagtacccaaacgatttcaaaagcattgtgaaccgttataatgaattggttgacacggtcggcctggagatggccaataaacacgtctttggtccgcaagcgtcttctgaaactggcgtagcagaaggctacgttcttaaacccgtctatccgatcttctttaataccggtacgcgcgtggcgattaaatgcaagaactccaaattttcggagaaagccaagctggactcgccaattagtgcgaaggtggaactgacggagaacgataaacgtctgctcgaaatctttagcgagtatgttacctggaatcgcgtcagtaacgtactgtcacatattggctcagtgaccgcaaaagattttgggcgtgtttcgggtctgacgatgaaagacatcattaatgaagcagcacgcgaaggccatgatctgttgttcgctgataacccgtcggcggtgctgaaggagctgactggcctcatccagaacacgattcgctccaaatggcacgaagttctggag

SEQ ID NO: 1090 - protein, 346 aa, synthetic construct
  REGION 1..346: note = variant of RNA ligase 2 from Klebsiella phage KP179
MHHHHHHGGSNMFAYYSSLENHYNNKFIEKIRGAGFLMHTVEWVAREKIHGTNFSVIITPTEIVPAKRTGPILEGESFFGHEIIMKKYKDSFVKVQNMLNAMDLVSVQIFGEFAGGGIQKGVDYGDKDFYVFDILSDSGNEKVYWDDYRVESFCTTLGLKLAPLLGRGSFAELSQYPNDFKSIVNRYNELVDTVGLEMANKHVFGPQASSETGVAEGYVLKPVYPIFFNTGTRVAIKCKNSKFSEKAKLDSPISAKVELTENDKRLLEIFSEYVTWNRVSNVLSHIGSVTAKDFGRVSGLTMKDIINEAAREGHDLLFADNPSAVLKELTGLIQNTIRSKWHEVLE

SEQ ID NO: 1091 - DNA, 1038 bp, synthetic construct
  misc_feature 1..1038: note = variant of RNA ligase 2 from Klebsiella phage KP179
  source 1..1038: mol_type = other DNA
atgcatcaccatcaccatcacggtggcagcaacatgtttgcgtattattcaagtctggaaaaccattacaatgctaagttcattgacaagatccgtggtgcaggcttcctgatgcacaccgtggaatgggtagctcgcgagaagattcatggaacgaactttagcgttatcattactccgaccgaaatcgtcccagccaaacgcacagggccgatcttggaaggcgagtcgttctttggtcacgaaattatcatgaaaaaatataaagactccttcgtgaaggtgcagaacatgctgaatgccatggatcttgttagcgtgcaaatctttggcgaatttgcgggtggtggcattcagaaaggcgtcgattacggagacaaagatttctatgtgtttgacatcctgtctgatagcgggaacgagaaagtttactgggatgactatcgcgtcgaatcgttttgcaccggtctcggtctgaaattagcgcctctgctgggacgtggtagtttcgctgaactgtcccagtacccaaacgatttcaaaagcattgtgaaccgttataatgaattggttgacacggtcggcctggagatggccaataaacacgtctttggtccgcaagcgtcttctgaaactggcgtagcagaaggctacgttcttaaacccgtctatccgatcttctttaataccggtacgcgcgtggcgattaaatgcaagaactccaaattttcggagaaagccaagctggactcgccaattagttcgaaggttgaactgacggagaacgataaacgtctgctcgaaatctttagcgagtatgttacctggaatcgcgtcagtaacgtactgtcacatattggctcagtgaccgcaaaagattttgggcgtgtttcgggtctgacgatgaaagacatcattaatgaagcagcacgcgaaggccatgatctgttgttcgctgataacccgtcggcggtgctgaaggagctgactggcctcatccagaacacgattcgctccaaatggcacgaagttctggag

SEQ ID NO: 1092 - protein, 346 aa, synthetic construct
  REGION 1..346: note = variant of RNA ligase 2 from Klebsiella phage KP179
MHHHHHHGGSNMFAYYSSLENHYNAKFIDKIRGAGFLMHTVEWVAREKIHGTNFSVIITPTEIVPAKRTGPILEGESFFGHEIIMKKYKDSFVKVQNMLNAMDLVSVQIFGEFAGGGIQKGVDYGDKDFYVFDILSDSGNEKVYWDDYRVESFCTGLGLKLAPLLGRGSFAELSQYPNDFKSIVNRYNELVDTVGLEMANKHVFGPQASSETGVAEGYVLKPVYPIFFNTGTRVAIKCKNSKFSEKAKLDSPISSKVELTENDKRLLEIFSEYVTWNRVSNVLSHIGSVTAKDFGRVSGLTMKDIINEAAREGHDLLFADNPSAVLKELTGLIQNTIRSKWHEVLE

SEQ ID NO: 1093 - DNA, 1038 bp, synthetic construct
  misc_feature 1..1038: note = variant of RNA ligase 2 from Klebsiella phage KP179
  source 1..1038: mol_type = other DNA
atgcatcaccatcaccatcacggtggcagcaacacgtttgcgtattattcaagtctggaaaaccattacaataataagttcattgagaagatccgtggtgcaggcttcctgatgcacaccgtggaatgggtagctcgcgagaagattcatggaacgaactttagcgttatcattactccgaccgaaatcgtcccagccaaacgcacagggccgatcttggaaggcgagtcgttctttggtcacgaaattatcatgaaaaaatataaagactccttcgtgaaggtgcagaacatgctgaatgccatggatcttgttagcgtgcaaatctttggcgaatttgcgggtggtggcattcagaaaggcgtcgattacggagacaaagatttctatgtgtttgacatcctgtctgatagcgggaacgagaaagtttactgggatgactatcgcgtcgaatcgttttgcaccactctcggtctgaaattagcgcctctgctgggacgtggtagtttcgctgaactgtcccagtacccaaacgatttcaaaagcattgtgaaccgttataatgaattggttgacacggtcggcctggagatggccaataaacacgtctttggtccgcaagcgtcttctgaaactggcgtagcagaaggctacgttcttaaacccgtctatccgatcttctttaataccggtacgcgcgtggcgattaaatgcaagaactccaaattttcggagaaagccaagctggactcgccaattagtgcgagcgttgaactgacggagaacgataaacgtctgctcgaaatctttagcgagtatgttacctggaatcgcgtcagtaacgtactgtcacatattggctcagtgaccgcaaaagattttgggcgtgtttcgggtctgacgatgaaagacatcattaatgaagcagcacgcgaaggccatgatctgttgttcgctgataacccgtcggcggtgctgaaggagctgactggcctcatccagaacacgattcgctccaaatggcacgaagttctggag

SEQ ID NO: 1094 - protein, 346 aa, synthetic construct
  REGION 1..346: note = variant of RNA ligase 2 from Klebsiella phage KP179
MHHHHHHGGSNTFAYYSSLENHYNNKFIEKIRGAGFLMHTVEWVAREKIHGTNFSVIITPTEIVPAKRTGPILEGESFFGHEIIMKKYKDSFVKVQNMLNAMDLVSVQIFGEFAGGGIQKGVDYGDKDFYVFDILSDSGNEKVYWDDYRVESFCTTLGLKLAPLLGRGSFAELSQYPNDFKSIVNRYNELVDTVGLEMANKHVFGPQASSETGVAEGYVLKPVYPIFFNTGTRVAIKCKNSKFSEKAKLDSPISASVELTENDKRLLEIFSEYVTWNRVSNVLSHIGSVTAKDFGRVSGLTMKDIINEAAREGHDLLFADNPSAVLKELTGLIQNTIRSKWHEVLE

SEQ ID NO: 1095 - DNA, 1038 bp, synthetic construct
  misc_feature 1..1038: note = variant of RNA ligase 2 from Klebsiella phage KP179
  source 1..1038: mol_type = other DNA
atgcatcaccatcaccatcacggtggcagcaacatgtttgcgtattattcaagtctggaaaaccattacaataataagttcattgagaagatccgtggtgcaggcttcctgatgcacaccgtggaatgggtagctcgcgagaagattcatggaacgaactttagcgttatcattactccgaccgaaatcgtcccagccaaacgcacagggccgatcttggaaggcgagtcgttctttggtcacgaaattatcatgaaaaaatataaagactccttcgtgaaggtgcagaacatgctgaatgccatggatcttgttagcgtgcaaatctttggcgaatttgcgggtggtggcattcagaaaggcgtcgattacggagacaaagatttctatgtgtttgacatcctgtctgatagcgggaacgagaaagtttactgggatgactatcgcgtcgaatcgttttgcaccggtctcggtctgaaattagcgcctctgctgggacgtggtagtttcgctgaactgtcccagtacccaaacgatttcaaaagcattgtgaaccgttataatgaattggttgacacggtcggcctggagatggccaataaacacgtctttggtccgcaagcgtcttctgaaactggcgtagcagaaggctacgttcttaaacccgtctatccgatcttctttaataccggtacgcgcgtggcgattaaatgcaagaactccaaattttcggagaaagccaagctggactcgccaattagtgcgaaggtggaactgacggagaacgataaacgtctgctcgaaatctttagcgagtatgttacctggaatcgcgtcagtaacgtactgtcacatattggctcagtgaccgcaaaagattttgggcgtgtttcgggtctgacgatgaaagacatcattaatgaagcagcacgcgaaggccatgatctgttgttcgctgataacccgtcggcggtgctgaaggagctgactggcctcatccagaacacgattcgctccaaatggcacgaagttctggag

SEQ ID NO: 1096 - protein, 346 aa, synthetic construct
  REGION 1..346: note = variant of RNA ligase 2 from Klebsiella phage KP179
MHHHHHHGGSNMFAYYSSLENHYNNKFIEKIRGAGFLMHTVEWVAREKIHGTNFSVIITPTEIVPAKRTGPILEGESFFGHEIIMKKYKDSFVKVQNMLNAMDLVSVQIFGEFAGGGIQKGVDYGDKDFYVFDILSDSGNEKVYWDDYRVESFCTGLGLKLAPLLGRGSFAELSQYPNDFKSIVNRYNELVDTVGLEMANKHVFGPQASSETGVAEGYVLKPVYPIFFNTGTRVAIKCKNSKFSEKAKLDSPISAKVELTENDKRLLEIFSEYVTWNRVSNVLSHIGSVTAKDFGRVSGLTMKDIINEAAREGHDLLFADNPSAVLKELTGLIQNTIRSKWHEVLE

SEQ ID NO: 1097 - DNA, 1038 bp, synthetic construct
  misc_feature 1..1038: note = variant of RNA ligase 2 from Klebsiella phage KP179
  source 1..1038: mol_type = other DNA
atgcatcaccatcaccatcacggtggcagcaacatgtttgcgtattattcaagtctggaaaaccattacaatgctaagttcattgagaagatccgtggtgcaggcttcctgatgcacaccgtggaatgggtagctcgcgagaagattcatggaacgaactttagcgttatcattactccgaccgaaatcgtcccagccaaacgcacagggccgatcttggaaggcgagtcgttctttggtcacgaaattatcatgaaaaaatataaagactccttcgtgaaggtgcagaacatgctgaatgccatggatcttgttagcgtgcaaatctttggcgaatttgcgggtggtggcattcagaaaggcgtcgattacggagacaaagatttctatgtgtttgacatcctgtctgatagcgggaacgagaaagtttactgggatgactatcgcgtcgaatcgttttgcaccggtctcggtctgaaattagcgcctctgctgggacgtggtagtttcgctgaactgtcccagtacccaaacgatttcaaaagcattgtgaaccgttataatgaattggttgacacggtcggcctggagatggccaataaacacgtctttggtccgcaagcgtcttctgaaactggcgtagcagaaggctacgttcttaaacccgtctatccgatcttctttaataccggtacgcgcgtggcgattaaatgcaagaactccaaattttcggagaaagccaagctggactcgccaattagtgttagcgatgaactgacggacaacgataaacgtctgctcgaaatctttagcgagtatgttacctggaatcgcgtcagtaacgtactgtcacatattggctcagtgaccgcaaaagattttgggcgtgtttcgggtctgacgatgaaagacatcattaatgaagcagcacgcgaaggccatgatctgttgttcgctgataacccgtcggcggtgctgaaggagctgactggcctcatccagaacacgattcgctccaaatggcacgaagttctggag

SEQ ID NO: 1098 - protein, 346 aa, synthetic construct
  REGION 1..346: note = variant of RNA ligase 2 from Klebsiella phage KP179
MHHHHHHGGSNMFAYYSSLENHYNAKFIEKIRGAGFLMHTVEWVAREKIHGTNFSVIITPTEIVPAKRTGPILEGESFFGHEIIMKKYKDSFVKVQNMLNAMDLVSVQIFGEFAGGGIQKGVDYGDKDFYVFDILSDSGNEKVYWDDYRVESFCTGLGLKLAPLLGRGSFAELSQYPNDFKSIVNRYNELVDTVGLEMANKHVFGPQASSETGVAEGYVLKPVYPIFFNTGTRVAIKCKNSKFSEKAKLDSPISVSDELTDNDKRLLEIFSEYVTWNRVSNVLSHIGSVTAKDFGRVSGLTMKDIINEAAREGHDLLFADNPSAVLKELTGLIQNTIRSKWHEVLE

SEQ ID NO: 1099 - DNA, 1038 bp, synthetic construct
  misc_feature 1..1038: note = variant of RNA ligase 2 from Klebsiella phage KP179
  source 1..1038: mol_type = other DNA
atgcatcaccatcaccatcacggtggcagcaacacgtttgcgtattattcacacctggaaaaccattacaataataagttcattgagaagatccgtggtgcaggcttcctgatgcacaccgtggaatgggtagctcgcgagaagattcatggaacgaactttagcgttatcattactccgaccgaaatcgtcccagccaaacgcacagggccgatcttggaaggcgagtcgttctttggtcacgaaattatcatgaaaaaatataaagactccttcgtgaaggtgcagaacatgctgaatgccatggatcttgttagcgtgcaaatctttggcgaatttgcgggtggtggcattcagaaaggcgtcgattacggagacaaagatttctatgtgtttgacatcctgtctgatagcgggaacgagaaagtttactgggatgactatcgcgtcgaatcgttttgcaccaccctcggtctgaaattagcgcctctgctgggacgtggtagtttcgctgaactgtcccagtacccaaacgatttcaaaagcattgtgaaccgttataatgaattggttgacacggtcggcctggagatggccaataaacacgtctttggtccgcaagcgtcttctgaaactggcgtagcagaaggctacgttcttaaacccgtctatccgatcttctttaataccggtacgcgcgtggcgattaaatgcaagaactccaaattttcggagaaacgtaagctggacacgcctattagtgcgaaggtggaactgacggagaacgataaacgtctgctcgaaatctttagcgagtatgttacctggaatcgcgtcagtaacgtactgtcacatattggctcagtgaccgcaaaagattttgggcgtgtttcgggtctgacgatgaaagacatcattaatgaagcagcacgcgaaggccatgatctgttgttcgctgataacccgtcggcggtgctgaaggagctgactggcctcatccagaacacgattcgctccaaatggcacgaagttctggag

SEQ ID NO: 1100 - protein, 346 aa, synthetic construct
  REGION 1..346: note = variant of RNA ligase 2 from Klebsiella phage KP179
MHHHHHHGGSNTFAYYSHLENHYNNKFIEKIRGAGFLMHTVEWVAREKIHGTNFSVIITPTEIVPAKRTGPILEGESFFGHEIIMKKYKDSFVKVQNMLNAMDLVSVQIFGEFAGGGIQKGVDYGDKDFYVFDILSDSGNEKVYWDDYRVESFCTTLGLKLAPLLGRGSFAELSQYPNDFKSIVNRYNELVDTVGLEMANKHVFGPQASSETGVAEGYVLKPVYPIFFNTGTRVAIKCKNSKFSEKRKLDTPISAKVELTENDKRLLEIFSEYVTWNRVSNVLSHIGSVTAKDFGRVSGLTMKDIINEAAREGHDLLFADNPSAVLKELTGLIQNTIRSKWHEVLE

SEQ ID NO: 1101 - DNA, 1038 bp, synthetic construct
  misc_feature 1..1038: note = variant of RNA ligase 2 from Klebsiella phage KP179
  source 1..1038: mol_type = other DNA
atgcatcaccatcaccatcacggtggcagcaacacgtttgcgtattattcaagtctggaaaaccattacaatgctaagttcattgagaagatccgtggtgcaggcttcctgatgcacaccgtggaatgggtagctcgcgagaagattcatggaacgaactttagcgttatcattactccgaccgaaatcgtcccagccaaacgcacagggccgatcttggaaggcgagtcgttctttggtcacgaaattatcatgaaaaaatataaagactccttcgtgaaggtgcagaacatgctgaatgccatggatcttgttagcgtgcaaatctttggcgaatttgcgggtggtggcattcagaaaggcgtcgattacggagacaaagatttctatgtgtttgacatcctgtctgatagcgggaacgagaaagtttactgggatgactatcgcgtcgaatcgttttgcaccactctcggtctgaaattagcgcctctgctgggacgtggtagtttcgctgaactgtcccagtacccaaacgatttcaaaagcattgtgaaccgttataatgaattggttgacacggtcggcctggagatggccaataaacacgtctttggtccgcaagcgtcttctgaaactggcgtagcagaaggctacgttcttaaacccgtctatccgatcttctttaataccggtacgcgcgtggcgattaaatgcaagaactccaaattttcggagaaagccaagctggactcgccaattagtgttagcgatgaactgacggagaacgataaacgtctgctcgaaatctttagcgagtatgttacctggaatcgcgtcagtaacgtactgtcacatattggctcagtgaccgcaaaagattttgggcgtgtttcgggtctgacgatgaaagacatcattaatgaagcagcacgcgaaggccatgatctgttgttcgctgataacccgtcggcggtgctgaaggagctgactggcctcatccagaacacgattcgctccaaatggcacgaagttctggag

SEQ ID NO: 1102 - protein, 346 aa, synthetic construct
  REGION 1..346: note = variant of RNA ligase 2 from Klebsiella phage KP179
MHHHHHHGGSNTFAYYSSLENHYNAKFIEKIRGAGFLMHTVEWVAREKIHGTNFSVIITPTEIVPAKRTGPILEGESFFGHEIIMKKYKDSFVKVQNMLNAMDLVSVQIFGEFAGGGIQKGVDYGDKDFYVFDILSDSGNEKVYWDDYRVESFCTTLGLKLAPLLGRGSFAELSQYPNDFKSIVNRYNELVDTVGLEMANKHVFGPQASSETGVAEGYVLKPVYPIFFNTGTRVAIKCKNSKFSEKAKLDSPISVSDELTENDKRLLEIFSEYVTWNRVSNVLSHIGSVTAKDFGRVSGLTMKDIINEAAREGHDLLFADNPSAVLKELTGLIQNTIRSKWHEVLE

SEQ ID NO: 1103 - DNA, 1038 bp, synthetic construct
  misc_feature 1..1038: note = variant of RNA ligase 2 from Klebsiella phage KP179
  source 1..1038: mol_type = other DNA
atgcatcaccatcaccatcacggtggcagcaacatgtttgcgtattattcaagtctggaaaaccattacaatgctaagttcattgagaagatccgtggtgcaggcttcctgatgcacaccgtggaatgggtagctcgcgagaagattcatggaacgaactttagcgttatcattactccgaccgaaatcgtcccagccaaacgcacagggccgatcttggaaggcgagtcgttctttggtcacgaaattatcatgaaaaaatataaagactccttcgtgaaggtgcagaacatgctgaatgccatggatcttgttagcgtgcaaatctttggcgaatttgcgggtggtggcattcagaaaggcgtcgattacggagacaaagatttctatgtgtttgacatcctgtctgatagcgggaacgagaaagtttactgggatgactatcgcgtcgaatcgttttgcaccactctcggtctgaaattagcgcctctgctgggacgtggtagtttcgctgaactgtcccagtacccaaacgatttcaaaagcattgtgaaccgttataatgaattggttgacacggtcggcctggagatggccaataaacacgtctttggtccgcaagcgtcttctgaaactggcgtagcagaaggctacgttcttaaacccgtctatccgatcttctttaataccggtacgcgcgtggcgattaaatgcaagaactccaaattttcggagaaagccaagctggactcgccaattagtgcgaaggatgaactgacggagaacgataaacgtctgctcgaaatctttagcgagtatgttacctggaatcgcgtcagtaacgtactgtcacatattggctcagtgaccgcaaaagattttgggcgtgtttcgggtctgacgatgaaagacatcattaatgaagcagcacgcgaaggccatgatctgttgttcgctgataacccgtcggcggtgctgaaggagctgactggcctcatccagaacacgattcgctccaaatggcacgaagttctggag

SEQ ID NO: 1104 - protein, 346 aa, synthetic construct
  REGION 1..346: note = variant of RNA ligase 2 from Klebsiella phage KP179
MHHHHHHGGSNMFAYYSSLENHYNAKFIEKIRGAGFLMHTVEWVAREKIHGTNFSVIITPTEIVPAKRTGPILEGESFFGHEIIMKKYKDSFVKVQNMLNAMDLVSVQIFGEFAGGGIQKGVDYGDKDFYVFDILSDSGNEKVYWDDYRVESFCTTLGLKLAPLLGRGSFAELSQYPNDFKSIVNRYNELVDTVGLEMANKHVFGPQASSETGVAEGYVLKPVYPIFFNTGTRVAIKCKNSKFSEKAKLDSPISAKDELTENDKRLLEIFSEYVTWNRVSNVLSHIGSVTAKDFGRVSGLTMKDIINEAAREGHDLLFADNPSAVLKELTGLIQNTIRSKWHEVLE

SEQ ID NO: 1105 - DNA, 1038 bp, synthetic construct
  misc_feature 1..1038: note = variant of RNA ligase 2 from Klebsiella phage KP179
  source 1..1038: mol_type = other DNA
atgcatcaccatcaccatcacggtggcagcaacacgtttgcgtattattcaagtctggaaaaccattacaataataagttcattgagaagatccgtggtgcaggcttcctgatgcacaccgtggaatgggtagctcgcgagaagattcatggaacgaactttagcgttatcattactccgaccgaaatcgtcccagccaaacgcacagggccgatcttggaaggcgagtcgttctttggtcacgaaattatcatgaaaaaatataaagactccttcgtgaaggtgcagaacatgctgaatgccatggatcttgttagcgtgcaaatctttggcgaatttgcgggtggtggcattcagaaaggcgtcgattacggagacaaagatttctatgtgtttgacatcctgtctgatagcgggaacgagaaagtttactgggatgactatcgcgtcgaatcgttttgcaccactctcggtctgaaattagcgcctctgctgggacgtggtagtttcgctgaactgtcccagtacccaaacgatttcaaaagcattgtgaaccgttataatgaattggttgacacggtcggcctggagatggccaataaacacgtctttggtccgcaagcgtcttctgaaactggcgtagcagaaggctacgttcttaaacccgtctatccgatcttctttaataccggtacgcgcgtggcgattaaatgcaagaactccaaattttcggagaaagccaagctggactcgccaattagttcgaaggatgaactgacggagaacgataaacgtctgctcgaaatctttagcgagtatgttacctggaatcgcgtcagtaacgtactgtcacatattggctcagtgaccgcaaaagattttgggcgtgtttcgggtctgacgatgaaagacatcattaatgaagcagcacgcgaaggccatgatctgttgttcgctgataacccgtcggcggtgctgaaggagctgactggcctcatccagaacacgattcgctccaaatggcacgaagttctggag

SEQ ID NO: 1106 - protein, 346 aa, synthetic construct
  REGION 1..346: note = variant of RNA ligase 2 from Klebsiella phage KP179
MHHHHHHGGSNTFAYYSSLENHYNNKFIEKIRGAGFLMHTVEWVAREKIHGTNFSVIITPTEIVPAKRTGPILEGESFFGHEIIMKKYKDSFVKVQNMLNAMDLVSVQIFGEFAGGGIQKGVDYGDKDFYVFDILSDSGNEKVYWDDYRVESFCTTLGLKLAPLLGRGSFAELSQYPNDFKSIVNRYNELVDTVGLEMANKHVFGPQASSETGVAEGYVLKPVYPIFFNTGTRVAIKCKNSKFSEKAKLDSPISSKDELTENDKRLLEIFSEYVTWNRVSNVLSHIGSVTAKDFGRVSGLTMKDIINEAAREGHDLLFADNPSAVLKELTGLIQNTIRSKWHEVLE

SEQ ID NO: 1107 - DNA, 1038 bp, synthetic construct
  misc_feature 1..1038: note = variant of RNA ligase 2 from Klebsiella phage KP179
  source 1..1038: mol_type = other DNA
atgcatcaccatcaccatcacggtggcagcaacatgtttgcgtattattcaagtctggaaaaccattacaatgctaagttcattgacaagatccgtggtgcaggcttcctgatgcacaccgtggaatgggtagctcgcgagaagattcatggaacgaactttagcgttatcattactccgaccgaaatcgtcccagccaaacgcacagggccgatcttggaaggcgagtcgttctttggtcacgaaattatcatgaaaaaatataaagactccttcgtgaaggtgcagaacatgctgaatgccatggatcttgttagcgtgcaaatctttggcgaatttgcgggtggtggcattcagaaaggcgtcgattacggagacaaagatttctatgtgtttgacatcctgtctgatagcgggaacgagaaagtttactgggatgactatcgcgtcgaatcgttttgcaccactctcggtctgaaattagcgcctctgctgggacgtggtagtttcgctgaactgtcccagtacccaaacgatttcaaaagcattgtgaaccgttataatgaattggttgacacggtcggcctggagatggccaataaacacgtctttggtccgcaagcgtcttctgaaactggcgtagcagaaggctacgttcttaaacccgtctatccgatcttctttaataccggtacgcgcgtggcgattaaatgcaagaactccaaattttcggagaaagccaagctggactcgccaattagttataaggatgaactgacggagaacgataaacgtctgctcgaaatctttagcgagtatgttacctggaatcgcgtcagtaacgtactgtcacatattggctcagtgaccgcaaaagattttgggcgtgtttcgggtctgacgatgaaagacatcattaatgaagcagcacgcgaaggccatgatctgttgttcgctgataacccgtcggcggtgctgaaggagctgactggcctcatccagaacacgattcgctccaaatggcacgaagttctggag

SEQ ID NO: 1108 - protein, 346 aa, synthetic construct
  REGION 1..346: note = variant of RNA ligase 2 from Klebsiella phage KP179
MHHHHHHGGSNMFAYYSSLENHYNAKFIDKIRGAGFLMHTVEWVAREKIHGTNFSVIITPTEIVPAKRTGPILEGESFFGHEIIMKKYKDSFVKVQNMLNAMDLVSVQIFGEFAGGGIQKGVDYGDKDFYVFDILSDSGNEKVYWDDYRVESFCTTLGLKLAPLLGRGSFAELSQYPNDFKSIVNRYNELVDTVGLEMANKHVFGPQASSETGVAEGYVLKPVYPIFFNTGTRVAIKCKNSKFSEKAKLDSPISYKDELTENDKRLLEIFSEYVTWNRVSNVLSHIGSVTAKDFGRVSGLTMKDIINEAAREGHDLLFADNPSAVLKELTGLIQNTIRSKWHEVLE

SEQ ID NO: 1109 - DNA, 1038 bp, synthetic construct
  misc_feature 1..1038: note = variant of RNA ligase 2 from Klebsiella phage KP179
  source 1..1038: mol_type = other DNA
atgcatcaccatcaccatcacggtggcagcaacacgtttgcgtattattcaagtctggaaaaccattacaataataagttcattgagaagatccgtggtgcaggcttcctgatgcacaccgtggaatgggtagctcgcgagaagattcatggaacgaactttagcgttatcattactccgaccgaaatcgtcccagccaaacgcacagggccgatcttggaaggcgagtcgttctttggtcacgaaattatcatgaaaaaatataaagactccttcgtgaaggtgcagaacatgctgaatgccatggatcttgttagcgtgcaaatctttggcgaatttgcgggtggtggcattcagaaaggcgtcgattacggagacaaagatttctatgtgtttgacatcctgtctgatagcgggaacgagaaagtttactgggatgactatcgcgtcgaatcgttttgcaccactctcggtctgaaattagcgcctctgctgggacgtggtagtttcgctgaactgtcccagtacccaaacgatttcaaaagcattgtgaaccgttataatgaattggttgacacggtcggcctggagatggccaataaacacgtctttggtccgcaagcgtcttctgaaactggcgtagcagaaggctacgttcttaaacccgtctatccgatcttctttaataccggtacgcgcgtggcgattaaatgcaagaactccaaattttcggagaaagccaagctggactcgccaattagtgcgagcgatgaactgacggagaacgataaacgtctgctcgaaatctttagcgagtatgttacctggaatcgcgtcagtaacgtactgtcacatattggctcagtgaccgcaaaagattttgggcgtgtttcgggtctgacgatgaaagacatcattaatgaagcagcacgcgaaggccatgatctgttgttcgctgataacccgtcggcggtgctgaaggagctgactggcctcatccagaacacgattcgctccaaatggcacgaagttctggag

SEQ ID NO: 1110 - protein, 346 aa, synthetic construct
  REGION 1..346: note = variant of RNA ligase 2 from Klebsiella phage KP179
MHHHHHHGGSNTFAYYSSLENHYNNKFIEKIRGAGFLMHTVEWVAREKIHGTNFSVIITPTEIVPAKRTGPILEGESFFGHEIIMKKYKDSFVKVQNMLNAMDLVSVQIFGEFAGGGIQKGVDYGDKDFYVFDILSDSGNEKVYWDDYRVESFCTTLGLKLAPLLGRGSFAELSQYPNDFKSIVNRYNELVDTVGLEMANKHVFGPQASSETGVAEGYVLKPVYPIFFNTGTRVAIKCKNSKFSEKAKLDSPISASDELTENDKRLLEIFSEYVTWNRVSNVLSHIGSVTAKDFGRVSGLTMKDIINEAAREGHDLLFADNPSAVLKELTGLIQNTIRSKWHEVLE

SEQ ID NO: 1111 - DNA, 1038 bp, synthetic construct
  misc_feature 1..1038: note = variant of RNA ligase 2 from Klebsiella phage KP179
  source 1..1038: mol_type = other DNA
atgcatcaccatcaccatcacggtggcagcaacatgtttgcgtattattcaagtctggaaaaccattacaataataagttcattgagaagatccgtggtgcaggcttcctgatgcacaccgtggaatgggtagctcgcgagaagattcatggaacgaactttagcgttatcattactccgaccgaaatcgtcccagccaaacgcacagggccgatcttggaaggcgagtcgttctttggtcacgaaattatcatgaaaaaatataaagactccttcgtgaaggtgcagaacatgctgaatgccatggatcttgttagcgtgcaaatctttggcgaatttgcgggtggtggcattcagaaaggcgtcgattacggagacaaagatttctatgtgtttgacatcctgtctgatagcgggaacgagaaagtttactgggatgactatcgcgtcgaatcgttttgcaccactctcggtctgaaattagcgcctctgctgggacgtggtagtttcgctgaactgtcccagtacccaaacgatttcaaaagcattgtgaaccgttataatgaattggttgacacggtcggcctggagatggccaataaacacgtctttggtccgcaagcgtcttctgaaactggcgtagcagaaggctacgttcttaaacccgtctatccgatcttctttaataccggtacgcgcgtggcgattaaatgcaagaactccaaattttcggagaaagccaagctggactcgccaattagttcgaaggatgaactgacggagaacgataaacgtctgctcgaaatctttagcgagtatgttacctggaatcgcgtcagtaacgtactgtcacatattggctcagtgaccgcaaaagattttgggcgtgtttcgggtctgacgatgaaagacatcattaatgaagcagcacgcgaaggccatgatctgttgttcgctgataacccgtcggcggtgctgaaggagctgactggcctcatccagaacacgattcgctccaaatggcacgaagttctggag

SEQ ID NO: 1112 - protein, 346 aa, synthetic construct
  REGION 1..346: note = variant of RNA ligase 2 from Klebsiella phage KP179
MHHHHHHGGSNMFAYYSSLENHYNNKFIEKIRGAGFLMHTVEWVAREKIHGTNFSVIITPTEIVPAKRTGPILEGESFFGHEIIMKKYKDSFVKVQNMLNAMDLVSVQIFGEFAGGGIQKGVDYGDKDFYVFDILSDSGNEKVYWDDYRVESFCTTLGLKLAPLLGRGSFAELSQYPNDFKSIVNRYNELVDTVGLEMANKHVFGPQASSETGVAEGYVLKPVYPIFFNTGTRVAIKCKNSKFSEKAKLDSPISSKDELTENDKRLLEIFSEYVTWNRVSNVLSHIGSVTAKDFGRVSGLTMKDIINEAAREGHDLLFADNPSAVLKELTGLIQNTIRSKWHEVLE

SEQ ID NO: 1113 - DNA, 1038 bp, synthetic construct
  misc_feature 1..1038: note = variant of RNA ligase 2 from Klebsiella phage KP179
  source 1..1038: mol_type = other DNA
atgcatcaccatcaccatcacggtggcagcaacatgtttgcgtattattcaagtctggaaaaccattacaataataagttcattgagaagatccgtggtgcaggcttcctgatgcacaccgtggaatgggtagctcgcgagaagattcatggaacgaactttagcgttatcattactccgaccgaaatcgtcccagccaaacgcacagggccgatcttggaaggcgagtcgttctttggtcacgaaattatcatgaaaaaatataaagactccttcgtgaaggtgcagaacatgctgaatgccatggatcttgttagcgtgcaaatctttggcgaatttgcgggtggtggcattcagaaaggcgtcgattacggagacaaagatttctatgtgtttgacatcctgtctgatagcgggaacgagaaagtttactgggatgactatcgcgtcgaatcgttttgcaccggtctcggtctgaaattagcgcctctgctgggacgtggtagtttcgctgaactgtcccagtacccaaacgatttcaaaagcattgtgaaccgttataatgaattggttgacacggtcggcctggagatggccaataaacacgtctttggtccgcaagcgtcttctgaaactggcgtagcagaaggctacgttcttaaacccgtctatccgatcttctttaataccggtacgcgcgtggcgattaaatgcaagaactccaaattttcggagaaagccaagctggactcgccaattagtaatagcgatgaactgacggagaacgataaacgtctgctcgaaatctttagcgagtatgttacctggaatcgcgtcagtaacgtactgtcacatattggctcagtgaccgcaaaagattttgggcgtgtttcgggtctgacgatgaaagacatcattaatgaagcagcacgcgaaggccatgatctgttgttcgctgataacccgtcggcggtgctgaaggagctgactggcctcatccagaacacgattcgctccaaatggcacgaagttctggag

SEQ ID NO: 1114 - protein, 346 aa, synthetic construct
  REGION 1..346: note = variant of RNA ligase 2 from Klebsiella phage KP179
MHHHHHHGGSNMFAYYSSLENHYNNKFIEKIRGAGFLMHTVEWVAREKIHGTNFSVIITPTEIVPAKRTGPILEGESFFGHEIIMKKYKDSFVKVQNMLNAMDLVSVQIFGEFAGGGIQKGVDYGDKDFYVFDILSDSGNEKVYWDDYRVESFCTGLGLKLAPLLGRGSFAELSQYPNDFKSIVNRYNELVDTVGLEMANKHVFGPQASSETGVAEGYVLKPVYPIFFNTGTRVAIKCKNSKFSEKAKLDSPISNSDELTENDKRLLEIFSEYVTWNRVSNVLSHIGSVTAKDFGRVSGLTMKDIINEAAREGHDLLFADNPSAVLKELTGLIQNTIRSKWHEVLE

SEQ ID NO: 1115 - DNA, 1038 bp, synthetic construct
  misc_feature 1..1038: note = variant of RNA ligase 2 from Klebsiella phage KP179
  source 1..1038: mol_type = other DNA
atgcatcaccatcaccatcacggtggcagcaacacgtttgcgtattattcaagtctggaaaaccattacaatgctaagttcattgagaagatccgtggtgcaggcttcctgatgcacaccgtggaatgggtagctcgcgagaagattcatggaacgaactttagcgttatcattactccgaccgaaatcgtcccagccaaacgcacagggccgatcttggaaggcgagtcgttctttggtcacgaaattatcatgaaaaaatataaagactccttcgtgaaggtgcagaacatgctgaatgccatggatcttgttagcgtgcaaatctttggcgaatttgcgggtggtggcattcagaaaggcgtcgattacggagacaaagatttctatgtgtttgacatcctgtctgatagcgggaacgagaaagtttactgggatgactatcgcgtcgaatcgttttgcaccactctcggtctgaaattagcgcctctgctgggacgtggtagtttcgctgaactgtcccagtacccaaacgatttcaaaagcattgtgaaccgttataatgaattggttgacacggtcggcctggagatggccaataaacacgtctttggtccgcaagcgtcttctgaaactggcgtagcagaaggctacgttcttaaacccgtctatccgatcttctttaataccggtacgcgcgtggcgattaaatgcaagaactccaaattttcggagaaagccaagctggactcgccaattagtgcgaaggtggaactgacggagaacgataaacgtctgctcgaaatctttagcgagtatgttacctggaatcgcgtcagtaacgtactgtcacatattggctcagtgaccgcaaaagattttgggcgtgtttcgggtctgacgatgaaagacatcattaatgaagcagcacgcgaaggccatgatctgttgttcgctgataacccgtcggcggtgctgaaggagctgactggcctcatccagaacacgattcgctccaaatggcacgaagttctggag

SEQ ID NO: 1116 - protein, 346 aa, synthetic construct
  REGION 1..346: note = variant of RNA ligase 2 from Klebsiella phage KP179
MHHHHHHGGSNTFAYYSSLENHYNAKFIEKIRGAGFLMHTVEWVAREKIHGTNFSVIITPTEIVPAKRTGPILEGESFFGHEIIMKKYKDSFVKVQNMLNAMDLVSVQIFGEFAGGGIQKGVDYGDKDFYVFDILSDSGNEKVYWDDYRVESFCTTLGLKLAPLLGRGSFAELSQYPNDFKSIVNRYNELVDTVGLEMANKHVFGPQASSETGVAEGYVLKPVYPIFFNTGTRVAIKCKNSKFSEKAKLDSPISAKVELTENDKRLLEIFSEYVTWNRVSNVLSHIGSVTAKDFGRVSGLTMKDIINEAAREGHDLLFADNPSAVLKELTGLIQNTIRSKWHEVLE

SEQ ID NO: 1117 - DNA, 1038 bp, synthetic construct
  misc_feature 1..1038: note = variant of RNA ligase 2 from Klebsiella phage KP179
  source 1..1038: mol_type = other DNA
atgcatcaccatcaccatcacggtggcagcaacacgtttgcgtattattcacacctggaaaaccattacaataataagttcattgagaagatccgtggtgcaggcttcctggaacacaccgtggaatgggtagctcgcgagaagattcatggaacgaactttagcgttatcattactccgaccgaaatcgtcccagccaaacgcacagggccgatcttggaaggcgagtcgttctttggtcacgaaattatcatgaaaaaatataaagactccttcgtgaaggtgcagaacatgctgaatgccatggatcttgttagcgtgcaaatctttggcgaatttgcgggtggtggcattcagaaaggcgtcgattacggagacaaagatttctatgtgtttgacatcctgtctgatagcgggaacgagaaagtttactgggatgactatcgcgtcgaatcgttttgcaccaccctcggtctgaaattagcgcctctgctgggacgtggtagtttcgctgaactgtcccagtacccaaacgatttcaaaagcattgtgaaccgttataatgaattggttgacacggtcggcctggagatggccaataaacacgtctttggtccgcaagcgtcttctgaaactggcgtagcagaaggctacgttcttaaacccgtctatccgatcttctttaataccggtacgcgcgtggcgattaaatgcaagaactccaaattttcggagaaagcgaagctggacacggctattagtgcgaaggtggaactgacggagaacgataaacgtctgctcgaaatctttagcgagtatgttacctggaatcgcgtcagtaacgtactgtcacatattggctcagtgaccgcaaaagattttgggcgtgtttcgggtctgacgatgaaagacatcattaatgaagcagcacgcgaaggccatgatctgttgttcgctgataacccgtcggcggtgctgaaggagctgactggcctcatccagaacacgattcgctccaaatggcacgaagttctggag

SEQ ID NO: 1118 - protein, 346 aa, synthetic construct
  REGION 1..346: note = variant of RNA ligase 2 from Klebsiella phage KP179
MHHHHHHGGSNTFAYYSHLENHYNNKFIEKIRGAGFLEHTVEWVAREKIHGTNFSVIITPTEIVPAKRTGPILEGESFFGHEIIMKKYKDSFVKVQNMLNAMDLVSVQIFGEFAGGGIQKGVDYGDKDFYVFDILSDSGNEKVYWDDYRVESFCTTLGLKLAPLLGRGSFAELSQYPNDFKSIVNRYNELVDTVGLEMANKHVFGPQASSETGVAEGYVLKPVYPIFFNTGTRVAIKCKNSKFSEKAKLDTAISAKVELTENDKRLLEIFSEYVTWNRVSNVLSHIGSVTAKDFGRVSGLTMKDIINEAAREGHDLLFADNPSAVLKELTGLIQNTIRSKWHEVLE

SEQ ID NO: 1119 - DNA, 1038 bp, synthetic construct
  misc_feature 1..1038: note = variant of RNA ligase 2 from Klebsiella phage KP179
  source 1..1038: mol_type = other DNA
atgcatcaccatcaccatcacggtggcagcaacatgtttgcgtattattcaagtctggaaaaccattacaataataagttcattgagaagatccgtggtgcaggcttcctgatgcacaccgtggaatgggtagctcgcgagaagattcatggaacgaactttagcgttatcattactccgaccgaaatcgtcccagccaaacgcacagggccgatcttggaaggcgagtcgttctttggtcacgaaattatcatgaaaaaatataaagactccttcgtgaaggtgcagaacatgctgaatgccatggatcttgttagcgtgcaaatctttggcgaatttgcgggtggtggcattcagaaaggcgtcgattacggagacaaagatttctatgtgtttgacatcctgtctgatagcgggaacgagaaagtttactgggatgactatcgcgtcgaatcgttttgcaccactctcggtctgaaattagcgcctctgctgggacgtggtagtttcgctgaactgtcccagtacccaaacgatttcaaaagcattgtgaaccgttataatgaattggttgacacggtcggcctggagatggccaataaacacgtctttggtccgcaagcgtcttctgaaactggcgtagcagaaggctacgttcttaaacccgtctatccgatcttctttaataccggtacgcgcgtggcgattaaatgcaagaactccaaattttcggagaaagccaagctggactcgccaattagtgcgagcgatgaactgacggacaacgataaacgtctgctcgaaatctttagcgagtatgttacctggaatcgcgtcagtaacgtactgtcacatattggctcagtgaccgcaaaagattttgggcgtgtttcgggtctgacgatgaaagacatcattaatgaagcagcacgcgaaggccatgatctgttgttcgctgataacccgtcggcggtgctgaaggagctgactggcctcatccagaacacgattcgctccaaatggcacgaagttctggag

SEQ ID NO: 1120 - protein, 346 aa, synthetic construct
  REGION 1..346: note = variant of RNA ligase 2 from Klebsiella phage KP179
MHHHHHHGGSNMFAYYSSLENHYNNKFIEKIRGAGFLMHTVEWVAREKIHGTNFSVIITPTEIVPAKRTGPILEGESFFGHEIIMKKYKDSFVKVQNMLNAMDLVSVQIFGEFAGGGIQKGVDYGDKDFYVFDILSDSGNEKVYWDDYRVESFCTTLGLKLAPLLGRGSFAELSQYPNDFKSIVNRYNELVDTVGLEMANKHVFGPQASSETGVAEGYVLKPVYPIFFNTGTRVAIKCKNSKFSEKAKLDSPISASDELTDNDKRLLEIFSEYVTWNRVSNVLSHIGSVTAKDFGRVSGLTMKDIINEAAREGHDLLFADNPSAVLKELTGLIQNTIRSKWHEVLE

SEQ ID NO: 1121 - DNA, 1038 bp, synthetic construct
  misc_feature 1..1038: note = variant of RNA ligase 2 from Klebsiella phage KP179
  source 1..1038: mol_type = other DNA
atgcatcaccatcaccatcacggtggcagcaacatgtttgcgtattattcaagtctggaaaaccattacaataataagttcattgacaagatccgtggtgcaggcttcctgatgcacaccgtggaatgggtagctcgcgagaagattcatggaacgaactttagcgttatcattactccgaccgaaatcgtcccagccaaacgcacagggccgatcttggaaggcgagtcgttctttggtcacgaaattatcatgaaaaaatataaagactccttcgtgaaggtgcagaacatgctgaatgccatggatcttgttagcgtgcaaatctttggcgaatttgcgggtggtggcattcagaaaggcgtcgattacggagacaaagatttctatgtgtttgacatcctgtctgatagcgggaacgagaaagtttactgggatgactatcgcgtcgaatcgttttgcaccactctcggtctgaaattagcgcctctgctgggacgtggtagtttcgctgaactgtcccagtacccaaacgatttcaaaagcattgtgaaccgttataatgaattggttgacacggtcggcctggagatggccaataaacacgtctttggtccgcaagcgtcttctgaaactggcgtagcagaaggctacgttcttaaacccgtctatccgatcttctttaataccggtacgcgcgtggcgattaaatgcaagaactccaaattttcggagaaagccaagctggactcgccaattagtgcgaaggttgaactgacggagaacgataaacgtctgctcgaaatctttagcgagtatgttacctggaatcgcgtcagtaacgtactgtcacatattggctcagtgaccgcaaaagattttgggcgtgtttcgggtctgacgatgaaagacatcattaatgaagcagcacgcgaaggccatgatctgttgttcgctgataacccgtcggcggtgctgaaggagctgactggcctcatccagaacacgattcgctccaaatggcacgaagttctggag

SEQ ID NO: 1122 - protein, 346 aa, synthetic construct
  REGION 1..346: note = variant of RNA ligase 2 from Klebsiella phage KP179
MHHHHHHGGSNMFAYYSSLENHYNNKFIDKIRGAGFLMHTVEWVAREKIHGTNFSVIITPTEIVPAKRTGPILEGESFFGHEIIMKKYKDSFVKVQNMLNAMDLVSVQIFGEFAGGGIQKGVDYGDKDFYVFDILSDSGNEKVYWDDYRVESFCTTLGLKLAPLLGRGSFAELSQYPNDFKSIVNRYNELVDTVGLEMANKHVFGPQASSETGVAEGYVLKPVYPIFFNTGTRVAIKCKNSKFSEKAKLDSPISAKVELTENDKRLLEIFSEYVTWNRVSNVLSHIGSVTAKDFGRVSGLTMKDIINEAAREGHDLLFADNPSAVLKELTGLIQNTIRSKWHEVLE

SEQ ID NO: 1123 - DNA, 1038 bp, synthetic construct
  misc_feature 1..1038: note = variant of RNA ligase 2 from Klebsiella phage KP179
  source 1..1038: mol_type = other DNA
atgcatcaccatcaccatcacggtggcagcaacatgtttgcgtattattcaagtctggaaaaccattacaatgctaagttcattgagaagatccgtggtgcaggcttcctgatgcacaccgtggaatgggtagctcgcgagaagattcatggaacgaactttagcgttatcattactccgaccgaaatcgtcccagccaaacgcacagggccgatcttggaaggcgagtcgttctttggtcacgaaattatcatgaaaaaatataaagactccttcgtgaaggtgcagaacatgctgaatgccatggatcttgttagcgtgcaaatctttggcgaatttgcgggtggtggcattcagaaaggcgtcgattacggagacaaagatttctatgtgtttgacatcctgtctgatagcgggaacgagaaagtttactgggatgactatcgcgtcgaatcgttttgcaccactctcggtctgaaattagcgcctctgctgggacgtggtagtttcgctgaactgtcccagtacccaaacgatttcaaaagcattgtgaaccgttataatgaattggttgacacggtcggcctggagatggccaataaacacgtctttggtccgcaagcgtcttctgaaactggcgtagcagaaggctacgttcttaaacccgtctatccgatcttctttaataccggtacgcgcgtggcgattaaatgcaagaactccaaattttcggagaaagccaagctggactcgccaattagtgttagcgatgaactgacggacaacgataaacgtctgctcgaaatctttagcgagtatgttacctggaatcgcgtcagtaacgtactgtcacatattggctcagtgaccgcaaaagattttgggcgtgtttcgggtctgacgatgaaagacatcattaatgaagcagcacgcgaaggccatgatctgttgttcgctgataacccgtcggcggtgctgaaggagctgactggcctcatccagaacacgattcgctccaaatggcacgaagttctggag

SEQ ID NO: 1124 - protein, 346 aa, synthetic construct
  REGION 1..346: note = variant of RNA ligase 2 from Klebsiella phage KP179
MHHHHHHGGSNMFAYYSSLENHYNAKFIEKIRGAGFLMHTVEWVAREKIHGTNFSVIITPTEIVPAKRTGPILEGESFFGHEIIMKKYKDSFVKVQNMLNAMDLVSVQIFGEFAGGGIQKGVDYGDKDFYVFDILSDSGNEKVYWDDYRVESFCTTLGLKLAPLLGRGSFAELSQYPNDFKSIVNRYNELVDTVGLEMANKHVFGPQASSETGVAEGYVLKPVYPIFFNTGTRVAIKCKNSKFSEKAKLDSPISVSDELTDNDKRLLEIFSEYVTWNRVSNVLSHIGSVTAKDFGRVSGLTMKDIINEAAREGHDLLFADNPSAVLKELTGLIQNTIRSKWHEVLE

SEQ ID NO: 1125 - DNA, 1038 bp, synthetic construct
  misc_feature 1..1038: note = variant of RNA ligase 2 from Klebsiella phage KP179
  source 1..1038: mol_type = other DNA
atgcatcaccatcaccatcacggtggcagcaacacgtttgcgtattattcaagtctggaaaaccattacaataataagttcattgagaagatccgtggtgcaggcttcctggaacacaccgtggaatgggtagctcgcgagaagattcatggaacgaactttagcgttatcattactccgaccgaaatcgtcccagccaaacgcacagggccgatcttggaaggcgagtcgttctttggtcacgaaattatcatgaaaaaatataaagactccttcgtgaaggtgcagaacatgctgaatgccatggatcttgttagcgtgcaaatctttggcgaatttgcgggtggtggcattcagaaaggcgtcgattacggagacaaagatttctatgtgtttgacatcctgtctgatagcgggaacgagaaagtttactgggatgactatcgcgtcgaatcgttttgcaccactctcggtctgaaattagcgcctctgctgggacgtggtagtttcgctgaactgtcccagtacccaaacgatttcaaaagcattgtgaaccgttataatgaattggttgacacggtcggcctggagatggccaataaacacgtctttggtccgcaagcgtcttctgaaactggcgtagcagaaggctacgttcttaaacccgtctatccgatcttctttaataccggtacgcgcgtggcgattaaatgcaagaactccaaattttcggagaaagccaagctggactcgccaattagtgcgaaggtggaactgacggagaacgataaacgtctgctcgaaatctttagcgagtatgttacctggaatcgcgtcagtaacgtactgtcacatattggctcagtgaccgcaaaagattttgggcgtgtttcgggtctgacgatgaaagacatcattaatgaagcagcacgcgaaggccatgatctgttgttcgctgataacccgtcggcggtgctgaaggagctgactggcctcatccagaacacgattcgctccaaatggcacgaagttctggag

SEQ ID NO: 1126 - protein, 346 aa, synthetic construct
  REGION 1..346: note = variant of RNA ligase 2 from Klebsiella phage KP179
MHHHHHHGGSNTFAYYSSLENHYNNKFIEKIRGAGFLEHTVEWVAREKIHGTNFSVIITPTEIVPAKRTGPILEGESFFGHEIIMKKYKDSFVKVQNMLNAMDLVSVQIFGEFAGGGIQKGVDYGDKDFYVFDILSDSGNEKVYWDDYRVESFCTTLGLKLAPLLGRGSFAELSQYPNDFKSIVNRYNELVDTVGLEMANKHVFGPQASSETGVAEGYVLKPVYPIFFNTGTRVAIKCKNSKFSEKAKLDSPISAKVELTENDKRLLEIFSEYVTWNRVSNVLSHIGSVTAKDFGRVSGLTMKDIINEAAREGHDLLFADNPSAVLKELTGLIQNTIRSKWHEVLE

SEQ ID NO: 1127 - DNA, 1038 bp, synthetic construct
  misc_feature 1..1038: note = variant of RNA ligase 2 from Klebsiella phage KP179
  source 1..1038: mol_type = other DNA
atgcatcaccatcaccatcacggtggcagcaacatgtttgcgtattattcaagtctggaaaaccattacaatgctaagttcattgacaagatccgtggtgcaggcttcctgatgcacaccgtggaatgggtagctcgcgagaagattcatggaacgaactttagcgttatcattactccgaccgaaatcgtcccagccaaacgcacagggccgatcttggaaggcgagtcgttctttggtcacgaaattatcatgaaaaaatataaagactccttcgtgaaggtgcagaacatgctgaatgccatggatcttgttagcgtgcaaatctttggcgaatttgcgggtggtggcattcagaaaggcgtcgattacggagacaaagatttctatgtgtttgacatcctgtctgatagcgggaacgagaaagtttactgggatgactatcgcgtcgaatcgttttgcaccactctcggtctgaaattagcgcctctgctgggacgtggtagtttcgctgaactgtcccagtacccaaacgatttcaaaagcattgtgaaccgttataatgaattggttgacacggtcggcctggagatggccaataaacacgtctttggtccgcaagcgtcttctgaaactggcgtagcagaaggctacgttcttaaacccgtctatccgatcttctttaataccggtacgcgcgtggcgattaaatgcaagaactccaaattttcggagaaagccaagctggactcgccaattagtgcgagcgatgaactgacggagaacgataaacgtctgctcgaaatctttagcgagtatgttacctggaatcgcgtcagtaacgtactgtcacatattggctcagtgaccgcaaaagattttgggcgtgtttcgggtctgacgatgaaagacatcattaatgaagcagcacgcgaaggccatgatctgttgttcgctgataacccgtcggcggtgctgaaggagctgactggcctcatccagaacacgattcgctccaaatggcacgaagttctggag

SEQ ID NO: 1128 - protein, 346 aa, synthetic construct
  REGION 1..346: note = variant of RNA ligase 2 from Klebsiella phage KP179
MHHHHHHGGSNMFAYYSSLENHYNAKFIDKIRGAGFLMHTVEWVAREKIHGTNFSVIITPTEIVPAKRTGPILEGESFFGHEIIMKKYKDSFVKVQNMLNAMDLVSVQIFGEFAGGGIQKGVDYGDKDFYVFDILSDSGNEKVYWDDYRVESFCTTLGLKLAPLLGRGSFAELSQYPNDFKSIVNRYNELVDTVGLEMANKHVFGPQASSETGVAEGYVLKPVYPIFFNTGTRVAIKCKNSKFSEKAKLDSPISASDELTENDKRLLEIFSEYVTWNRVSNVLSHIGSVTAKDFGRVSGLTMKDIINEAAREGHDLLFADNPSAVLKELTGLIQNTIRSKWHEVLE

SEQ ID NO: 1129 - DNA, 1038 bp, synthetic construct
  misc_feature 1..1038: note = variant of RNA ligase 2 from Klebsiella phage KP179
  source 1..1038: mol_type = other DNA
atgcatcaccatcaccatcacggtggcagcaacacgtttgcgtattattcaagtctggaaaaccattacaataataagttcattgacaagatccgtggtgcaggcttcctgatgcacaccgtggaatgggtagctcgcgagaagattcatggaacgaactttagcgttatcattactccgaccgaaatcgtcccagccaaacgcacagggccgatcttggaaggcgagtcgttctttggtcacgaaattatcatgaaaaaatataaagactccttcgtgaaggtgcagaacatgctgaatgccatggatcttgttagcgtgcaaatctttggcgaatttgcgggtggtggcattcagaaaggcgtcgattacggagacaaagatttctatgtgtttgacatcctgtctgatagcgggaacgagaaagtttactgggatgactatcgcgtcgaatcgttttgcaccactctcggtctgaaattagcgcctctgctgggacgtggtagtttcgctgaactgtcccagtacccaaacgatttcaaaagcattgtgaaccgttataatgaattggttgacacggtcggcctggagatggccaataaacacgtctttggtccgcaagcgtcttctgaaactggcgtagcagaaggctacgttcttaaacccgtctatccgatcttctttaataccggtacgcgcgtggcgattaaatgcaagaactccaaattttcggagaaagccaagctggactcgccaattagtgcgaaggatgaactgacggagaacgataaacgtctgctcgaaatctttagcgagtatgttacctggaatcgcgtcagtaacgtactgtcacatattggctcagtgaccgcaaaagattttgggcgtgtttcgggtctgacgatgaaagacatcattaatgaagcagcacgcgaaggccatgatctgttgttcgctgataacccgtcggcggtgctgaaggagctgactggcctcatccagaacacgattcgctccaaatggcacgaagttctggag

SEQ ID NO: 1130 - protein, 346 aa, synthetic construct
  REGION 1..346: note = variant of RNA ligase 2 from Klebsiella phage KP179
MHHHHHHGGSNTFAYYSSLENHYNNKFIDKIRGAGFLMHTVEWVAREKIHGTNFSVIITPTEIVPAKRTGPILEGESFFGHEIIMKKYKDSFVKVQNMLNAMDLVSVQIFGEFAGGGIQKGVDYGDKDFYVFDILSDSGNEKVYWDDYRVESFCTTLGLKLAPLLGRGSFAELSQYPNDFKSIVNRYNELVDTVGLEMANKHVFGPQASSETGVAEGYVLKPVYPIFFNTGTRVAIKCKNSKFSEKAKLDSPISAKDELTENDKRLLEIFSEYVTWNRVSNVLSHIGSVTAKDFGRVSGLTMKDIINEAAREGHDLLFADNPSAVLKELTGLIQNTIRSKWHEVLE

SEQ ID NO: 1131 - DNA, 1038 bp, synthetic construct
  misc_feature 1..1038: note = variant of RNA ligase 2 from Klebsiella phage KP179
  source 1..1038: mol_type = other DNA
atgcatcaccatcaccatcacggtggcagcaacatgtttgcgtattattcaagtctggaaaaccattacaataataagttcattgagaagatccgtggtgcaggcttcctgatgcacaccgtggaatgggtagctcgcgagaagattcatggaacgaactttagcgttatcattactccgaccgaaatcgtcccagccaaacgcacagggccgatcttggaaggcgagtcgttctttggtcacgaaattatcatgaaaaaatataaagactccttcgtgaaggtgcagaacatgctgaatgccatggatcttgttagcgtgcaaatctttggcgaatttgcgggtggtggcattcagaaaggcgtcgattacggagacaaagatttctatgtgtttgacatcctgtctgatagcgggaacgagaaagtttactgggatgactatcgcgtcgaatcgttttgcaccactctcggtctgaaattagcgcctctgctgggacgtggtagtttcgctgaactgtcccagtacccaaacgatttcaaaagcattgtgaaccgttataatgaattggttgacacggtcggcctggagatggccaataaacacgtctttggtccgcaagcgtcttctgaaactggcgtagcagaaggctacgttcttaaacccgtctatccgatcttctttaataccggtacgcgcgtggcgattaaatgcaagaactccaaattttcggagaaagccaagctggactcgccaattagtgcgaaggtggaactgacggacaacgataaacgtctgctcgaaatctttagcgagtatgttacctggaatcgcgtcagtaacgtactgtcacatattggctcagtgaccgcaaaagattttgggcgtgtttcgggtctgacgatgaaagacatcattaatgaagcagcacgcgaaggccatgatctgttgttcgctgataacccgtcggcggtgctgaaggagctgactggcctcatccagaacacgattcgctccaaatggcacgaagttctggag

SEQ ID NO: 1132 - protein, 346 aa, synthetic construct
  REGION 1..346: note = variant of RNA ligase 2 from Klebsiella phage KP179
MHHHHHHGGSNMFAYYSSLENHYNNKFIEKIRGAGFLMHTVEWVAREKIHGTNFSVIITPTEIVPAKRTGPILEGESFFGHEIIMKKYKDSFVKVQNMLNAMDLVSVQIFGEFAGGGIQKGVDYGDKDFYVFDILSDSGNEKVYWDDYRVESFCTTLGLKLAPLLGRGSFAELSQYPNDFKSIVNRYNELVDTVGLEMANKHVFGPQASSETGVAEGYVLKPVYPIFFNTGTRVAIKCKNSKFSEKAKLDSPISAKVELTDNDKRLLEIFSEYVTWNRVSNVLSHIGSVTAKDFGRVSGLTMKDIINEAAREGHDLLFADNPSAVLKELTGLIQNTIRSKWHEVLE

SEQ ID NO: 1133 - DNA, 1038 bp, synthetic construct
  misc_feature 1..1038: note = variant of RNA ligase 2 from Klebsiella phage KP179
  source 1..1038: mol_type = other DNA
atgcatcaccatcaccatcacggtggcagcaacacgtttgcgtattattcaagtctggaaaaccattacaataataagttcattgagaagatccgtggtgcaggcttcctgatgcacaccgtggaatgggtagctcgcgagaagattcatggaacgaactttagcgttatcattactccgaccgaaatcgtcccagccaaacgcacagggccgatcttggaaggcgagtcgttctttggtcacgaaattatcatgaaaaaatataaagactccttcgtgaaggtgcagaacatgctgaatgccatggatcttgttagcgtgcaaatctttggcgaatttgcgggtggtggcattcagaaaggcgtcgattacggagacaaagatttctatgtgtttgacatcctgtctgatagcgggaacgagaaagtttactgggatgactatcgcgtcgaatcgttttgcaccaccctcggtctgaaattagcgcctctgctgggacgtggtagtttcgctgaactgtcccagtacccaaacgatttcaaaagcattgtgaaccgttataatgaattggttgacacggtcggcctggagatggccaataaacacgtctttggtccgcaagcgtcttctgaaactggcgtagcagaaggctacgttcttaaacccgtctatccgatcttctttaataccggtacgcgcgtggcgattaaatgcaagaactccaaattttcggagaaagcgaagctggacacgcctattagtgcgaaggtggaactgacggagaacgataaacgtctgctcgaaatctttagcgagtatgttacctggaatcgcgtcagtaacgtactgtcacatattggctcagtgaccgcaaaagattttgggcgtgtttcgggtctgacgatgaaagacatcattaatgaagcagcacgcgaaggccatgatctgttgttcgctgataacccgtcggcggtgctgaaggagctgactggcctcatccagaacacgattcgctccaaatggcacgaagttctggag

SEQ ID NO: 1134 - protein, 346 aa, synthetic construct
  REGION 1..346: note = variant of RNA ligase 2 from Klebsiella phage KP179
MHHHHHHGGSNTFAYYSSLENHYNNKFIEKIRGAGFLMHTVEWVAREKIHGTNFSVIITPTEIVPAKRTGPILEGESFFGHEIIMKKYKDSFVKVQNMLNAMDLVSVQIFGEFAGGGIQKGVDYGDKDFYVFDILSDSGNEKVYWDDYRVESFCTTLGLKLAPLLGRGSFAELSQYPNDFKSIVNRYNELVDTVGLEMANKHVFGPQASSETGVAEGYVLKPVYPIFFNTGTRVAIKCKNSKFSEKAKLDTPISAKVELTENDKRLLEIFSEYVTWNRVSNVLSHIGSVTAKDFGRVSGLTMKDIINEAAREGHDLLFADNPSAVLKELTGLIQNTIRSKWHEVLE

SEQ ID NO: 1135 - DNA, 1038 bp, synthetic construct
  misc_feature 1..1038: note = variant of RNA ligase 2 from Klebsiella phage KP179
  source 1..1038: mol_type = other DNA
atgcatcaccatcaccatcacggtggcagcaacatgtttgcgtattattcaagtctggaaaaccattacaataataagttcattgagaagatccgtggtgcaggcttcctgatgcacaccgtggaatgggtagctcgcgagaagattcatggaacgaactttagcgttatcattactccgaccgaaatcgtcccagccaaacgcacagggccgatcttggaaggcgagtcgttctttggtcacgaaattatcatgaaaaaatataaagactccttcgtgaaggtgcagaacatgctgaatgccatggatcttgttagcgtgcaaatctttggcgaatttgcgggtggtggcattcagaaaggcgtcgattacggagacaaagatttctatgtgtttgacatcctgtctgatagcgggaacgagaaagtttactgggatgactatcgcgtcgaatcgttttgcaccggtctcggtctgaaattagcgcctctgctgggacgtggtagtttcgctgaactgtcccagtacccaaacgatttcaaaagcattgtgaaccgttataatgaattggttgacacggtcggcctggagatggccaataaacacgtctttggtccgcaagcgtcttctgaaactggcgtagcagaaggctacgttcttaaacccgtctatccgatcttctttaataccggtacgcgcgtggcgattaaatgcaagaactccaaattttcggagaaagccaagctggactcgccaattagtaataaggttgaactgacggagaacgataaacgtctgctcgaaatctttagcgagtatgttacctggaatcgcgtcagtaacgtactgtcacatattggctcagtgaccgcaaaagattttgggcgtgtttcgggtctgacgatgaaagacatcattaatgaagcagcacgcgaaggccatgatctgttgttcgctgataacccgtcggcggtgctgaaggagctgactggcctcatccagaacacgattcgctccaaatggcacgaagttctggag

SEQ ID NO: 1136 - protein, 346 aa, synthetic construct
  REGION 1..346: note = variant of RNA ligase 2 from Klebsiella phage KP179
MHHHHHHGGSNMFAYYSSLENHYNNKFIEKIRGAGFLMHTVEWVAREKIHGTNFSVIITPTEIVPAKRTGPILEGESFFGHEIIMKKYKDSFVKVQNMLNAMDLVSVQIFGEFAGGGIQKGVDYGDKDFYVFDILSDSGNEKVYWDDYRVESFCTGLGLKLAPLLGRGSFAELSQYPNDFKSIVNRYNELVDTVGLEMANKHVFGPQASSETGVAEGYVLKPVYPIFFNTGTRVAIKCKNSKFSEKAKLDSPISNKVELTENDKRLLEIFSEYVTWNRVSNVLSHIGSVTAKDFGRVSGLTMKDIINEAAREGHDLLFADNPSAVLKELTGLIQNTIRSKWHEVLE

SEQ ID NO: 1137 - DNA, 1038 bp, synthetic construct
  misc_feature 1..1038: note = variant of RNA ligase 2 from Klebsiella phage KP179
  source 1..1038: mol_type = other DNA
atgcatcaccatcaccatcacggtggcagcaacacgtttgcgtattattcaagtctggaaaaccattacaataataagttcattgagaagatccgtggtgcaggcttcctgatgcacaccgtggaatgggtagctcgcgagaagattcatggaacgaactttagcgttatcattactccgaccgaaatcgtcccagccaaacgcacagggccgatcttggaaggcgagtcgttctttggtcacgaaattatcatgaaaaaatataaagactccttcgtgaaggtgcagaacatgctgaatgccatggatcttgttagcgtgcaaatctttggcgaatttgcgggtggtggcattcagaaaggcgtcgattacggagacaaagatttctatgtgtttgacatcctgtctgatagcgggaacgagaaagtttactgggatgactatcgcgtcgaatcgttttgcaccaccctcggtctgaaattagcgcctctgctgggacgtggtagtttcgctgaactgtcccagtacccaaacgatttcaaaagcattgtgaaccgttataatgaattggttgacacggtcggcctggagatggccaataaacacgtctttggtccgcaagcgtcttctgaaactggcgtagcagaaggctacgttcttaaacccgtctatccgatcttctttaataccggtacgcgcgtggcgattaaatgcaagaactccaaattttcggagaaagcgaagcgcgacacgcctattagtgcgaaggtggaactgacggagaacgataaacgtctgctcgaaatctttagcgagtatgttacctggaatcgcgtcagtaacgtactgtcacatattggctcagtgaccgcaaaagattttgggcgtgtttcgggtctgacgatgaaagacatcattaatgaagcagcacgcgaaggccatgatctgttgttcgctgataacccgtcggcggtgctgaaggagctgactggcctcatccagaacacgattcgctccaaatggcacgaagttctggag

SEQ ID NO: 1138 - protein, 346 aa, synthetic construct
  REGION 1..346: note = variant of RNA ligase 2 from Klebsiella phage KP179
MHHHHHHGGSNTFAYYSSLENHYNNKFIEKIRGAGFLMHTVEWVAREKIHGTNFSVIITPTEIVPAKRTGPILEGESFFGHEIIMKKYKDSFVKVQNMLNAMDLVSVQIFGEFAGGGIQKGVDYGDKDFYVFDILSDSGNEKVYWDDYRVESFCTTLGLKLAPLLGRGSFAELSQYPNDFKSIVNRYNELVDTVGLEMANKHVFGPQASSETGVAEGYVLKPVYPIFFNTGTRVAIKCKNSKFSEKAKRDTPISAKVELTENDKRLLEIFSEYVTWNRVSNVLSHIGSVTAKDFGRVSGLTMKDIINEAAREGHDLLFADNPSAVLKELTGLIQNTIRSKWHEVLE

SEQ ID NO: 1139 - DNA, 1038 bp, synthetic construct
  misc_feature 1..1038: note = variant of RNA ligase 2 from Klebsiella phage KP179
  source 1..1038: mol_type = other DNA
atgcatcaccatcaccatcacggtggcagcaacatgtttgcgtattattcaagtctggaaaaccattacaataataagttcattgagaagatccgtggtgcaggcttcctgatgcacaccgtggaatgggtagctcgcgagaagattcatggaacgaactttagcgttatcattactccgaccgaaatcgtcccagccaaacgcacagggccgatcttggaaggcgagtcgttctttggtcacgaaattatcatgaaaaaatataaagactccttcgtgaaggtgcagaacatgctgaatgccatggatcttgttagcgtgcaaatctttggcgaatttgcgggtggtggcattcagaaaggcgtcgattacggagacaaagatttctatgtgtttgacatcctgtctgatagcgggaacgagaaagtttactgggatgactatcgcgtcgaatcgttttgcaccactctcggtctgaaattagcgcctctgctgggacgtggtagtttcgctgaactgtcccagtacccaaacgatttcaaaagcattgtgaaccgttataatgaattggttgacacggtcggcctggagatggccaataaacacgtctttggtccgcaagcgtcttctgaaactggcgtagcagaaggctacgttcttaaacccgtctatccgatcttctttaataccggtacgcgcgtggcgattaaatgcaagaactccaaattttcggagaaagccaagctggactcgccaattagtgttaaggttgaactgacggagaacgataaacgtctgctcgaaatctttagcgagtatgttacctggaatcgcgtcagtaacgtactgtcacatattggctcagtgaccgcaaaagattttgggcgtgtttcgggtctgacgatgaaagacatcattaatgaagcagcacgcgaaggccatgatctgttgttcgctgataacccgtcggcggtgctgaaggagctgactggcctcatccagaacacgattcgctccaaatggcacgaagttctggag

SEQ ID NO: 1140 - protein, 346 aa, synthetic construct
  REGION 1..346: note = variant of RNA ligase 2 from Klebsiella phage KP179
MHHHHHHGGSNMFAYYSSLENHYNNKFIEKIRGAGFLMHTVEWVAREKIHGTNFSVIITPTEIVPAKRTGPILEGESFFGHEIIMKKYKDSFVKVQNMLNAMDLVSVQIFGEFAGGGIQKGVDYGDKDFYVFDILSDSGNEKVYWDDYRVESFCTTLGLKLAPLLGRGSFAELSQYPNDFKSIVNRYNELVDTVGLEMANKHVFGPQASSETGVAEGYVLKPVYPIFFNTGTRVAIKCKNSKFSEKAKLDSPISVKVELTENDKRLLEIFSEYVTWNRVSNVLSHIGSVTAKDFGRVSGLTMKDIINEAAREGHDLLFADNPSAVLKELTGLIQNTIRSKWHEVLE

SEQ ID NO: 1141 - DNA, 1038 bp, synthetic construct
  misc_feature 1..1038: note = variant of RNA ligase 2 from Klebsiella phage KP179
  source 1..1038: mol_type = other DNA
atgcatcaccatcaccatcacggtggcagcaacatgtttgcgtattattcaagtctggaaaaccattacaataataagttcattgacaagatccgtggtgcaggcttcctgatgcacaccgtggaatgggtagctcgcgagaagattcatggaacgaactttagcgttatcattactccgaccgaaatcgtcccagccaaacgcacagggccgatcttggaaggcgagtcgttctttggtcacgaaattatcatgaaaaaatataaagactccttcgtgaaggtgcagaacatgctgaatgccatggatcttgttagcgtgcaaatctttggcgaatttgcgggtggtggcattcagaaaggcgtcgattacggagacaaagatttctatgtgtttgacatcctgtctgatagcgggaacgagaaagtttactgggatgactatcgcgtcgaatcgttttgcaccggtctcggtctgaaattagcgcctctgctgggacgtggtagtttcgctgaactgtcccagtacccaaacgatttcaaaagcattgtgaaccgttataatgaattggttgacacggtcggcctggagatggccaataaacacgtctttggtccgcaagcgtcttctgaaactggcgtagcagaaggctacgttcttaaacccgtctatccgatcttctttaataccggtacgcgcgtggcgattaaatgcaagaactccaaattttcggagaaagccaagctggactcgccaattagtgcgagcgatgaactgacggagaacgataaacgtctgctcgaaatctttagcgagtatgttacctggaatcgcgtcagtaacgtactgtcacatattggctcagtgaccgcaaaagattttgggcgtgtttcgggtctgacgatgaaagacatcattaatgaagcagcacgcgaaggccatgatctgttgttcgctgataacccgtcggcggtgctgaaggagctgactggcctcatccagaacacgattcgctccaaatggcacgaagttctggag

SEQ ID NO: 1142 - protein, 346 aa, synthetic construct
  REGION 1..346: note = variant of RNA ligase 2 from Klebsiella phage KP179
MHHHHHHGGSNMFAYYSSLENHYNNKFIDKIRGAGFLMHTVEWVAREKIHGTNFSVIITPTEIVPAKRTGPILEGESFFGHEIIMKKYKDSFVKVQNMLNAMDLVSVQIFGEFAGGGIQKGVDYGDKDFYVFDILSDSGNEKVYWDDYRVESFCTGLGLKLAPLLGRGSFAELSQYPNDFKSIVNRYNELVDTVGLEMANKHVFGPQASSETGVAEGYVLKPVYPIFFNTGTRVAIKCKNSKFSEKAKLDSPISASDELTENDKRLLEIFSEYVTWNRVSNVLSHIGSVTAKDFGRVSGLTMKDIINEAAREGHDLLFADNPSAVLKELTGLIQNTIRSKWHEVLE

SEQ ID NO: 1143 - DNA, 1038 bp, synthetic construct
  misc_feature 1..1038: note = variant of RNA ligase 2 from Klebsiella phage KP179
  source 1..1038: mol_type = other DNA
atgcatcaccatcaccatcacggtggcagcaacacgtttgcgtattattcaagtctggaaaaccattacaataataagttcattgagaagatccgtggtgcaggcttcctgatgcacaccgtggaatgggtagctcgcgagaagattcatggaacgaactttagcgttatcattactccgaccgaaatcgtcccagccaaacgcacagggccgatcttggaaggcgagtcgttctttggtcacgaaattatcatgaaaaaatataaagactccttcgtgaaggtgcagaacatgctgaatgccatggatcttgttagcgtgcaaatctttggcgaatttgcgggtggtggcattcagaaaggcgtcgattacggagacaaagatttctatgtgtttgacatcctgtctgatagcgggaacgagaaagtttactgggatgactatcgcgtcgaatcgttttgcaccaccctcggtctgaaattagcgcctctgctgggacgtggtagtttcgctgaactgtcccagtacccaaacgatttcaaaagcattgtgaaccgttataatgaattggttgacacggtcggcctggagatggccaataaacacgtctttggtccgcaagcgtcttctgaaactggcgtagcagaaggctacgttcttaaacccgtctatccgatcttctttaataccggtacgcgcgtggcgattaaatgcaagaactccaaattttcggagaaagccaagctggactcggctattagtgcgaaggtggaactgacggagaacgataaacgtctgctcgaaatctttagcgagtatgttacctggaatcgcgtcagtaacgtactgtcacatattggctcagtgaccgcaaaagattttgggcgtgtttcgggtctgacgatgaaagacatcattaatgaagcagcacgcgaaggccatgatctgttgttcgctgataacccgtcggcggtgctgaaggagctgactggcctcatccagaacacgattcgctccaaatggcacgaagttctggag

SEQ ID NO: 1144 - protein, 346 aa, synthetic construct
  REGION 1..346: note = variant of RNA ligase 2 from Klebsiella phage KP179
MHHHHHHGGSNTFAYYSSLENHYNNKFIEKIRGAGFLMHTVEWVAREKIHGTNFSVIITPTEIVPAKRTGPILEGESFFGHEIIMKKYKDSFVKVQNMLNAMDLVSVQIFGEFAGGGIQKGVDYGDKDFYVFDILSDSGNEKVYWDDYRVESFCTTLGLKLAPLLGRGSFAELSQYPNDFKSIVNRYNELVDTVGLEMANKHVFGPQASSETGVAEGYVLKPVYPIFFNTGTRVAIKCKNSKFSEKAKLDSAISAKVELTENDKRLLEIFSEYVTWNRVSNVLSHIGSVTAKDFGRVSGLTMKDIINEAAREGHDLLFADNPSAVLKELTGLIQNTIRSKWHEVLE

SEQ ID NO: 1145 - DNA, 1038 bp, synthetic construct
  misc_feature 1..1038: note = variant of RNA ligase 2 from Klebsiella phage KP179
  source 1..1038: mol_type = other DNA
atgcatcaccatcaccatcacggtggcagcaacacgtttgcgtattattcaagtctggaaaaccattacaataataagttcattgagaagatccgtggtgcaggcttcctgatgcacaccgtggaatgggtagctcgcgagaagattcatggaacgaactttagcgttatcattactccgaccgaaatcgtcccagccaaacgcacagggccgatcttggaaggcgagtcgttctttggtcacgaaattatcatgaaaaaatataaagactccttcgtgaaggtgcagaacatgctgaatgccatggatcttgttagcgtgcaaatctttggcgaatttgcgggtggtggcattcagaaaggcgtcgattacggagacaaagatttctatgtgtttgacatcctgtctgatagcgggaacgagaaagtttactgggatgactatcgcgtcgaatcgttttgcaccactctcggtctgaaattagcgcctctgctgggacgtggtagtttcgctgaactgtcccagtacccaaacgatttcaaaagcattgtgaaccgttataatgaattggttgacacggtcggcctggagatggccaataaacacgtctttggtccgcaagcgtcttctgaaactggcgtagcagaaggctacgttcttaaacccgtctatccgatcttctttaataccggtacgcgcgtggcgattaaatgcaagaactccaaattttcggagaaagccaagctggactcgccaattagtgttaaggatgaactgacggacaacgataaacgtctgctcgaaatctttagcgagtatgttacctggaatcgcgtcagtaacgtactgtcacatattggctcagtgaccgcaaaagattttgggcgtgtttcgggtctgacgatgaaagacatcattaatgaagcagcacgcgaaggccatgatctgttgttcgctgataacccgtcggcggtgctgaaggagctgactggcctcatccagaacacgattcgctccaaatggcacgaagttctggag

SEQ ID NO: 1146 - protein, 346 aa, synthetic construct
  REGION 1..346: note = variant of RNA ligase 2 from Klebsiella phage KP179
MHHHHHHGGSNTFAYYSSLENHYNNKFIEKIRGAGFLMHTVEWVAREKIHGTNFSVIITPTEIVPAKRTGPILEGESFFGHEIIMKKYKDSFVKVQNMLNAMDLVSVQIFGEFAGGGIQKGVDYGDKDFYVFDILSDSGNEKVYWDDYRVESFCTTLGLKLAPLLGRGSFAELSQYPNDFKSIVNRYNELVDTVGLEMANKHVFGPQASSETGVAEGYVLKPVYPIFFNTGTRVAIKCKNSKFSEKAKLDSPISVKDELTDNDKRLLEIFSEYVTWNRVSNVLSHIGSVTAKDFGRVSGLTMKDIINEAAREGHDLLFADNPSAVLKELTGLIQNTIRSKWHEVLE

SEQ ID NO: 1147 - DNA, 1038 bp, synthetic construct
  misc_feature 1..1038: note = variant of RNA ligase 2 from Klebsiella phage KP179
  source 1..1038: mol_type = other DNA
atgcatcaccatcaccatcacggtggcagcaacacgtttgcgtattattcagcgctggaaaaccattacaataataagttcattgagaagatccgtggtgcaggcttcctgatgcacaccgtggaatgggtagctcgcgagaagattcatggaacgaactttagcgttatcattactccgaccgaaatcgtcccagccaaacgcacagggccgatcttggaaggcgagtcgttctttggtcacgaaattatcatgaaaaaatataaagactccttcgtgaaggtgcagaacatgctgaatgccatggatcttgttagcgtgcaaatctttggcgaatttgcgggtggtggcattcagaaaggcgtcgattacggagacaaagatttctatgtgtttgacatcctgtctgatagcgggaacgagaaagtttactgggatgactatcgcgtcgaatcgttttgcaccactctcggtctgaaattagcgcctctgctgggacgtggtagtttcgctgaactgtcccagtacccaaacgatttcaaaagcattgtgaaccgttataatgaattggttgacacggtcggcctggagatggccaataaacacgtctttggtccgcaagcgtcttctgaaactggcgtagcagaaggctacgttcttaaacccgtctatccgatcttctttaataccggtacgcgcgtggcgattaaatgcaagaactccaaattttcggagaaagccaagctggactcgccaattagtgcgaaggtggaactgacggagaacgataaacgtctgctcgaaatctttagcgagtatgttacctggaatcgcgtcagtaacgtactgtcacatattggctcagtgaccgcaaaagattttgggcgtgtttcgggtctgacgatgaaagacatcattaatgaagcagcacgcgaaggccatgatctgttgttcgctgataacccgtcggcggtgctgaaggagctgactggcctcatccagaacacgattcgctccaaatggcacgaagttctggag

SEQ ID NO: 1148 - protein, 346 aa, synthetic construct
  REGION 1..346: note = variant of RNA ligase 2 from Klebsiella phage KP179
MHHHHHHGGSNTFAYYSALENHYNNKFIEKIRGAGFLMHTVEWVAREKIHGTNFSVIITPTEIVPAKRTGPILEGESFFGHEIIMKKYKDSFVKVQNMLNAMDLVSVQIFGEFAGGGIQKGVDYGDKDFYVFDILSDSGNEKVYWDDYRVESFCTTLGLKLAPLLGRGSFAELSQYPNDFKSIVNRYNELVDTVGLEMANKHVFGPQASSETGVAEGYVLKPVYPIFFNTGTRVAIKCKNSKFSEKAKLDSPISAKVELTENDKRLLEIFSEYVTWNRVSNVLSHIGSVTAKDFGRVSGLTMKDIINEAAREGHDLLFADNPSAVLKELTGLIQNTIRSKWHEVLE

SEQ ID NO: 1149 - DNA, 1038 bp, synthetic construct
  misc_feature 1..1038: note = variant of RNA ligase 2 from Klebsiella phage KP179
  source 1..1038: mol_type = other DNA
atgcatcaccatcaccatcacggtggcagcaacacgtttgcgtattattcaagtctggaaaaccattacaataataagttcattgacaagatccgtggtgcaggcttcctgatgcacaccgtggaatgggtagctcgcgagaagattcatggaacgaactttagcgttatcattactccgaccgaaatcgtcccagccaaacgcacagggccgatcttggaaggcgagtcgttctttggtcacgaaattatcatgaaaaaatataaagactccttcgtgaaggtgcagaacatgctgaatgccatggatcttgttagcgtgcaaatctttggcgaatttgcgggtggtggcattcagaaaggcgtcgattacggagacaaagatttctatgtgtttgacatcctgtctgatagcgggaacgagaaagtttactgggatgactatcgcgtcgaatcgttttgcaccactctcggtctgaaattagcgcctctgctgggacgtggtagtttcgctgaactgtcccagtacccaaacgatttcaaaagcattgtgaaccgttataatgaattggttgacacggtcggcctggagatggccaataaacacgtctttggtccgcaagcgtcttctgaaactggcgtagcagaaggctacgttcttaaacccgtctatccgatcttctttaataccggtacgcgcgtggcgattaaatgcaagaactccaaattttcggagaaagccaagctggactcgccaattagtaataaggatgaactgacggagaacgataaacgtctgctcgaaatctttagcgagtatgttacctggaatcgcgtcagtaacgtactgtcacatattggctcagtgaccgcaaaagattttgggcgtgtttcgggtctgacgatgaaagacatcattaatgaagcagcacgcgaaggccatgatctgttgttcgctgataacccgtcggcggtgctgaaggagctgactggcctcatccagaacacgattcgctccaaatggcacgaagttctggag

SEQ ID NO: 1150 - protein, 346 aa, synthetic construct
  REGION 1..346: note = variant of RNA ligase 2 from Klebsiella phage KP179
MHHHHHHGGSNTFAYYSSLENHYNNKFIDKIRGAGFLMHTVEWVAREKIHGTNFSVIITPTEIVPAKRTGPILEGESFFGHEIIMKKYKDSFVKVQNMLNAMDLVSVQIFGEFAGGGIQKGVDYGDKDFYVFDILSDSGNEKVYWDDYRVESFCTTLGLKLAPLLGRGSFAELSQYPNDFKSIVNRYNELVDTVGLEMANKHVFGPQASSETGVAEGYVLKPVYPIFFNTGTRVAIKCKNSKFSEKAKLDSPISNKDELTENDKRLLEIFSEYVTWNRVSNVLSHIGSVTAKDFGRVSGLTMKDIINEAAREGHDLLFADNPSAVLKELTGLIQNTIRSKWHEVLE

SEQ ID NO: 1151 - DNA, 1038 bp, synthetic construct
  misc_feature 1..1038: note = variant of RNA ligase 2 from Klebsiella phage KP179
  source 1..1038: mol_type = other DNA
atgcatcaccatcaccatcacggtggcagcaacacgtttgcgtattattcaagtctggaaaaccattacaataataagttcattgagaagatccgtggtgcaggcttcctgatgcacaccgtggaatgggtagctcgcgagaagattcatggaacgaactttagcgttatcattactccgaccgaaatcgtcccagccaaacgcacagggccgatcttggaaggcgagtcgttctttggtcacgaaattatcatgaaaaaatataaagactccttcgtgaaggtgcagaacatgctgaatgccatggatcttgttagcgtgcaaatctttggcgaatttgcgggtggtggcattcagaaaggcgtcgattacggagacaaagatttctatgtgtttgacatcctgtctgatagcgggaacgagaaagtttactgggatgactatcgcgtcgaatcgttttgcaccactctcggtctgaaattagcgcctctgctgggacgtggtagtttcgctgaactgtcccagtacccaaacgatttcaaaagcattgtgaaccgttataatgaattggttgacacggtcggcctggagatggccaataaacacgtctttggtccgcaagcgtcttctgaaactggcgtagcagaaggctacgttcttaaacccgtctatccgatcttctttaataccggtacgcgcgtggcgattaaatgcaagaactccaaattttcggagaaagccaagctggactcgccaattagttatagcgatgaactgacggagaacgataaacgtctgctcgaaatctttagcgagtatgttacctggaatcgcgtcagtaacgtactgtcacatattggctcagtgaccgcaaaagattttgggcgtgtttcgggtctgacgatgaaagacatcattaatgaagcagcacgcgaaggccatgatctgttgttcgctgataacccgtcggcggtgctgaaggagctgactggcctcatccagaacacgattcgctccaaatggcacgaagttctggag

SEQ ID NO: 1152 - protein, 346 aa, synthetic construct
  REGION 1..346: note = variant of RNA ligase 2 from Klebsiella phage KP179
MHHHHHHGGSNTFAYYSSLENHYNNKFIEKIRGAGFLMHTVEWVAREKIHGTNFSVIITPTEIVPAKRTGPILEGESFFGHEIIMKKYKDSFVKVQNMLNAMDLVSVQIFGEFAGGGIQKGVDYGDKDFYVFDILSDSGNEKVYWDDYRVESFCTTLGLKLAPLLGRGSFAELSQYPNDFKSIVNRYNELVDTVGLEMANKHVFGPQASSETGVAEGYVLKPVYPIFFNTGTRVAIKCKNSKFSEKAKLDSPISYSDELTENDKRLLEIFSEYVTWNRVSNVLSHIGSVTAKDFGRVSGLTMKDIINEAAREGHDLLFADNPSAVLKELTGLIQNTIRSKWHEVLE

SEQ ID NO: 1153 - DNA, 1038 bp, synthetic construct
  misc_feature 1..1038: note = variant of RNA ligase 2 from Klebsiella phage KP179
  source 1..1038: mol_type = other DNA
atgcatcaccatcaccatcacggtggcagcaacatgtttgcgtattattcaagtctggaaaaccattacaatgctaagttcattgacaagatccgtggtgcaggcttcctgatgcacaccgtggaatgggtagctcgcgagaagattcatggaacgaactttagcgttatcattactccgaccgaaatcgtcccagccaaacgcacagggccgatcttggaaggcgagtcgttctttggtcacgaaattatcatgaaaaaatataaagactccttcgtgaaggtgcagaacatgctgaatgccatggatcttgttagcgtgcaaatctttggcgaatttgcgggtggtggcattcagaaaggcgtcgattacggagacaaagatttctatgtgtttgacatcctgtctgatagcgggaacgagaaagtttactgggatgactatcgcgtcgaatcgttttgcaccggtctcggtctgaaattagcgcctctgctgggacgtggtagtttcgctgaactgtcccagtacccaaacgatttcaaaagcattgtgaaccgttataatgaattggttgacacggtcggcctggagatggccaataaacacgtctttggtccgcaagcgtcttctgaaactggcgtagcagaaggctacgttcttaaacccgtctatccgatcttctttaataccggtacgcgcgtggcgattaaatgcaagaactccaaattttcggagaaagccaagctggactcgccaattagtgcgagcgatgaactgacggagaacgataaacgtctgctcgaaatctttagcgagtatgttacctggaatcgcgtcagtaacgtactgtcacatattggctcagtgaccgcaaaagattttgggcgtgtttcgggtctgacgatgaaagacatcattaatgaagcagcacgcgaaggccatgatctgttgttcgctgataacccgtcggcggtgctgaaggagctgactggcctcatccagaacacgattcgctccaaatggcacgaagttctggag

SEQ ID NO: 1154 - protein, 346 aa, synthetic construct
  REGION 1..346: note = variant of RNA ligase 2 from Klebsiella phage KP179
MHHHHHHGGSNMFAYYSSLENHYNAKFIDKIRGAGFLMHTVEWVAREKIHGTNFSVIITPTEIVPAKRTGPILEGESFFGHEIIMKKYKDSFVKVQNMLNAMDLVSVQIFGEFAGGGIQKGVDYGDKDFYVFDILSDSGNEKVYWDDYRVESFCTGLGLKLAPLLGRGSFAELSQYPNDFKSIVNRYNELVDTVGLEMANKHVFGPQASSETGVAEGYVLKPVYPIFFNTGTRVAIKCKNSKFSEKAKLDSPISASDELTENDKRLLEIFSEYVTWNRVSNVLSHIGSVTAKDFGRVSGLTMKDIINEAAREGHDLLFADNPSAVLKELTGLIQNTIRSKWHEVLE

SEQ ID NO: 1155 - DNA, 1038 bp, synthetic construct
  misc_feature 1..1038: note = variant of RNA ligase 2 from Klebsiella phage KP179
  source 1..1038: mol_type = other DNA
atgcatcaccatcaccatcacggtggcagcaacacgtttgcgtattattcaagtctggaaaaccattacaatgctaagttcattgagaagatccgtggtgcaggcttcctgatgcacaccgtggaatgggtagctcgcgagaagattcatggaacgaactttagcgttatcattactccgaccgaaatcgtcccagccaaacgcacagggccgatcttggaaggcgagtcgttctttggtcacgaaattatcatgaaaaaatataaagactccttcgtgaaggtgcagaacatgctgaatgccatggatcttgttagcgtgcaaatctttggcgaatttgcgggtggtggcattcagaaaggcgtcgattacggagacaaagatttctatgtgtttgacatcctgtctgatagcgggaacgagaaagtttactgggatgactatcgcgtcgaatcgttttgcaccactctcggtctgaaattagcgcctctgctgggacgtggtagtttcgctgaactgtcccagtacccaaacgatttcaaaagcattgtgaaccgttataatgaattggttgacacggtcggcctggagatggccaataaacacgtctttggtccgcaagcgtcttctgaaactggcgtagcagaaggctacgttcttaaacccgtctatccgatcttctttaataccggtacgcgcgtggcgattaaatgcaagaactccaaattttcggagaaagccaagctggactcgccaattagtgttagcgatgaactgacggacaacgataaacgtctgctcgaaatctttagcgagtatgttacctggaatcgcgtcagtaacgtactgtcacatattggctcagtgaccgcaaaagattttgggcgtgtttcgggtctgacgatgaaagacatcattaatgaagcagcacgcgaaggccatgatctgttgttcgctgataacccgtcggcggtgctgaaggagctgactggcctcatccagaacacgattcgctccaaatggcacgaagttctggag

SEQ ID NO: 1156 - protein, 346 aa, synthetic construct
  REGION 1..346: note = variant of RNA ligase 2 from Klebsiella phage KP179
MHHHHHHGGSNTFAYYSSLENHYNAKFIEKIRGAGFLMHTVEWVAREKIHGTNFSVIITPTEIVPAKRTGPILEGESFFGHEIIMKKYKDSFVKVQNMLNAMDLVSVQIFGEFAGGGIQKGVDYGDKDFYVFDILSDSGNEKVYWDDYRVESFCTTLGLKLAPLLGRGSFAELSQYPNDFKSIVNRYNELVDTVGLEMANKHVFGPQASSETGVAEGYVLKPVYPIFFNTGTRVAIKCKNSKFSEKAKLDSPISVSDELTDNDKRLLEIFSEYVTWNRVSNVLSHIGSVTAKDFGRVSGLTMKDIINEAAREGHDLLFADNPSAVLKELTGLIQNTIRSKWHEVLE

SEQ ID NO: 1157 - DNA, 1038 bp, synthetic construct
  misc_feature 1..1038: note = variant of RNA ligase 2 from Klebsiella phage KP179
  source 1..1038: mol_type = other DNA
atgcatcaccatcaccatcacggtggcagcaacacgtttgcgtattattcaagtctggaaaaccattacaataataagttcattgacaagatccgtggtgcaggcttcctgatgcacaccgtggaatgggtagctcgcgagaagattcatggaacgaactttagcgttatcattactccgaccgaaatcgtcccagccaaacgcacagggccgatcttggaaggcgagtcgttctttggtcacgaaattatcatgaaaaaatataaagactccttcgtgaaggtgcagaacatgctgaatgccatggatcttgttagcgtgcaaatctttggcgaatttgcgggtggtggcattcagaaaggcgtcgattacggagacaaagatttctatgtgtttgacatcctgtctgatagcgggaacgagaaagtttactgggatgactatcgcgtcgaatcgttttgcaccactctcggtctgaaattagcgcctctgctgggacgtggtagtttcgctgaactgtcccagtacccaaacgatttcaaaagcattgtgaaccgttataatgaattggttgacacggtcggcctggagatggccaataaacacgtctttggtccgcaagcgtcttctgaaactggcgtagcagaaggctacgttcttaaacccgtctatccgatcttctttaataccggtacgcgcgtggcgattaaatgcaagaactccaaattttcggagaaagccaagctggactcgccaattagttatagcgatgaactgacggacaacgataaacgtctgctcgaaatctttagcgagtatgttacctggaatcgcgtcagtaacgtactgtcacatattggctcagtgaccgcaaaagattttgggcgtgtttcgggtctgacgatgaaagacatcattaatgaagcagcacgcgaaggccatgatctgttgttcgctgataacccgtcggcggtgctgaaggagctgactggcctcatccagaacacgattcgctccaaatggcacgaagttctggag

SEQ ID NO: 1158 - protein, 346 aa, synthetic construct
  REGION 1..346: note = variant of RNA ligase 2 from Klebsiella phage KP179
MHHHHHHGGSNTFAYYSSLENHYNNKFIDKIRGAGFLMHTVEWVAREKIHGTNFSVIITPTEIVPAKRTGPILEGESFFGHEIIMKKYKDSFVKVQNMLNAMDLVSVQIFGEFAGGGIQKGVDYGDKDFYVFDILSDSGNEKVYWDDYRVESFCTTLGLKLAPLLGRGSFAELSQYPNDFKSIVNRYNELVDTVGLEMANKHVFGPQASSETGVAEGYVLKPVYPIFFNTGTRVAIKCKNSKFSEKAKLDSPISYSDELTDNDKRLLEIFSEYVTWNRVSNVLSHIGSVTAKDFGRVSGLTMKDIINEAAREGHDLLFADNPSAVLKELTGLIQNTIRSKWHEVLE

SEQ ID NO: 1159 - DNA, 1038 bp, synthetic construct
  misc_feature 1..1038: note = variant of RNA ligase 2 from Klebsiella phage KP179
  source 1..1038: mol_type = other DNA
atgcatcaccatcaccatcacggtggcagcaacacgtttgcgtattattcaagtctggaaaaccattacaatgctaagttcattgagaagatccgtggtgcaggcttcctgatgcacaccgtggaatgggtagctcgcgagaagattcatggaacgaactttagcgttatcattactccgaccgaaatcgtcccagccaaacgcacagggccgatcttggaaggcgagtcgttctttggtcacgaaattatcatgaaaaaatataaagactccttcgtgaaggtgcagaacatgctgaatgccatggatcttgttagcgtgcaaatctttggcgaatttgcgggtggtggcattcagaaaggcgtcgattacggagacaaagatttctatgtgtttgacatcctgtctgatagcgggaacgagaaagtttactgggatgactatcgcgtcgaatcgttttgcaccactctcggtctgaaattagcgcctctgctgggacgtggtagtttcgctgaactgtcccagtacccaaacgatttcaaaagcattgtgaaccgttataatgaattggttgacacggtcggcctggagatggccaataaacacgtctttggtccgcaagcgtcttctgaaactggcgtagcagaaggctacgttcttaaacccgtctatccgatcttctttaataccggtacgcgcgtggcgattaaatgcaagaactccaaattttcggagaaagccaagctggactcgccaattagtgcgagcgttgaactgacggagaacgataaacgtctgctcgaaatctttagcgagtatgttacctggaatcgcgtcagtaacgtactgtcacatattggctcagtgaccgcaaaagattttgggcgtgtttcgggtctgacgatgaaagacatcattaatgaagcagcacgcgaaggccatgatctgttgttcgctgataacccgtcggcggtgctgaaggagctgactggcctcatccagaacacgattcgctccaaatggcacgaagttctggag

SEQ ID NO: 1160 - protein, 346 aa, synthetic construct
  REGION 1..346: note = variant of RNA ligase 2 from Klebsiella phage KP179
MHHHHHHGGSNTFAYYSSLENHYNAKFIEKIRGAGFLMHTVEWVAREKIHGTNFSVIITPTEIVPAKRTGPILEGESFFGHEIIMKKYKDSFVKVQNMLNAMDLVSVQIFGEFAGGGIQKGVDYGDKDFYVFDILSDSGNEKVYWDDYRVESFCTTLGLKLAPLLGRGSFAELSQYPNDFKSIVNRYNELVDTVGLEMANKHVFGPQASSETGVAEGYVLKPVYPIFFNTGTRVAIKCKNSKFSEKAKLDSPISASVELTENDKRLLEIFSEYVTWNRVSNVLSHIGSVTAKDFGRVSGLTMKDIINEAAREGHDLLFADNPSAVLKELTGLIQNTIRSKWHEVLE

SEQ ID NO: 1161 - DNA, 1038 bp, synthetic construct
  misc_feature 1..1038: note = variant of RNA ligase 2 from Klebsiella phage KP179
  source 1..1038: mol_type = other DNA
atgcatcaccatcaccatcacggtggcagcaacacgtttgcgtattattcacacctggaaaaccattacaataataagttcattgagaagatccgtggtgcaggcttcctggaacacaccgtggaatgggtagctcgcgagaagattcatggaacgaactttagcgttatcattactccgaccgaaatcgtcccagccaaacgcacagggccgatcttggaaggcgagtcgttctttggtcacgaaattatcatgaaaaaatataaagactccttcgtgaaggtgcagaacatgctgaatgccatggatcttgttagcgtgcaaatctttggcgaatttgcgggtggtggcattcagaaaggcgtcgattacggagacaaagatttctatgtgtttgacatcctgtctgatagcgggaacgagaaagtttactgggatgactatcgcgtcgaatcgttttgcaccaccctcggtctgaaattagcgcctctgctgggacgtggtagtttcgctgaactgtcccagtacccaaacgatttcaaaagcattgtgaaccgttataatgaattggttgacacggtcggcctggagatggccaataaacacgtctttggtccgcaagcgtcttctgaaactggcgtagcagaaggctacgttcttaaacccgtctatccgatcttctttaataccggtacgcgcgtggcgattaaatgcaagaactccaaattttcggagaaacgtaagctggactcggctattagtgcgaaggtggaactgacggagaacgataaacgtctgctcgaaatctttagcgagtatgttacctggaatcgcgtcagtaacgtactgtcacatattggctcagtgaccgcaaaagattttgggcgtgtttcgggtctgacgatgaaagacatcattaatgaagcagcacgcgaaggccatgatctgttgttcgctgataacccgtcggcggtgctgatggagctgactggcctcatccagaacacgattcgctccaaatggcacgaagttctggag

SEQ ID NO: 1162 - protein, 346 aa, synthetic construct
  REGION 1..346: note = variant of RNA ligase 2 from Klebsiella phage KP179
MHHHHHHGGSNTFAYYSHLENHYNNKFIEKIRGAGFLEHTVEWVAREKIHGTNFSVIITPTEIVPAKRTGPILEGESFFGHEIIMKKYKDSFVKVQNMLNAMDLVSVQIFGEFAGGGIQKGVDYGDKDFYVFDILSDSGNEKVYWDDYRVESFCTTLGLKLAPLLGRGSFAELSQYPNDFKSIVNRYNELVDTVGLEMANKHVFGPQASSETGVAEGYVLKPVYPIFFNTGTRVAIKCKNSKFSEKRKLDSAISAKVELTENDKRLLEIFSEYVTWNRVSNVLSHIGSVTAKDFGRVSGLTMKDIINEAAREGHDLLFADNPSAVLMELTGLIQNTIRSKWHEVLE

SEQ ID NO: 1163 - DNA, 1038 bp, synthetic construct
  misc_feature 1..1038: note = variant of RNA ligase 2 from Klebsiella phage KP179
  source 1..1038: mol_type = other DNA
atgcatcaccatcaccatcacggtggcagcaacacgtttgcgtattattcacacctggaaaaccattacaataataagttcattgagaagatccgtggtgcaggcttcctgatgcacaccgtggaatgggtagctcgcgagaagattcatggaacgaactttagcgttatcattactccgaccgaaatcgtcccagccaaacgcacagggccgatcttggaaggcgagtcgttctttggtcacgaaattatcatgaaaaaatataaagactccttcgtgaaggtgcagaacatgctgaatgccatggatcttgttagcgtgcaaatctttggcgaatttgcgggtggtggcattcagaaaggcgtcgattacggagacaaagatttctatgtgtttgacatcctgtctgatagcgggaacgagaaagtttactgggatgactatcgcgtcgaatcgttttgcaccaccctcggtctgaaattagcgcctctgctgggacgtggtagtttcgctgaactgtcccagtacccaaacgatttcaaaagcattgtgaaccgttataatgaattggttgacacggtcggcctggagatggccaataaacacgtctttggtccgcaagcgtcttctgaaactggcgtagcagaaggctacgttcttaaacccgtctatccgatcttctttaataccggtacgcgcgtggcgattaaatgcaagaactccaaattttcggagaaacgtaagctggactcgcctattagtgcgaaggtggaactgacggagaacgataaacgtctgctcgaaatctttagcgagtatgttacctggaatcgcgtcagtaacgtactgtcacatattggctcagtgaccgcaaaagattttgggcgtgtttcgggtctgacgatgaaagacatcattaatgaagcagcacgcgaaggccatgatctgttgttcgctgataacccgtcggcggtgctgaaggagctgactggcctcatccagaacacgattcgctccaaatggcacgaagttctggag

SEQ ID NO: 1164 - protein, 346 aa, synthetic construct
  REGION 1..346: note = variant of RNA ligase 2 from Klebsiella phage KP179
MHHHHHHGGSNTFAYYSHLENHYNNKFIEKIRGAGFLMHTVEWVAREKIHGTNFSVIITPTEIVPAKRTGPILEGESFFGHEIIMKKYKDSFVKVQNMLNAMDLVSVQIFGEFAGGGIQKGVDYGDKDFYVFDILSDSGNEKVYWDDYRVESFCTTLGLKLAPLLGRGSFAELSQYPNDFKSIVNRYNELVDTVGLEMANKHVFGPQASSETGVAEGYVLKPVYPIFFNTGTRVAIKCKNSKFSEKRKLDSPISAKVELTENDKRLLEIFSEYVTWNRVSNVLSHIGSVTAKDFGRVSGLTMKDIINEAAREGHDLLFADNPSAVLKELTGLIQNTIRSKWHEVLE

SEQ ID NO: 1165 - DNA, 1038 bp, synthetic construct
  misc_feature 1..1038: note = variant of RNA ligase 2 from Klebsiella phage KP179
  source 1..1038: mol_type = other DNA
atgcatcaccatcaccatcacggtggcagcaacacgtttgcgtattattcaagtctggaaaaccattacaatgctaagttcattgacaagatccgtggtgcaggcttcctgatgcacaccgtggaatgggtagctcgcgagaagattcatggaacgaactttagcgttatcattactccgaccgaaatcgtcccagccaaacgcacagggccgatcttggaaggcgagtcgttctttggtcacgaaattatcatgaaaaaatataaagactccttcgtgaaggtgcagaacatgctgaatgccatggatcttgttagcgtgcaaatctttggcgaatttgcgggtggtggcattcagaaaggcgtcgattacggagacaaagatttctatgtgtttgacatcctgtctgatagcgggaacgagaaagtttactgggatgactatcgcgtcgaatcgttttgcaccactctcggtctgaaattagcgcctctgctgggacgtggtagtttcgctgaactgtcccagtacccaaacgatttcaaaagcattgtgaaccgttataatgaattggttgacacggtcggcctggagatggccaataaacacgtctttggtccgcaagcgtcttctgaaactggcgtagcagaaggctacgttcttaaacccgtctatccgatcttctttaataccggtacgcgcgtggcgattaaatgcaagaactccaaattttcggagaaagccaagctggactcgccaattagtgcgaaggttgaactgacggagaacgataaacgtctgctcgaaatctttagcgagtatgttacctggaatcgcgtcagtaacgtactgtcacatattggctcagtgaccgcaaaagattttgggcgtgtttcgggtctgacgatgaaagacatcattaatgaagcagcacgcgaaggccatgatctgttgttcgctgataacccgtcggcggtgctgaaggagctgactggcctcatccagaacacgattcgctccaaatggcacgaagttctggag

SEQ ID NO: 1166 - protein, 346 aa, synthetic construct
  REGION 1..346: note = variant of RNA ligase 2 from Klebsiella phage KP179
MHHHHHHGGSNTFAYYSSLENHYNAKFIDKIRGAGFLMHTVEWVAREKIHGTNFSVIITPTEIVPAKRTGPILEGESFFGHEIIMKKYKDSFVKVQNMLNAMDLVSVQIFGEFAGGGIQKGVDYGDKDFYVFDILSDSGNEKVYWDDYRVESFCTTLGLKLAPLLGRGSFAELSQYPNDFKSIVNRYNELVDTVGLEMANKHVFGPQASSETGVAEGYVLKPVYPIFFNTGTRVAIKCKNSKFSEKAKLDSPISAKVELTENDKRLLEIFSEYVTWNRVSNVLSHIGSVTAKDFGRVSGLTMKDIINEAAREGHDLLFADNPSAVLKELTGLIQNTIRSKWHEVLE

SEQ ID NO: 1167 - DNA, 1038 bp, synthetic construct
  misc_feature 1..1038: note = variant of RNA ligase 2 from Klebsiella phage KP179
  source 1..1038: mol_type = other DNA
atgcatcaccatcaccatcacggtggcagcaacatgtttgcgtattattcaagtctggaaaaccattacaatgctaagttcattgagaagatccgtggtgcaggcttcctgatgcacaccgtggaatgggtagctcgcgagaagattcatggaacgaactttagcgttatcattactccgaccgaaatcgtcccagccaaacgcacagggccgatcttggaaggcgagtcgttctttggtcacgaaattatcatgaaaaaatataaagactccttcgtgaaggtgcagaacatgctgaatgccatggatcttgttagcgtgcaaatctttggcgaatttgcgggtggtggcattcagaaaggcgtcgattacggagacaaagatttctatgtgtttgacatcctgtctgatagcgggaacgagaaagtttactgggatgactatcgcgtcgaatcgttttgcaccggtctcggtctgaaattagcgcctctgctgggacgtggtagtttcgctgaactgtcccagtacccaaacgatttcaaaagcattgtgaaccgttataatgaattggttgacacggtcggcctggagatggccaataaacacgtctttggtccgcaagcgtcttctgaaactggcgtagcagaaggctacgttcttaaacccgtctatccgatcttctttaataccggtacgcgcgtggcgattaaatgcaagaactccaaattttcggagaaagccaagctggactcgccaattagtgttaaggatgaactgacggagaacgataaacgtctgctcgaaatctttagcgagtatgttacctggaatcgcgtcagtaacgtactgtcacatattggctcagtgaccgcaaaagattttgggcgtgtttcgggtctgacgatgaaagacatcattaatgaagcagcacgcgaaggccatgatctgttgttcgctgataacccgtcggcggtgctgaaggagctgactggcctcatccagaacacgattcgctccaaatggcacgaagttctggag

SEQ ID NO: 1168 - protein, 346 aa, synthetic construct
  REGION 1..346: note = variant of RNA ligase 2 from Klebsiella phage KP179
MHHHHHHGGSNMFAYYSSLENHYNAKFIEKIRGAGFLMHTVEWVAREKIHGTNFSVIITPTEIVPAKRTGPILEGESFFGHEIIMKKYKDSFVKVQNMLNAMDLVSVQIFGEFAGGGIQKGVDYGDKDFYVFDILSDSGNEKVYWDDYRVESFCTGLGLKLAPLLGRGSFAELSQYPNDFKSIVNRYNELVDTVGLEMANKHVFGPQASSETGVAEGYVLKPVYPIFFNTGTRVAIKCKNSKFSEKAKLDSPISVKDELTENDKRLLEIFSEYVTWNRVSNVLSHIGSVTAKDFGRVSGLTMKDIINEAAREGHDLLFADNPSAVLKELTGLIQNTIRSKWHEVLE

SEQ ID NO: 1169 - DNA, 1038 bp, synthetic construct
  misc_feature 1..1038: note = variant of RNA ligase 2 from Klebsiella phage KP179
  source 1..1038: mol_type = other DNA
atgcatcaccatcaccatcacggtggcagcaacacgtttgcgtattattcaagtctggaaaaccattacaataataagttcattgagaagatccgtggtgcaggcttcctgatgcacaccgtggaatgggtagctcgcgagaagattcatggaacgaactttagcgttatcattactccgaccgaaatcgtcccagccaaacgcacagggccgatcttggaaggcgagtcgttctttggtcacgaaattatcatgaaaaaatataaagactccttcgtgaaggtgcagaacatgctgaatgccatggatcttgttagcgtgcaaatctttggcgaatttgcgggtggtggcattcagaaaggcgtcgattacggagacaaagatttctatgtgtttgacatcctgtctgatagcgggaacgagaaagtttactgggatgactatcgcgtcgaatcgttttgcaccactctcggtctgaaattagcgcctctgctgggacgtggtagtttcgctgaactgtcccagtacccaaacgatttcaaaagcattgtgaaccgttataatgaattggttgacacggtcggcctggagatggccaataaacacgtctttggtccgcaagcgtcttctgaaactggcgtagcagaaggctacgttcttaaacccgtctatccgatcttctttaataccggtacgcgcgtggcgattaaatgcaagaactccaaattttcggagaaagccaagctggactcgccaattagtgttaaggatgaactgacggagaacgataaacgtctgctcgaaatctttagcgagtatgttacctggaatcgcgtcagtaacgtactgtcacatattggctcagtgaccgcaaaagattttgggcgtgtttcgggtctgacgatgaaagacatcattaatgaagcagcacgcgaaggccatgatctgttgttcgctgataacccgtcggcggtgctgaaggagctgactggcctcatccagaacacgattcgctccaaatggcacgaagttctggag

SEQ ID NO: 1170 - protein, 346 aa, synthetic construct
  REGION 1..346: note = variant of RNA ligase 2 from Klebsiella phage KP179
MHHHHHHGGSNTFAYYSSLENHYNNKFIEKIRGAGFLMHTVEWVAREKIHGTNFSVIITPTEIVPAKRTGPILEGESFFGHEIIMKKYKDSFVKVQNMLNAMDLVSVQIFGEFAGGGIQKGVDYGDKDFYVFDILSDSGNEKVYWDDYRVESFCTTLGLKLAPLLGRGSFAELSQYPNDFKSIVNRYNELVDTVGLEMANKHVFGPQASSETGVAEGYVLKPVYPIFFNTGTRVAIKCKNSKFSEKAKLDSPISVKDELTENDKRLLEIFSEYVTWNRVSNVLSHIGSVTAKDFGRVSGLTMKDIINEAAREGHDLLFADNPSAVLKELTGLIQNTIRSKWHEVLE

SEQ ID NO: 1171 - DNA, 1038 bp, synthetic construct
  misc_feature 1..1038: note = variant of RNA ligase 2 from Klebsiella phage KP179
  source 1..1038: mol_type = other DNA
atgcatcaccatcaccatcacggtggcagcaacatgtttgcgtattattcaagtctggaaaaccattacaataataagttcattgagaagatccgtggtgcaggcttcctgatgcacaccgtggaatgggtagctcgcgagaagattcatggaacgaactttagcgttatcattactccgaccgaaatcgtcccagccaaacgcacagggccgatcttggaaggcgagtcgttctttggtcacgaaattatcatgaaaaaatataaagactccttcgtgaaggtgcagaacatgctgaatgccatggatcttgttagcgtgcaaatctttggcgaatttgcgggtggtggcattcagaaaggcgtcgattacggagacaaagatttctatgtgtttgacatcctgtctgatagcgggaacgagaaagtttactgggatgactatcgcgtcgaatcgttttgcaccactctcggtctgaaattagcgcctctgctgggacgtggtagtttcgctgaactgtcccagtacccaaacgatttcaaaagcattgtgaaccgttataatgaattggttgacacggtcggcctggagatggccaataaacacgtctttggtccgcaagcgtcttctgaaactggcgtagcagaaggctacgttcttaaacccgtctatccgatcttctttaataccggtacgcgcgtggcgattaaatgcaagaactccaaattttcggagaaagccaagctggactcgccaattagtaataaggttgaactgacggagaacgataaacgtctgctcgaaatctttagcgagtatgttacctggaatcgcgtcagtaacgtactgtcacatattggctcagtgaccgcaaaagattttgggcgtgtttcgggtctgacgatgaaagacatcattaatgaagcagcacgcgaaggccatgatctgttgttcgctgataacccgtcggcggtgctgaaggagctgactggcctcatccagaacacgattcgctccaaatggcacgaagttctggag

SEQ ID NO: 1172 - protein, 346 aa, synthetic construct
  REGION 1..346: note = variant of RNA ligase 2 from Klebsiella phage KP179
MHHHHHHGGSNMFAYYSSLENHYNNKFIEKIRGAGFLMHTVEWVAREKIHGTNFSVIITPTEIVPAKRTGPILEGESFFGHEIIMKKYKDSFVKVQNMLNAMDLVSVQIFGEFAGGGIQKGVDYGDKDFYVFDILSDSGNEKVYWDDYRVESFCTTLGLKLAPLLGRGSFAELSQYPNDFKSIVNRYNELVDTVGLEMANKHVFGPQASSETGVAEGYVLKPVYPIFFNTGTRVAIKCKNSKFSEKAKLDSPISNKVELTENDKRLLEIFSEYVTWNRVSNVLSHIGSVTAKDFGRVSGLTMKDIINEAAREGHDLLFADNPSAVLKELTGLIQNTIRSKWHEVLE

SEQ ID NO: 1173 - DNA, 1038 bp, synthetic construct
  misc_feature 1..1038: note = variant of RNA ligase 2 from Klebsiella phage KP179
  source 1..1038: mol_type = other DNA
atgcatcaccatcaccatcacggtggcagcaacacgtttgcgtattattcacacctggaaaaccattacaataataagttcattgagaagatccgtggtgcaggcttcctgatgcacaccgtggaatgggtagctcgcgagaagattcatggaacgaactttagcgttatcattactccgaccgaaatcgtcccagccaaacgcacagggccgatcttggaaggcgagtcgttctttggtcacgaaattatcatgaaaaaatataaagactccttcgtgaaggtgcagaacatgctgaatgccatggatcttgttagcgtgcaaatctttggcgaatttgcgggtggtggcattcagaaaggcgtcgattacggagacaaagatttctatgtgtttgacatcctgtctgatagcgggaacgagaaagtttactgggatgactatcgcgtcgaatcgttttgcaccggcctcggtctgaaattagcgcctctgctgggacgtggtagtttcgctgaactgtcccagtacccaaacgatttcaaaagcattgtgaaccgttataatgaattggttgacacggtcggcctggagatggccaataaacacgtctttggtccgcaagcgtcttctgaaactggcgtagcagaaggctacgttcttaaacccgtctatccgatcttctttaataccggtacgcgcgtggcgattaaatgcaagaactccaaattttcggagaaagccaagctggacacggctattagtgcgaaggtggaactgacggagaacgataaacgtctgctcgaaatctttagcgagtatgttacctggaatcgcgtcagtaacgtactgtcacatattggctcagtgaccgcaaaagattttgggcgtgtttcgggtctgacgatgaaagacatcattaatgaagcagcacgcgaaggccatgatctgttgttcgctgataacccgtcggcggtgctgaaggagctgactggcctcatccagaacacgattcgctccaaatggcacgaagttctggag

SEQ ID NO: 1174 - protein, 346 aa, synthetic construct
  REGION 1..346: note = variant of RNA ligase 2 from Klebsiella phage KP179
MHHHHHHGGSNTFAYYSHLENHYNNKFIEKIRGAGFLMHTVEWVAREKIHGTNFSVIITPTEIVPAKRTGPILEGESFFGHEIIMKKYKDSFVKVQNMLNAMDLVSVQIFGEFAGGGIQKGVDYGDKDFYVFDILSDSGNEKVYWDDYRVESFCTGLGLKLAPLLGRGSFAELSQYPNDFKSIVNRYNELVDTVGLEMANKHVFGPQASSETGVAEGYVLKPVYPIFFNTGTRVAIKCKNSKFSEKAKLDTAISAKVELTENDKRLLEIFSEYVTWNRVSNVLSHIGSVTAKDFGRVSGLTMKDIINEAAREGHDLLFADNPSAVLKELTGLIQNTIRSKWHEVLE

SEQ ID NO: 1175 - DNA, 1038 bp, synthetic construct
  misc_feature 1..1038: note = variant of RNA ligase 2 from Klebsiella phage KP179
  source 1..1038: mol_type = other DNA
atgcatcaccatcaccatcacggtggcagcaacatgtttgcgtattattcaagtctggaaaaccattacaataataagttcattgagaagatccgtggtgcaggcttcctgatgcacaccgtggaatgggtagctcgcgagaagattcatggaacgaactttagcgttatcattactccgaccgaaatcgtcccagccaaacgcacagggccgatcttggaaggcgagtcgttctttggtcacgaaattatcatgaaaaaatataaagactccttcgtgaaggtgcagaacatgctgaatgccatggatcttgttagcgtgcaaatctttggcgaatttgcgggtggtggcattcagaaaggcgtcgattacggagacaaagatttctatgtgtttgacatcctgtctgatagcgggaacgagaaagtttactgggatgactatcgcgtcgaatcgttttgcaccactctcggtctgaaattagcgcctctgctgggacgtggtagtttcgctgaactgtcccagtacccaaacgatttcaaaagcattgtgaaccgttataatgaattggttgacacggtcggcctggagatggccaataaacacgtctttggtccgcaagcgtcttctgaaactggcgtagcagaaggctacgttcttaaacccgtctatccgatcttctttaataccggtacgcgcgtggcgattaaatgcaagaactccaaattttcggagaaagccaagctggactcgccaattagtgttaaggttgaactgacggacaacgataaacgtctgctcgaaatctttagcgagtatgttacctggaatcgcgtcagtaacgtactgtcacatattggctcagtgaccgcaaaagattttgggcgtgtttcgggtctgacgatgaaagacatcattaatgaagcagcacgcgaaggccatgatctgttgttcgctgataacccgtcggcggtgctgaaggagctgactggcctcatccagaacacgattcgctccaaatggcacgaagttctggag

SEQ ID NO: 1176 - protein, 346 aa, synthetic construct
  REGION 1..346: note = variant of RNA ligase 2 from Klebsiella phage KP179
MHHHHHHGGSNMFAYYSSLENHYNNKFIEKIRGAGFLMHTVEWVAREKIHGTNFSVIITPTEIVPAKRTGPILEGESFFGHEIIMKKYKDSFVKVQNMLNAMDLVSVQIFGEFAGGGIQKGVDYGDKDFYVFDILSDSGNEKVYWDDYRVESFCTTLGLKLAPLLGRGSFAELSQYPNDFKSIVNRYNELVDTVGLEMANKHVFGPQASSETGVAEGYVLKPVYPIFFNTGTRVAIKCKNSKFSEKAKLDSPISVKVELTDNDKRLLEIFSEYVTWNRVSNVLSHIGSVTAKDFGRVSGLTMKDIINEAAREGHDLLFADNPSAVLKELTGLIQNTIRSKWHEVLE

SEQ ID NO: 1177 - DNA, 1038 bp, synthetic construct
  misc_feature 1..1038: note = variant of RNA ligase 2 from Klebsiella phage KP179
  source 1..1038: mol_type = other DNA
atgcatcaccatcaccatcacggtggcagcaacacgtttgcgtattattcaagtctggaaaaccattacaatgctaagttcattgagaagatccgtggtgcaggcttcctgatgcacaccgtggaatgggtagctcgcgagaagattcatggaacgaactttagcgttatcattactccgaccgaaatcgtcccagccaaacgcacagggccgatcttggaaggcgagtcgttctttggtcacgaaattatcatgaaaaaatataaagactccttcgtgaaggtgcagaacatgctgaatgccatggatcttgttagcgtgcaaatctttggcgaatttgcgggtggtggcattcagaaaggcgtcgattacggagacaaagatttctatgtgtttgacatcctgtctgatagcgggaacgagaaagtttactgggatgactatcgcgtcgaatcgttttgcaccactctcggtctgaaattagcgcctctgctgggacgtggtagtttcgctgaactgtcccagtacccaaacgatttcaaaagcattgtgaaccgttataatgaattggttgacacggtcggcctggagatggccaataaacacgtctttggtccgcaagcgtcttctgaaactggcgtagcagaaggctacgttcttaaacccgtctatccgatcttctttaataccggtacgcgcgtggcgattaaatgcaagaactccaaattttcggagaaagccaagctggactcgccaattagtgttaaggttgaactgacggagaacgataaacgtctgctcgaaatctttagcgagtatgttacctggaatcgcgtcagtaacgtactgtcacatattggctcagtgaccgcaaaagattttgggcgtgtttcgggtctgacgatgaaagacatcattaatgaagcagcacgcgaaggccatgatctgttgttcgctgataacccgtcggcggtgctgaaggagctgactggcctcatccagaacacgattcgctccaaatggcacgaagttctggag

SEQ ID NO: 1178 - protein, 346 aa, synthetic construct
  REGION 1..346: note = variant of RNA ligase 2 from Klebsiella phage KP179
MHHHHHHGGSNTFAYYSSLENHYNAKFIEKIRGAGFLMHTVEWVAREKIHGTNFSVIITPTEIVPAKRTGPILEGESFFGHEIIMKKYKDSFVKVQNMLNAMDLVSVQIFGEFAGGGIQKGVDYGDKDFYVFDILSDSGNEKVYWDDYRVESFCTTLGLKLAPLLGRGSFAELSQYPNDFKSIVNRYNELVDTVGLEMANKHVFGPQASSETGVAEGYVLKPVYPIFFNTGTRVAIKCKNSKFSEKAKLDSPISVKVELTENDKRLLEIFSEYVTWNRVSNVLSHIGSVTAKDFGRVSGLTMKDIINEAAREGHDLLFADNPSAVLKELTGLIQNTIRSKWHEVLE

SEQ ID NO: 1179 - DNA, 1038 bp, synthetic construct
  misc_feature 1..1038: note = variant of RNA ligase 2 from Klebsiella phage KP179
  source 1..1038: mol_type = other DNA
atgcatcaccatcaccatcacggtggcagcaacatgtttgcgtattattcaagtctggaaaaccattacaataataagttcattgagaagatccgtggtgcaggcttcctgatgcacaccgtggaatgggtagctcgcgagaagattcatggaacgaactttagcgttatcattactccgaccgaaatcgtcccagccaaacgcacagggccgatcttggaaggcgagtcgttctttggtcacgaaattatcatgaaaaaatataaagactccttcgtgaaggtgcagaacatgctgaatgccatggatcttgttagcgtgcaaatctttggcgaatttgcgggtggtggcattcagaaaggcgtcgattacggagacaaagatttctatgtgtttgacatcctgtctgatagcgggaacgagaaagtttactgggatgactatcgcgtcgaatcgttttgcaccactctcggtctgaaattagcgcctctgctgggacgtggtagtttcgctgaactgtcccagtacccaaacgatttcaaaagcattgtgaaccgttataatgaattggttgacacggtcggcctggagatggccaataaacacgtctttggtccgcaagcgtcttctgaaactggcgtagcagaaggctacgttcttaaacccgtctatccgatcttctttaataccggtacgcgcgtggcgattaaatgcaagaactccaaattttcggagaaagccaagctggactcgccaattagtgttagcgttgaactgacggacaacgataaacgtctgctcgaaatctttagcgagtatgttacctggaatcgcgtcagtaacgtactgtcacatattggctcagtgaccgcaaaagattttgggcgtgtttcgggtctgacgatgaaagacatcattaatgaagcagcacgcgaaggccatgatctgttgttcgctgataacccgtcggcggtgctgaaggagctgactggcctcatccagaacacgattcgctccaaatggcacgaagttctggag

SEQ ID NO: 1180 - protein, 346 aa, synthetic construct
  REGION 1..346: note = variant of RNA ligase 2 from Klebsiella phage KP179
MHHHHHHGGSNMFAYYSSLENHYNNKFIEKIRGAGFLMHTVEWVAREKIHGTNFSVIITPTEIVPAKRTGPILEGESFFGHEIIMKKYKDSFVKVQNMLNAMDLVSVQIFGEFAGGGIQKGVDYGDKDFYVFDILSDSGNEKVYWDDYRVESFCTTLGLKLAPLLGRGSFAELSQYPNDFKSIVNRYNELVDTVGLEMANKHVFGPQASSETGVAEGYVLKPVYPIFFNTGTRVAIKCKNSKFSEKAKLDSPISVSVELTDNDKRLLEIFSEYVTWNRVSNVLSHIGSVTAKDFGRVSGLTMKDIINEAAREGHDLLFADNPSAVLKELTGLIQNTIRSKWHEVLE

SEQ ID NO: 1181 - DNA, 1038 bp, synthetic construct
  misc_feature 1..1038: note = variant of RNA ligase 2 from Klebsiella phage KP179
  source 1..1038: mol_type = other DNA
atgcatcaccatcaccatcacggtggcagcaacacgtttgcgtattattcaagtctggaaaaccattacaataataagttcattgagaagatccgtggtgcaggcttcctgatgcacaccgtggaatgggtagctcgcgagaagattcatggaacgaactttagcgttatcattactccgaccgaaatcgtcccagccaaacgcacagggccgatcttggaaggcgagtcgttctttggtcacgaaattatcatgaaaaaatataaagactccttcgtgaaggtgcagaacatgctgaatgccatggatcttgttagcgtgcaaatctttggcgaatttgcgggtggtggcattcagaaaggcgtcgattacggagacaaagatttctatgtgtttgacatcctgtctgatagcgggaacgagaaagtttactgggatgactatcgcgtcgaatcgttttgcaccggtctcggtctgaaattagcgcctctgctgggacgtggtagtttcgctgaactgtcccagtacccaaacgatttcaaaagcattgtgaaccgttataatgaattggttgacacggtcggcctggagatggccaataaacacgtctttggtccgcaagcgtcttctgaaactggcgtagcagaaggctacgttcttaaacccgtctatccgatcttctttaataccggtacgcgcgtggcgattaaatgcaagaactccaaattttcggagaaagccaagctggactcgccaattagttcgaaggatgaactgacggagaacgataaacgtctgctcgaaatctttagcgagtatgttacctggaatcgcgtcagtaacgtactgtcacatattggctcagtgaccgcaaaagattttgggcgtgtttcgggtctgacgatgaaagacatcattaatgaagcagcacgcgaaggccatgatctgttgttcgctgataacccgtcggcggtgctgaaggagctgactggcctcatccagaacacgattcgctccaaatggcacgaagttctggag

SEQ ID NO: 1182 - protein, 346 aa, synthetic construct
  REGION 1..346: note = variant of RNA ligase 2 from Klebsiella phage KP179
MHHHHHHGGSNTFAYYSSLENHYNNKFIEKIRGAGFLMHTVEWVAREKIHGTNFSVIITPTEIVPAKRTGPILEGESFFGHEIIMKKYKDSFVKVQNMLNAMDLVSVQIFGEFAGGGIQKGVDYGDKDFYVFDILSDSGNEKVYWDDYRVESFCTGLGLKLAPLLGRGSFAELSQYPNDFKSIVNRYNELVDTVGLEMANKHVFGPQASSETGVAEGYVLKPVYPIFFNTGTRVAIKCKNSKFSEKAKLDSPISSKDELTENDKRLLEIFSEYVTWNRVSNVLSHIGSVTAKDFGRVSGLTMKDIINEAAREGHDLLFADNPSAVLKELTGLIQNTIRSKWHEVLE

SEQ ID NO: 1183 - DNA, 1038 bp, synthetic construct
  misc_feature 1..1038: note = variant of RNA ligase 2 from Klebsiella phage KP179
  source 1..1038: mol_type = other DNA
atgcatcaccatcaccatcacggtggcagcaacacgtttgcgtattattcaagtctggaaaaccattacaataataagttcattgagaagatccgtggtgcaggcttcctgatgcacaccgtggaatgggtagctcgcgagaagattcatggaacgaactttagcgttatcattactccgaccgaaatcgtcccagccaaacgcacagggccgatcttggaaggcgagtcgttctttggtcacgaaattatcatgaaaaaatataaagactccttcgtgaaggtgcagaacatgctgaatgccatggatcttgttagcgtgcaaatctttggcgaatttgcgggtggtggcattcagaaaggcgtcgattacggagacaaagatttctatgtgtttgacatcctgtctgatagcgggaacgagaaagtttactgggatgactatcgcgtcgaatcgttttgcaccggtctcggtctgaaattagcgcctctgctgggacgtggtagtttcgctgaactgtcccagtacccaaacgatttcaaaagcattgtgaaccgttataatgaattggttgacacggtcggcctggagatggccaataaacacgtctttggtccgcaagcgtcttctgaaactggcgtagcagaaggctacgttcttaaacccgtctatccgatcttctttaataccggtacgcgcgtggcgattaaatgcaagaactccaaattttcggagaaagccaagctggactcgccaattagtgcgaaggatgaactgacggagaacgataaacgtctgctcgaaatctttagcgagtatgttacctggaatcgcgtcagtaacgtactgtcacatattggctcagtgaccgcaaaagattttgggcgtgtttcgggtctgacgatgaaagacatcattaatgaagcagcacgcgaaggccatgatctgttgttcgctgataacccgtcggcggtgctgaaggagctgactggcctcatccagaacacgattcgctccaaatggcacgaagttctggag

SEQ ID NO: 1184 - protein, 346 aa, synthetic construct
  REGION 1..346: note = variant of RNA ligase 2 from Klebsiella phage KP179
MHHHHHHGGSNTFAYYSSLENHYNNKFIEKIRGAGFLMHTVEWVAREKIHGTNFSVIITPTEIVPAKRTGPILEGESFFGHEIIMKKYKDSFVKVQNMLNAMDLVSVQIFGEFAGGGIQKGVDYGDKDFYVFDILSDSGNEKVYWDDYRVESFCTGLGLKLAPLLGRGSFAELSQYPNDFKSIVNRYNELVDTVGLEMANKHVFGPQASSETGVAEGYVLKPVYPIFFNTGTRVAIKCKNSKFSEKAKLDSPISAKDELTENDKRLLEIFSEYVTWNRVSNVLSHIGSVTAKDFGRVSGLTMKDIINEAAREGHDLLFADNPSAVLKELTGLIQNTIRSKWHEVLE

SEQ ID NO: 1185 - DNA, 1038 bp, synthetic construct
  misc_feature 1..1038: note = variant of RNA ligase 2 from Klebsiella phage KP179
  source 1..1038: mol_type = other DNA
atgcatcaccatcaccatcacggtggcagcaacatgtttgcgtattattcaagtctggaaaaccattacaataataagttcattgagaagatccgtggtgcaggcttcctgatgcacaccgtggaatgggtagctcgcgagaagattcatggaacgaactttagcgttatcattactccgaccgaaatcgtcccagccaaacgcacagggccgatcttggaaggcgagtcgttctttggtcacgaaattatcatgaaaaaatataaagactccttcgtgaaggtgcagaacatgctgaatgccatggatcttgttagcgtgcaaatctttggcgaatttgcgggtggtggcattcagaaaggcgtcgattacggagacaaagatttctatgtgtttgacatcctgtctgatagcgggaacgagaaagtttactgggatgactatcgcgtcgaatcgttttgcaccggtctcggtctgaaattagcgcctctgctgggacgtggtagtttcgctgaactgtcccagtacccaaacgatttcaaaagcattgtgaaccgttataatgaattggttgacacggtcggcctggagatggccaataaacacgtctttggtccgcaagcgtcttctgaaactggcgtagcagaaggctacgttcttaaacccgtctatccgatcttctttaataccggtacgcgcgtggcgattaaatgcaagaactccaaattttcggagaaagccaagctggactcgccaattagtgcgagcgatgaactgacggagaacgataaacgtctgctcgaaatctttagcgagtatgttacctggaatcgcgtcagtaacgtactgtcacatattggctcagtgaccgcaaaagattttgggcgtgtttcgggtctgacgatgaaagacatcattaatgaagcagcacgcgaaggccatgatctgttgttcgctgataacccgtcggcggtgctgaaggagctgactggcctcatccagaacacgattcgctccaaatggcacgaagttctggag

SEQ ID NO: 1186 - protein, 346 aa, synthetic construct
  REGION 1..346: note = variant of RNA ligase 2 from Klebsiella phage KP179
MHHHHHHGGSNMFAYYSSLENHYNNKFIEKIRGAGFLMHTVEWVAREKIHGTNFSVIITPTEIVPAKRTGPILEGESFFGHEIIMKKYKDSFVKVQNMLNAMDLVSVQIFGEFAGGGIQKGVDYGDKDFYVFDILSDSGNEKVYWDDYRVESFCTGLGLKLAPLLGRGSFAELSQYPNDFKSIVNRYNELVDTVGLEMANKHVFGPQASSETGVAEGYVLKPVYPIFFNTGTRVAIKCKNSKFSEKAKLDSPISASDELTENDKRLLEIFSEYVTWNRVSNVLSHIGSVTAKDFGRVSGLTMKDIINEAAREGHDLLFADNPSAVLKELTGLIQNTIRSKWHEVLE

SEQ ID NO: 1187 - DNA, 1038 bp, synthetic construct
  misc_feature 1..1038: note = variant of RNA ligase 2 from Klebsiella phage KP179
  source 1..1038: mol_type = other DNA
atgcatcaccatcaccatcacggtggcagcaacatgtttgcgtattattcaagtctggaaaaccattacaataataagttcattgagaagatccgtggtgcaggcttcctgatgcacaccgtggaatgggtagctcgcgagaagattcatggaacgaactttagcgttatcattactccgaccgaaatcgtcccagccaaacgcacagggccgatcttggaaggcgagtcgttctttggtcacgaaattatcatgaaaaaatataaagactccttcgtgaaggtgcagaacatgctgaatgccatggatcttgttagcgtgcaaatctttggcgaatttgcgggtggtggcattcagaaaggcgtcgattacggagacaaagatttctatgtgtttgacatcctgtctgatagcgggaacgagaaagtttactgggatgactatcgcgtcgaatcgttttgcaccggtctcggtctgaaattagcgcctctgctgggacgtggtagtttcgctgaactgtcccagtacccaaacgatttcaaaagcattgtgaaccgttataatgaattggttgacacggtcggcctggagatggccaataaacacgtctttggtccgcaagcgtcttctgaaactggcgtagcagaaggctacgttcttaaacccgtctatccgatcttctttaataccggtacgcgcgtggcgattaaatgcaagaactccaaattttcggagaaagccaagctggactcgccaattagttataaggttgaactgacggagaacgataaacgtctgctcgaaatctttagcgagtatgttacctggaatcgcgtcagtaacgtactgtcacatattggctcagtgaccgcaaaagattttgggcgtgtttcgggtctgacgatgaaagacatcattaatgaagcagcacgcgaaggccatgatctgttgttcgctgataacccgtcggcggtgctgaaggagctgactggcctcatccagaacacgattcgctccaaatggcacgaagttctggag

SEQ ID NO: 1188 - protein, 346 aa, synthetic construct
  REGION 1..346: note = variant of RNA ligase 2 from Klebsiella phage KP179
MHHHHHHGGSNMFAYYSSLENHYNNKFIEKIRGAGFLMHTVEWVAREKIHGTNFSVIITPTEIVPAKRTGPILEGESFFGHEIIMKKYKDSFVKVQNMLNAMDLVSVQIFGEFAGGGIQKGVDYGDKDFYVFDILSDSGNEKVYWDDYRVESFCTGLGLKLAPLLGRGSFAELSQYPNDFKSIVNRYNELVDTVGLEMANKHVFGPQASSETGVAEGYVLKPVYPIFFNTGTRVAIKCKNSKFSEKAKLDSPISYKVELTENDKRLLEIFSEYVTWNRVSNVLSHIGSVTAKDFGRVSGLTMKDIINEAAREGHDLLFADNPSAVLKELTGLIQNTIRSKWHEVLE

SEQ ID NO: 1189 - DNA, 1038 bp, synthetic construct
  misc_feature 1..1038: note = variant of RNA ligase 2 from Klebsiella phage KP179
  source 1..1038: mol_type = other DNA
atgcatcaccatcaccatcacggtggcagcaacacgtttgcgtattattcaagtctggaaaaccattacaatgctaagttcattgagaagatccgtggtgcaggcttcctgatgcacaccgtggaatgggtagctcgcgagaagattcatggaacgaactttagcgttatcattactccgaccgaaatcgtcccagccaaacgcacagggccgatcttggaaggcgagtcgttctttggtcacgaaattatcatgaaaaaatataaagactccttcgtgaaggtgcagaacatgctgaatgccatggatcttgttagcgtgcaaatctttggcgaatttgcgggtggtggcattcagaaaggcgtcgattacggagacaaagatttctatgtgtttgacatcctgtctgatagcgggaacgagaaagtttactgggatgactatcgcgtcgaatcgttttgcaccggtctcggtctgaaattagcgcctctgctgggacgtggtagtttcgctgaactgtcccagtacccaaacgatttcaaaagcattgtgaaccgttataatgaattggttgacacggtcggcctggagatggccaataaacacgtctttggtccgcaagcgtcttctgaaactggcgtagcagaaggctacgttcttaaacccgtctatccgatcttctttaataccggtacgcgcgtggcgattaaatgcaagaactccaaattttcggagaaagccaagctggactcgccaattagtgcgagcgatgaactgacggagaacgataaacgtctgctcgaaatctttagcgagtatgttacctggaatcgcgtcagtaacgtactgtcacatattggctcagtgaccgcaaaagattttgggcgtgtttcgggtctgacgatgaaagacatcattaatgaagcagcacgcgaaggccatgatctgttgttcgctgataacccgtcggcggtgctgaaggagctgactggcctcatccagaacacgattcgctccaaatggcacgaagttctggag

SEQ ID NO: 1190 - protein, 346 aa, synthetic construct
  REGION 1..346: note = variant of RNA ligase 2 from Klebsiella phage KP179
MHHHHHHGGSNTFAYYSSLENHYNAKFIEKIRGAGFLMHTVEWVAREKIHGTNFSVIITPTEIVPAKRTGPILEGESFFGHEIIMKKYKDSFVKVQNMLNAMDLVSVQIFGEFAGGGIQKGVDYGDKDFYVFDILSDSGNEKVYWDDYRVESFCTGLGLKLAPLLGRGSFAELSQYPNDFKSIVNRYNELVDTVGLEMANKHVFGPQASSETGVAEGYVLKPVYPIFFNTGTRVAIKCKNSKFSEKAKLDSPISASDELTENDKRLLEIFSEYVTWNRVSNVLSHIGSVTAKDFGRVSGLTMKDIINEAAREGHDLLFADNPSAVLKELTGLIQNTIRSKWHEVLE

SEQ ID NO: 1191 - DNA, 1038 bp, synthetic construct
  misc_feature 1..1038: note = variant of RNA ligase 2 from Klebsiella phage KP179
  source 1..1038: mol_type = other DNA
atgcatcaccatcaccatcacggtggcagcaacatgtttgcgtattattcaagtctggaaaaccattacaatgctaagttcattgacaagatccgtggtgcaggcttcctgatgcacaccgtggaatgggtagctcgcgagaagattcatggaacgaactttagcgttatcattactccgaccgaaatcgtcccagccaaacgcacagggccgatcttggaaggcgagtcgttctttggtcacgaaattatcatgaaaaaatataaagactccttcgtgaaggtgcagaacatgctgaatgccatggatcttgttagcgtgcaaatctttggcgaatttgcgggtggtggcattcagaaaggcgtcgattacggagacaaagatttctatgtgtttgacatcctgtctgatagcgggaacgagaaagtttactgggatgactatcgcgtcgaatcgttttgcaccggtctcggtctgaaattagcgcctctgctgggacgtggtagtttcgctgaactgtcccagtacccaaacgatttcaaaagcattgtgaaccgttataatgaattggttgacacggtcggcctggagatggccaataaacacgtctttggtccgcaagcgtcttctgaaactggcgtagcagaaggctacgttcttaaacccgtctatccgatcttctttaataccggtacgcgcgtggcgattaaatgcaagaactccaaattttcggagaaagccaagctggactcgccaattagtgcgaaggatgaactgacggacaacgataaacgtctgctcgaaatctttagcgagtatgttacctggaatcgcgtcagtaacgtactgtcacatattggctcagtgaccgcaaaagattttgggcgtgtttcgggtctgacgatgaaagacatcattaatgaagcagcacgcgaaggccatgatctgttgttcgctgataacccgtcggcggtgctgaaggagctgactggcctcatccagaacacgattcgctccaaatggcacgaagttctggag

SEQ ID NO: 1192 - protein, 346 aa, synthetic construct
  REGION 1..346: note = variant of RNA ligase 2 from Klebsiella phage KP179
MHHHHHHGGSNMFAYYSSLENHYNAKFIDKIRGAGFLMHTVEWVAREKIHGTNFSVIITPTEIVPAKRTGPILEGESFFGHEIIMKKYKDSFVKVQNMLNAMDLVSVQIFGEFAGGGIQKGVDYGDKDFYVFDILSDSGNEKVYWDDYRVESFCTGLGLKLAPLLGRGSFAELSQYPNDFKSIVNRYNELVDTVGLEMANKHVFGPQASSETGVAEGYVLKPVYPIFFNTGTRVAIKCKNSKFSEKAKLDSPISAKDELTDNDKRLLEIFSEYVTWNRVSNVLSHIGSVTAKDFGRVSGLTMKDIINEAAREGHDLLFADNPSAVLKELTGLIQNTIRSKWHEVLE

SEQ ID NO: 1193 - DNA, 1038 bp, synthetic construct
  misc_feature 1..1038: note = variant of RNA ligase 2 from Klebsiella phage KP179
  source 1..1038: mol_type = other DNA
atgcatcaccatcaccatcacggtggcagcaacacgtttgcgtattattcaagtctggaaaaccattacaatgctaagttcattgagaagatccgtggtgcaggcttcctgatgcacaccgtggaatgggtagctcgcgagaagattcatggaacgaactttagcgttatcattactccgaccgaaatcgtcccagccaaacgcacagggccgatcttggaaggcgagtcgttctttggtcacgaaattatcatgaaaaaatataaagactccttcgtgaaggtgcagaacatgctgaatgccatggatcttgttagcgtgcaaatctttggcgaatttgcgggtggtggcattcagaaaggcgtcgattacggagacaaagatttctatgtgtttgacatcctgtctgatagcgggaacgagaaagtttactgggatgactatcgcgtcgaatcgttttgcaccactctcggtctgaaattagcgcctctgctgggacgtggtagtttcgctgaactgtcccagtacccaaacgatttcaaaagcattgtgaaccgttataatgaattggttgacacggtcggcctggagatggccaataaacacgtctttggtccgcaagcgtcttctgaaactggcgtagcagaaggctacgttcttaaacccgtctatccgatcttctttaataccggtacgcgcgtggcgattaaatgcaagaactccaaattttcggagaaagccaagctggactcgccaattagtgcgaaggtggaactgacggacaacgataaacgtctgctcgaaatctttagcgagtatgttacctggaatcgcgtcagtaacgtactgtcacatattggctcagtgaccgcaaaagattttgggcgtgtttcgggtctgacgatgaaagacatcattaatgaagcagcacgcgaaggccatgatctgttgttcgctgataacccgtcggcggtgctgaaggagctgactggcctcatccagaacacgattcgctccaaatggcacgaagttctggag

SEQ ID NO: 1194 - protein, 346 aa, synthetic construct
  REGION 1..346: note = variant of RNA ligase 2 from Klebsiella phage KP179
MHHHHHHGGSNTFAYYSSLENHYNAKFIEKIRGAGFLMHTVEWVAREKIHGTNFSVIITPTEIVPAKRTGPILEGESFFGHEIIMKKYKDSFVKVQNMLNAMDLVSVQIFGEFAGGGIQKGVDYGDKDFYVFDILSDSGNEKVYWDDYRVESFCTTLGLKLAPLLGRGSFAELSQYPNDFKSIVNRYNELVDTVGLEMANKHVFGPQASSETGVAEGYVLKPVYPIFFNTGTRVAIKCKNSKFSEKAKLDSPISAKVELTDNDKRLLEIFSEYVTWNRVSNVLSHIGSVTAKDFGRVSGLTMKDIINEAAREGHDLLFADNPSAVLKELTGLIQNTIRSKWHEVLE

SEQ ID NO: 1195 - DNA, 1038 bp, synthetic construct
  misc_feature 1..1038: note = variant of RNA ligase 2 from Klebsiella phage KP179
  source 1..1038: mol_type = other DNA
atgcatcaccatcaccatcacggtggcagcaacatgtttgcgtattattcaagtctggaaaaccattacaataataagttcattgagaagatccgtggtgcaggcttcctgatgcacaccgtggaatgggtagctcgcgagaagattcatggaacgaactttagcgttatcattactccgaccgaaatcgtcccagccaaacgcacagggccgatcttggaaggcgagtcgttctttggtcacgaaattatcatgaaaaaatataaagactccttcgtgaaggtgcagaacatgctgaatgccatggatcttgttagcgtgcaaatctttggcgaatttgcgggtggtggcattcagaaaggcgtcgattacggagacaaagatttctatgtgtttgacatcctgtctgatagcgggaacgagaaagtttactgggatgactatcgcgtcgaatcgttttgcaccggtctcggtctgaaattagcgcctctgctgggacgtggtagtttcgctgaactgtcccagtacccaaacgatttcaaaagcattgtgaaccgttataatgaattggttgacacggtcggcctggagatggccaataaacacgtctttggtccgcaagcgtcttctgaaactggcgtagcagaaggctacgttcttaaacccgtctatccgatcttctttaataccggtacgcgcgtggcgattaaatgcaagaactccaaattttcggagaaagccaagctggactcgccaattagttatagcgttgaactgacggacaacgataaacgtctgctcgaaatctttagcgagtatgttacctggaatcgcgtcagtaacgtactgtcacatattggctcagtgaccgcaaaagattttgggcgtgtttcgggtctgacgatgaaagacatcattaatgaagcagcacgcgaaggccatgatctgttgttcgctgataacccgtcggcggtgctgaaggagctgactggcctcatccagaacacgattcgctccaaatggcacgaagttctggag

SEQ ID NO: 1196 - protein, 346 aa, synthetic construct
  REGION 1..346: note = variant of RNA ligase 2 from Klebsiella phage KP179
MHHHHHHGGSNMFAYYSSLENHYNNKFIEKIRGAGFLMHTVEWVAREKIHGTNFSVIITPTEIVPAKRTGPILEGESFFGHEIIMKKYKDSFVKVQNMLNAMDLVSVQIFGEFAGGGIQKGVDYGDKDFYVFDILSDSGNEKVYWDDYRVESFCTGLGLKLAPLLGRGSFAELSQYPNDFKSIVNRYNELVDTVGLEMANKHVFGPQASSETGVAEGYVLKPVYPIFFNTGTRVAIKCKNSKFSEKAKLDSPISYSVELTDNDKRLLEIFSEYVTWNRVSNVLSHIGSVTAKDFGRVSGLTMKDIINEAAREGHDLLFADNPSAVLKELTGLIQNTIRSKWHEVLE

SEQ ID NO: 1197 - DNA, 1038 bp, synthetic construct
  misc_feature 1..1038: note = variant of RNA ligase 2 from Klebsiella phage KP179
  source 1..1038: mol_type = other DNA
atgcatcaccatcaccatcacggtggcagcaacatgtttgcgtattattcaagtctggaaaaccattacaatgctaagttcattgacaagatccgtggtgcaggcttcctgatgcacaccgtggaatgggtagctcgcgagaagattcatggaacgaactttagcgttatcattactccgaccgaaatcgtcccagccaaacgcacagggccgatcttggaaggcgagtcgttctttggtcacgaaattatcatgaaaaaatataaagactccttcgtgaaggtgcagaacatgctgaatgccatggatcttgttagcgtgcaaatctttggcgaatttgcgggtggtggcattcagaaaggcgtcgattacggagacaaagatttctatgtgtttgacatcctgtctgatagcgggaacgagaaagtttactgggatgactatcgcgtcgaatcgttttgcaccactctcggtctgaaattagcgcctctgctgggacgtggtagtttcgctgaactgtcccagtacccaaacgatttcaaaagcattgtgaaccgttataatgaattggttgacacggtcggcctggagatggccaataaacacgtctttggtccgcaagcgtcttctgaaactggcgtagcagaaggctacgttcttaaacccgtctatccgatcttctttaataccggtacgcgcgtggcgattaaatgcaagaactccaaattttcggagaaagccaagctggactcgccaattagttatagcgatgaactgacggagaacgataaacgtctgctcgaaatctttagcgagtatgttacctggaatcgcgtcagtaacgtactgtcacatattggctcagtgaccgcaaaagattttgggcgtgtttcgggtctgacgatgaaagacatcattaatgaagcagcacgcgaaggccatgatctgttgttcgctgataacccgtcggcggtgctgaaggagctgactggcctcatccagaacacgattcgctccaaatggcacgaagttctggag

SEQ ID NO: 1198 - protein, 346 aa, synthetic construct
  REGION 1..346: note = variant of RNA ligase 2 from Klebsiella phage KP179
MHHHHHHGGSNMFAYYSSLENHYNAKFIDKIRGAGFLMHTVEWVAREKIHGTNFSVIITPTEIVPAKRTGPILEGESFFGHEIIMKKYKDSFVKVQNMLNAMDLVSVQIFGEFAGGGIQKGVDYGDKDFYVFDILSDSGNEKVYWDDYRVESFCTTLGLKLAPLLGRGSFAELSQYPNDFKSIVNRYNELVDTVGLEMANKHVFGPQASSETGVAEGYVLKPVYPIFFNTGTRVAIKCKNSKFSEKAKLDSPISYSDELTENDKRLLEIFSEYVTWNRVSNVLSHIGSVTAKDFGRVSGLTMKDIINEAAREGHDLLFADNPSAVLKELTGLIQNTIRSKWHEVLE

SEQ ID NO: 1199 - DNA, 1038 bp, synthetic construct
  misc_feature 1..1038: note = variant of RNA ligase 2 from Klebsiella phage KP179
  source 1..1038: mol_type = other DNA
atgcatcaccatcaccatcacggtggcagcaacacgtttgcgtattattcaagtctggaaaaccattacaataataagttcattgagaagatccgtggtgcaggcttcctggaacacaccgtggaatgggtagctcgcgagaagattcatggaacgaactttagcgttatcattactccgaccgaaatcgtcccagccaaacgcacagggccgatcttggaaggcgagtcgttctttggtcacgaaattatcatgaaaaaatataaagactccttcgtgaaggtgcagaacatgctgaatgccatggatcttgttagcgtgcaaatctttggcgaatttgcgggtggtggcattcagaaaggcgtcgattacggagacaaagatttctatgtgtttgacatcctgtctgatagcgggaacgagaaagtttactgggatgactatcgcgtcgaatcgttttgcaccaccctcggtctgaaattagcgcctctgctgggacgtggtagtttcgctgaactgtcccagtacccaaacgatttcaaaagcattgtgaaccgttataatgaattggttgacacggtcggcctggagatggccaataaacacgtctttggtccgcaagcgtcttctgaaactggcgtagcagaaggctacgttcttaaacccgtctatccgatcttctttaataccggtacgcgcgtggcgattaaatgcaagaactccaaattttcggagaaagcgaagctggactcggctattagtgcgaaggtggaactgacggagaacgataaacgtctgctcgaaatctttagcgagtatgttacctggaatcgcgtcagtaacgtactgtcacatattggctcagtgaccgcaaaagattttgggcgtgtttcgggtctgacgatgaaagacatcattaatgaagcagcacgcgaaggccatgatctgttgttcgctgataacccgtcggcggtgctgaaggagctgactggcctcatccagaacacgattcgctccaaatggcacgaagttctggag

SEQ ID NO: 1200 - protein, 346 aa, synthetic construct
  REGION 1..346: note = variant of RNA ligase 2 from Klebsiella phage KP179
MHHHHHHGGSNTFAYYSSLENHYNNKFIEKIRGAGFLEHTVEWVAREKIHGTNFSVIITPTEIVPAKRTGPILEGESFFGHEIIMKKYKDSFVKVQNMLNAMDLVSVQIFGEFAGGGIQKGVDYGDKDFYVFDILSDSGNEKVYWDDYRVESFCTTLGLKLAPLLGRGSFAELSQYPNDFKSIVNRYNELVDTVGLEMANKHVFGPQASSETGVAEGYVLKPVYPIFFNTGTRVAIKCKNSKFSEKAKLDSAISAKVELTENDKRLLEIFSEYVTWNRVSNVLSHIGSVTAKDFGRVSGLTMKDIINEAAREGHDLLFADNPSAVLKELTGLIQNTIRSKWHEVLE

SEQ ID NO: 1201 - DNA, 1038 bp, synthetic construct
  misc_feature 1..1038: note = variant of RNA ligase 2 from Klebsiella phage KP179
  source 1..1038: mol_type = other DNA
atgcatcaccatcaccatcacggtggcagcaacatgtttgcgtattattcaagtctggaaaaccattacaataataagttcattgagaagatccgtggtgcaggcttcctgatgcacaccgtggaatgggtagctcgcgagaagattcatggaacgaactttagcgttatcattactccgaccgaaatcgtcccagccaaacgcacagggccgatcttggaaggcgagtcgttctttggtcacgaaattatcatgaaaaaatataaagactccttcgtgaaggtgcagaacatgctgaatgccatggatcttgttagcgtgcaaatctttggcgaatttgcgggtggtggcattcagaaaggcgtcgattacggagacaaagatttctatgtgtttgacatcctgtctgatagcgggaacgagaaagtttactgggatgactatcgcgtcgaatcgttttgcaccggtctcggtctgaaattagcgcctctgctgggacgtggtagtttcgctgaactgtcccagtacccaaacgatttcaaaagcattgtgaaccgttataatgaattggttgacacggtcggcctggagatggccaataaacacgtctttggtccgcaagcgtcttctgaaactggcgtagcagaaggctacgttcttaaacccgtctatccgatcttctttaataccggtacgcgcgtggcgattaaatgcaagaactccaaattttcggagaaagccaagctggactcgccaattagtgttagcgatgaactgacggagaacgataaacgtctgctcgaaatctttagcgagtatgttacctggaatcgcgtcagtaacgtactgtcacatattggctcagtgaccgcaaaagattttgggcgtgtttcgggtctgacgatgaaagacatcattaatgaagcagcacgcgaaggccatgatctgttgttcgctgataacccgtcggcggtgctgaaggagctgactggcctcatccagaacacgattcgctccaaatggcacgaagttctggag

SEQ ID NO: 1202 - protein, 346 aa, synthetic construct
  REGION 1..346: note = variant of RNA ligase 2 from Klebsiella phage KP179
MHHHHHHGGSNMFAYYSSLENHYNNKFIEKIRGAGFLMHTVEWVAREKIHGTNFSVIITPTEIVPAKRTGPILEGESFFGHEIIMKKYKDSFVKVQNMLNAMDLVSVQIFGEFAGGGIQKGVDYGDKDFYVFDILSDSGNEKVYWDDYRVESFCTGLGLKLAPLLGRGSFAELSQYPNDFKSIVNRYNELVDTVGLEMANKHVFGPQASSETGVAEGYVLKPVYPIFFNTGTRVAIKCKNSKFSEKAKLDSPISVSDELTENDKRLLEIFSEYVTWNRVSNVLSHIGSVTAKDFGRVSGLTMKDIINEAAREGHDLLFADNPSAVLKELTGLIQNTIRSKWHEVLE

SEQ ID NO: 1203 - DNA, 1038 bp, synthetic construct
  misc_feature 1..1038: note = variant of RNA ligase 2 from Klebsiella phage KP179
  source 1..1038: mol_type = other DNA
atgcatcaccatcaccatcacggtggcagcaacacgtttgcgtattattcaagtctggaaaaccattacaataataagttcattgagaagatccgtggtgcaggcttcctgatgcacaccgtggaatgggtagctcgcgagaagattcatggaacgaactttagcgttatcattactccgaccgaaatcgtcccagccaaacgcacagggccgatcttggaaggcgagtcgttctttggtcacgaaattatcatgaaaaaatataaagactccttcgtgaaggtgcagaacatgctgaatgccatggatcttgttagcgtgcaaatctttggcgaatttgcgggtggtggcattcagaaaggcgtcgattacggagacaaagatttctatgtgtttgacatcctgtctgatagcgggaacgagaaagtttactgggatgactatcgcgtcgaatcgttttgcaccactctcggtctgaaattagcgcctctgctgggacgtggtagtttcgctgaactgtcccagtacccaaacgatttcaaaagcattgtgaaccgttataatgaattggttgacacggtcggcctggagatggccaataaacacgtctttggtccgcaagcgtcttctgaaactggcgtagcagaaggctacgttcttaaacccgtctatccgatcttctttaataccggtacgcgcgtggcgattaaatgcaagaactccaaattttcggagaaagccaagctggactcgccaattagttcgaaggttgaactgacggagaacgataaacgtctgctcgaaatctttagcgagtatgttacctggaatcgcgtcagtaacgtactgtcacatattggctcagtgaccgcaaaagattttgggcgtgtttcgggtctgacgatgaaagacatcattaatgaagcagcacgcgaaggccatgatctgttgttcgctgataacccgtcggcggtgctgaaggagctgactggcctcatccagaacacgattcgctccaaatggcacgaagttctggag

SEQ ID NO: 1204 - protein, 346 aa, synthetic construct
  REGION 1..346: note = variant of RNA ligase 2 from Klebsiella phage KP179
MHHHHHHGGSNTFAYYSSLENHYNNKFIEKIRGAGFLMHTVEWVAREKIHGTNFSVIITPTEIVPAKRTGPILEGESFFGHEIIMKKYKDSFVKVQNMLNAMDLVSVQIFGEFAGGGIQKGVDYGDKDFYVFDILSDSGNEKVYWDDYRVESFCTTLGLKLAPLLGRGSFAELSQYPNDFKSIVNRYNELVDTVGLEMANKHVFGPQASSETGVAEGYVLKPVYPIFFNTGTRVAIKCKNSKFSEKAKLDSPISSKVELTENDKRLLEIFSEYVTWNRVSNVLSHIGSVTAKDFGRVSGLTMKDIINEAAREGHDLLFADNPSAVLKELTGLIQNTIRSKWHEVLE

SEQ ID NO: 1205 - DNA, 1038 bp, synthetic construct
  misc_feature 1..1038: note = variant of RNA ligase 2 from Klebsiella phage KP179
  source 1..1038: mol_type = other DNA
atgcatcaccatcaccatcacggtggcagcaacacgtttgcgtattattcaagtctggaaaaccattacaataataagttcattgagaagatccgtggtgcaggcttcctgatgcacaccgtggaatgggtagctcgcgagaagattcatggaacgaactttagcgttatcattactccgaccgaaatcgtcccagccaaacgcacagggccgatcttggaaggcgagtcgttctttggtcacgaaattatcatgaaaaaatataaagactccttcgtgaaggtgcagaacatgctgaatgccatggatcttgttagcgtgcaaatctttggcgaatttgcgggtggtggcattcagaaaggcgtcgattacggagacaaagatttctatgtgtttgacatcctgtctgatagcgggaacgagaaagtttactgggatgactatcgcgtcgaatcgttttgcaccaccctcggtctgaaattagcgcctctgctgggacgtggtagtttcgctgaactgtcccagtacccaaacgatttcaaaagcattgtgaaccgttataatgaattggttgacacggtcggcctggagatggccaataaacacgtctttggtccgcaagcgtcttctgaaactggcgtagcagaaggctacgttcttaaacccgtctatccgatcttctttaataccggtacgcgcgtggcgattaaatgcaagaactccaaattttcggagaaagcgaagcgcgactcggctattagtgcgaaggtggaactgacggagaacgataaacgtctgctcgaaatctttagcgagtatgttacctggaatcgcgtcagtaacgtactgtcacatattggctcagtgaccgcaaaagattttgggcgtgtttcgggtctgacgatgaaagacatcattaatgaagcagcacgcgaaggccatgatctgttgttcgctgataacccgtcggcggtgctgaaggagctgactggcctcatccagaacacgattcgctccaaatggcacgaagttctggag

SEQ ID NO: 1206 - protein, 346 aa, synthetic construct
  REGION 1..346: note = variant of RNA ligase 2 from Klebsiella phage KP179
MHHHHHHGGSNTFAYYSSLENHYNNKFIEKIRGAGFLMHTVEWVAREKIHGTNFSVIITPTEIVPAKRTGPILEGESFFGHEIIMKKYKDSFVKVQNMLNAMDLVSVQIFGEFAGGGIQKGVDYGDKDFYVFDILSDSGNEKVYWDDYRVESFCTTLGLKLAPLLGRGSFAELSQYPNDFKSIVNRYNELVDTVGLEMANKHVFGPQASSETGVAEGYVLKPVYPIFFNTGTRVAIKCKNSKFSEKAKRDSAISAKVELTENDKRLLEIFSEYVTWNRVSNVLSHIGSVTAKDFGRVSGLTMKDIINEAAREGHDLLFADNPSAVLKELTGLIQNTIRSKWHEVLE

SEQ ID NO: 1207 - DNA, 1038 bp, synthetic construct
  misc_feature 1..1038: note = variant of RNA ligase 2 from Klebsiella phage KP179
  source 1..1038: mol_type = other DNA
atgcatcaccatcaccatcacggtggcagcaacatgtttgcgtattattcaagtctggaaaaccattacaataataagttcattgagaagatccgtggtgcaggcttcctgatgcacaccgtggaatgggtagctcgcgagaagattcatggaacgaactttagcgttatcattactccgaccgaaatcgtcccagccaaacgcacagggccgatcttggaaggcgagtcgttctttggtcacgaaattatcatgaaaaaatataaagactccttcgtgaaggtgcagaacatgctgaatgccatggatcttgttagcgtgcaaatctttggcgaatttgcgggtggtggcattcagaaaggcgtcgattacggagacaaagatttctatgtgtttgacatcctgtctgatagcgggaacgagaaagtttactgggatgactatcgcgtcgaatcgttttgcaccggtctcggtctgaaattagcgcctctgctgggacgtggtagtttcgctgaactgtcccagtacccaaacgatttcaaaagcattgtgaaccgttataatgaattggttgacacggtcggcctggagatggccaataaacacgtctttggtccgcaagcgtcttctgaaactggcgtagcagaaggctacgttcttaaacccgtctatccgatcttctttaataccggtacgcgcgtggcgattaaatgcaagaactccaaattttcggagaaagccaagctggactcgccaattagttatagcgttgaactgacggagaacgataaacgtctgctcgaaatctttagcgagtatgttacctggaatcgcgtcagtaacgtactgtcacatattggctcagtgaccgcaaaagattttgggcgtgtttcgggtctgacgatgaaagacatcattaatgaagcagcacgcgaaggccatgatctgttgttcgctgataacccgtcggcggtgctgaaggagctgactggcctcatccagaacacgattcgctccaaatggcacgaagttctggag

SEQ ID NO: 1208 - protein, 346 aa, synthetic construct
  REGION 1..346: note = variant of RNA ligase 2 from Klebsiella phage KP179
MHHHHHHGGSNMFAYYSSLENHYNNKFIEKIRGAGFLMHTVEWVAREKIHGTNFSVIITPTEIVPAKRTGPILEGESFFGHEIIMKKYKDSFVKVQNMLNAMDLVSVQIFGEFAGGGIQKGVDYGDKDFYVFDILSDSGNEKVYWDDYRVESFCTGLGLKLAPLLGRGSFAELSQYPNDFKSIVNRYNELVDTVGLEMANKHVFGPQASSETGVAEGYVLKPVYPIFFNTGTRVAIKCKNSKFSEKAKLDSPISYSVELTENDKRLLEIFSEYVTWNRVSNVLSHIGSVTAKDFGRVSGLTMKDIINEAAREGHDLLFADNPSAVLKELTGLIQNTIRSKWHEVLE

SEQ ID NO: 1209 - DNA, 1038 bp, synthetic construct
  misc_feature 1..1038: note = variant of RNA ligase 2 from Klebsiella phage KP179
  source 1..1038: mol_type = other DNA
atgcatcaccatcaccatcacggtggcagcaacatgtttgcgtattattcaagtctggaaaaccattacaatgctaagttcattgacaagatccgtggtgcaggcttcctgatgcacaccgtggaatgggtagctcgcgagaagattcatggaacgaactttagcgttatcattactccgaccgaaatcgtcccagccaaacgcacagggccgatcttggaaggcgagtcgttctttggtcacgaaattatcatgaaaaaatataaagactccttcgtgaaggtgcagaacatgctgaatgccatggatcttgttagcgtgcaaatctttggcgaatttgcgggtggtggcattcagaaaggcgtcgattacggagacaaagatttctatgtgtttgacatcctgtctgatagcgggaacgagaaagtttactgggatgactatcgcgtcgaatcgttttgcaccactctcggtctgaaattagcgcctctgctgggacgtggtagtttcgctgaactgtcccagtacccaaacgatttcaaaagcattgtgaaccgttataatgaattggttgacacggtcggcctggagatggccaataaacacgtctttggtccgcaagcgtcttctgaaactggcgtagcagaaggctacgttcttaaacccgtctatccgatcttctttaataccggtacgcgcgtggcgattaaatgcaagaactccaaattttcggagaaagccaagctggactcgccaattagtgcgaaggtggaactgacggacaacgataaacgtctgctcgaaatctttagcgagtatgttacctggaatcgcgtcagtaacgtactgtcacatattggctcagtgaccgcaaaagattttgggcgtgtttcgggtctgacgatgaaagacatcattaatgaagcagcacgcgaaggccatgatctgttgttcgctgataacccgtcggcggtgctgaaggagctgactggcctcatccagaacacgattcgctccaaatggcacgaagttctggag

SEQ ID NO: 1210 - protein, 346 aa, synthetic construct
  REGION 1..346: note = variant of RNA ligase 2 from Klebsiella phage KP179
MHHHHHHGGSNMFAYYSSLENHYNAKFIDKIRGAGFLMHTVEWVAREKIHGTNFSVIITPTEIVPAKRTGPILEGESFFGHEIIMKKYKDSFVKVQNMLNAMDLVSVQIFGEFAGGGIQKGVDYGDKDFYVFDILSDSGNEKVYWDDYRVESFCTTLGLKLAPLLGRGSFAELSQYPNDFKSIVNRYNELVDTVGLEMANKHVFGPQASSETGVAEGYVLKPVYPIFFNTGTRVAIKCKNSKFSEKAKLDSPISAKVELTDNDKRLLEIFSEYVTWNRVSNVLSHIGSVTAKDFGRVSGLTMKDIINEAAREGHDLLFADNPSAVLKELTGLIQNTIRSKWHEVLE

SEQ ID NO: 1211 - DNA, 1038 bp, synthetic construct
  misc_feature 1..1038: note = variant of RNA ligase 2 from Klebsiella phage KP179
  source 1..1038: mol_type = other DNA
atgcatcaccatcaccatcacggtggcagcaacacgtttgcgtattattcaagtctggaaaaccattacaataataagttcattgagaagatccgtggtgcaggcttcctgatgcacaccgtggaatgggtagctcgcgagaagattcatggaacgaactttagcgttatcattactccgaccgaaatcgtcccagccaaacgcacagggccgatcttggaaggcgagtcgttctttggtcacgaaattatcatgaaaaaatataaagactccttcgtgaaggtgcagaacatgctgaatgccatggatcttgttagcgtgcaaatctttggcgaatttgcgggtggtggcattcagaaaggcgtcgattacggagacaaagatttctatgtgtttgacatcctgtctgatagcgggaacgagaaagtttactgggatgactatcgcgtcgaatcgttttgcaccactctcggtctgaaattagcgcctctgctgggacgtggtagtttcgctgaactgtcccagtacccaaacgatttcaaaagcattgtgaaccgttataatgaattggttgacacggtcggcctggagatggccaataaacacgtctttggtccgcaagcgtcttctgaaactggcgtagcagaaggctacgttcttaaacccgtctatccgatcttctttaataccggtacgcgcgtggcgattaaatgcaagaactccaaattttcggagaaagccaagctggactcgccaattagtgcgaaggatgaactgacggagaacgataaacgtctgctcgaaatctttagcgagtatgttacctggaatcgcgtcagtaacgtactgtcacatattggctcagtgaccgcaaaagattttgggcgtgtttcgggtctgacgatgaaagacatcattaatgaagcagcacgcgaaggccatgatctgttgttcgctgataacccgtcggcggtgctgaaggagctgactggcctcatccagaacacgattcgctccaaatggcacgaagttctggag

SEQ ID NO: 1212 - protein, 346 aa, synthetic construct
  REGION 1..346: note = variant of RNA ligase 2 from Klebsiella phage KP179
MHHHHHHGGSNTFAYYSSLENHYNNKFIEKIRGAGFLMHTVEWVAREKIHGTNFSVIITPTEIVPAKRTGPILEGESFFGHEIIMKKYKDSFVKVQNMLNAMDLVSVQIFGEFAGGGIQKGVDYGDKDFYVFDILSDSGNEKVYWDDYRVESFCTTLGLKLAPLLGRGSFAELSQYPNDFKSIVNRYNELVDTVGLEMANKHVFGPQASSETGVAEGYVLKPVYPIFFNTGTRVAIKCKNSKFSEKAKLDSPISAKDELTENDKRLLEIFSEYVTWNRVSNVLSHIGSVTAKDFGRVSGLTMKDIINEAAREGHDLLFADNPSAVLKELTGLIQNTIRSKWHEVLE

SEQ ID NO: 1213 - DNA, 1038 bp, synthetic construct
  misc_feature 1..1038: note = variant of RNA ligase 2 from Klebsiella phage KP179
  source 1..1038: mol_type = other DNA
atgcatcaccatcaccatcacggtggcagcaacatgtttgcgtattattcaagtctggaaaaccattacaataataagttcattgagaagatccgtggtgcaggcttcctgatgcacaccgtggaatgggtagctcgcgagaagattcatggaacgaactttagcgttatcattactccgaccgaaatcgtcccagccaaacgcacagggccgatcttggaaggcgagtcgttctttggtcacgaaattatcatgaaaaaatataaagactccttcgtgaaggtgcagaacatgctgaatgccatggatcttgttagcgtgcaaatctttggcgaatttgcgggtggtggcattcagaaaggcgtcgattacggagacaaagatttctatgtgtttgacatcctgtctgatagcgggaacgagaaagtttactgggatgactatcgcgtcgaatcgttttgcaccactctcggtctgaaattagcgcctctgctgggacgtggtagtttcgctgaactgtcccagtacccaaacgatttcaaaagcattgtgaaccgttataatgaattggttgacacggtcggcctggagatggccaataaacacgtctttggtccgcaagcgtcttctgaaactggcgtagcagaaggctacgttcttaaacccgtctatccgatcttctttaataccggtacgcgcgtggcgattaaatgcaagaactccaaattttcggagaaagccaagctggactcgccaattagtaatagcgttgaactgacggagaacgataaacgtctgctcgaaatctttagcgagtatgttacctggaatcgcgtcagtaacgtactgtcacatattggctcagtgaccgcaaaagattttgggcgtgtttcgggtctgacgatgaaagacatcattaatgaagcagcacgcgaaggccatgatctgttgttcgctgataacccgtcggcggtgctgaaggagctgactggcctcatccagaacacgattcgctccaaatggcacgaagttctggag

SEQ ID NO: 1214 - protein, 346 aa, synthetic construct
  REGION 1..346: note = variant of RNA ligase 2 from Klebsiella phage KP179
MHHHHHHGGSNMFAYYSSLENHYNNKFIEKIRGAGFLMHTVEWVAREKIHGTNFSVIITPTEIVPAKRTGPILEGESFFGHEIIMKKYKDSFVKVQNMLNAMDLVSVQIFGEFAGGGIQKGVDYGDKDFYVFDILSDSGNEKVYWDDYRVESFCTTLGLKLAPLLGRGSFAELSQYPNDFKSIVNRYNELVDTVGLEMANKHVFGPQASSETGVAEGYVLKPVYPIFFNTGTRVAIKCKNSKFSEKAKLDSPISNSVELTENDKRLLEIFSEYVTWNRVSNVLSHIGSVTAKDFGRVSGLTMKDIINEAAREGHDLLFADNPSAVLKELTGLIQNTIRSKWHEVLE

SEQ ID NO: 1215 - DNA, 1038 bp, synthetic construct
  misc_feature 1..1038: note = variant of RNA ligase 2 from Klebsiella phage KP179
  source 1..1038: mol_type = other DNA
atgcatcaccatcaccatcacggtggcagcaacatgtttgcgtattattcaagtctggaaaaccattacaataataagttcattgacaagatccgtggtgcaggcttcctgatgcacaccgtggaatgggtagctcgcgagaagattcatggaacgaactttagcgttatcattactccgaccgaaatcgtcccagccaaacgcacagggccgatcttggaaggcgagtcgttctttggtcacgaaattatcatgaaaaaatataaagactccttcgtgaaggtgcagaacatgctgaatgccatggatcttgttagcgtgcaaatctttggcgaatttgcgggtggtggcattcagaaaggcgtcgattacggagacaaagatttctatgtgtttgacatcctgtctgatagcgggaacgagaaagtttactgggatgactatcgcgtcgaatcgttttgcaccactctcggtctgaaattagcgcctctgctgggacgtggtagtttcgctgaactgtcccagtacccaaacgatttcaaaagcattgtgaaccgttataatgaattggttgacacggtcggcctggagatggccaataaacacgtctttggtccgcaagcgtcttctgaaactggcgtagcagaaggctacgttcttaaacccgtctatccgatcttctttaataccggtacgcgcgtggcgattaaatgcaagaactccaaattttcggagaaagccaagctggactcgccaattagtaataaggttgaactgacggagaacgataaacgtctgctcgaaatctttagcgagtatgttacctggaatcgcgtcagtaacgtactgtcacatattggctcagtgaccgcaaaagattttgggcgtgtttcgggtctgacgatgaaagacatcattaatgaagcagcacgcgaaggccatgatctgttgttcgctgataacccgtcggcggtgctgaaggagctgactggcctcatccagaacacgattcgctccaaatggcacgaagttctggag

SEQ ID NO: 1216 - protein, 346 aa, synthetic construct
  REGION 1..346: note = variant of RNA ligase 2 from Klebsiella phage KP179
MHHHHHHGGSNMFAYYSSLENHYNNKFIDKIRGAGFLMHTVEWVAREKIHGTNFSVIITPTEIVPAKRTGPILEGESFFGHEIIMKKYKDSFVKVQNMLNAMDLVSVQIFGEFAGGGIQKGVDYGDKDFYVFDILSDSGNEKVYWDDYRVESFCTTLGLKLAPLLGRGSFAELSQYPNDFKSIVNRYNELVDTVGLEMANKHVFGPQASSETGVAEGYVLKPVYPIFFNTGTRVAIKCKNSKFSEKAKLDSPISNKVELTENDKRLLEIFSEYVTWNRVSNVLSHIGSVTAKDFGRVSGLTMKDIINEAAREGHDLLFADNPSAVLKELTGLIQNTIRSKWHEVLE

SEQ ID NO: 1217 - DNA, 1038 bp, synthetic construct
  misc_feature 1..1038: note = variant of RNA ligase 2 from Klebsiella phage KP179
  source 1..1038: mol_type = other DNA
atgcatcaccatcaccatcacggtggcagcaacatgtttgcgtattattcaagtctggaaaaccattacaataataagttcattgagaagatccgtggtgcaggcttcctgatgcacaccgtggaatgggtagctcgcgagaagattcatggaacgaactttagcgttatcattactccgaccgaaatcgtcccagccaaacgcacagggccgatcttggaaggcgagtcgttctttggtcacgaaattatcatgaaaaaatataaagactccttcgtgaaggtgcagaacatgctgaatgccatggatcttgttagcgtgcaaatctttggcgaatttgcgggtggtggcattcagaaaggcgtcgattacggagacaaagatttctatgtgtttgacatcctgtctgatagcgggaacgagaaagtttactgggatgactatcgcgtcgaatcgttttgcaccactctcggtctgaaattagcgcctctgctgggacgtggtagtttcgctgaactgtcccagtacccaaacgatttcaaaagcattgtgaaccgttataatgaattggttgacacggtcggcctggagatggccaataaacacgtctttggtccgcaagcgtcttctgaaactggcgtagcagaaggctacgttcttaaacccgtctatccgatcttctttaataccggtacgcgcgtggcgattaaatgcaagaactccaaattttcggagaaagccaagctggactcgccaattagtgttaaggatgaactgacggacaacgataaacgtctgctcgaaatctttagcgagtatgttacctggaatcgcgtcagtaacgtactgtcacatattggctcagtgaccgcaaaagattttgggcgtgtttcgggtctgacgatgaaagacatcattaatgaagcagcacgcgaaggccatgatctgttgttcgctgataacccgtcggcggtgctgaaggagctgactggcctcatccagaacacgattcgctccaaatggcacgaagttctggag

SEQ ID NO: 1218 - protein, 346 aa, synthetic construct
  REGION 1..346: note = variant of RNA ligase 2 from Klebsiella phage KP179
MHHHHHHGGSNMFAYYSSLENHYNNKFIEKIRGAGFLMHTVEWVAREKIHGTNFSVIITPTEIVPAKRTGPILEGESFFGHEIIMKKYKDSFVKVQNMLNAMDLVSVQIFGEFAGGGIQKGVDYGDKDFYVFDILSDSGNEKVYWDDYRVESFCTTLGLKLAPLLGRGSFAELSQYPNDFKSIVNRYNELVDTVGLEMANKHVFGPQASSETGVAEGYVLKPVYPIFFNTGTRVAIKCKNSKFSEKAKLDSPISVKDELTDNDKRLLEIFSEYVTWNRVSNVLSHIGSVTAKDFGRVSGLTMKDIINEAAREGHDLLFADNPSAVLKELTGLIQNTIRSKWHEVLE

SEQ ID NO: 1219 - DNA, 1038 bp, synthetic construct
  misc_feature 1..1038: note = variant of RNA ligase 2 from Klebsiella phage KP179
  source 1..1038: mol_type = other DNA
atgcatcaccatcaccatcacggtggcagcaacatgtttgcgtattattcaagtctggaaaaccattacaataataagttcattgagaagatccgtggtgcaggcttcctgatgcacaccgtggaatgggtagctcgcgagaagattcatggaacgaactttagcgttatcattactccgaccgaaatcgtcccagccaaacgcacagggccgatcttggaaggcgagtcgttctttggtcacgaaattatcatgaaaaaatataaagactccttcgtgaaggtgcagaacatgctgaatgccatggatcttgttagcgtgcaaatctttggcgaatttgcgggtggtggcattcagaaaggcgtcgattacggagacaaagatttctatgtgtttgacatcctgtctgatagcgggaacgagaaagtttactgggatgactatcgcgtcgaatcgttttgcaccactctcggtctgaaattagcgcctctgctgggacgtggtagtttcgctgaactgtcccagtacccaaacgatttcaaaagcattgtgaaccgttataatgaattggttgacacggtcggcctggagatggccaataaacacgtctttggtccgcaagcgtcttctgaaactggcgtagcagaaggctacgttcttaaacccgtctatccgatcttctttaataccggtacgcgcgtggcgattaaatgcaagaactccaaattttcggagaaagccaagctggactcgccaattagttataaggatgaactgacggagaacgataaacgtctgctcgaaatctttagcgagtatgttacctggaatcgcgtcagtaacgtactgtcacatattggctcagtgaccgcaaaagattttgggcgtgtttcgggtctgacgatgaaagacatcattaatgaagcagcacgcgaaggccatgatctgttgttcgctgataacccgtcggcggtgctgaaggagctgactggcctcatccagaacacgattcgctccaaatggcacgaagttctggag

SEQ ID NO: 1220 - protein, 346 aa, synthetic construct
  REGION 1..346: note = variant of RNA ligase 2 from Klebsiella phage KP179
MHHHHHHGGSNMFAYYSSLENHYNNKFIEKIRGAGFLMHTVEWVAREKIHGTNFSVIITPTEIVPAKRTGPILEGESFFGHEIIMKKYKDSFVKVQNMLNAMDLVSVQIFGEFAGGGIQKGVDYGDKDFYVFDILSDSGNEKVYWDDYRVESFCTTLGLKLAPLLGRGSFAELSQYPNDFKSIVNRYNELVDTVGLEMANKHVFGPQASSETGVAEGYVLKPVYPIFFNTGTRVAIKCKNSKFSEKAKLDSPISYKDELTENDKRLLEIFSEYVTWNRVSNVLSHIGSVTAKDFGRVSGLTMKDIINEAAREGHDLLFADNPSAVLKELTGLIQNTIRSKWHEVLE

SEQ ID NO: 1221 - DNA, 1038 bp, synthetic construct
  misc_feature 1..1038: note = variant of RNA ligase 2 from Klebsiella phage KP179
  source 1..1038: mol_type = other DNA
atgcatcaccatcaccatcacggtggcagcaacatgtttgcgtattattcaagtctggaaaaccattacaataataagttcattgagaagatccgtggtgcaggcttcctgatgcacaccgtggaatgggtagctcgcgagaagattcatggaacgaactttagcgttatcattactccgaccgaaatcgtcccagccaaacgcacagggccgatcttggaaggcgagtcgttctttggtcacgaaattatcatgaaaaaatataaagactccttcgtgaaggtgcagaacatgctgaatgccatggatcttgttagcgtgcaaatctttggcgaatttgcgggtggtggcattcagaaaggcgtcgattacggagacaaagatttctatgtgtttgacatcctgtctgatagcgggaacgagaaagtttactgggatgactatcgcgtcgaatcgttttgcaccggtctcggtctgaaattagcgcctctgctgggacgtggtagtttcgctgaactgtcccagtacccaaacgatttcaaaagcattgtgaaccgttataatgaattggttgacacggtcggcctggagatggccaataaacacgtctttggtccgcaagcgtcttctgaaactggcgtagcagaaggctacgttcttaaacccgtctatccgatcttctttaataccggtacgcgcgtggcgattaaatgcaagaactccaaattttcggagaaagccaagctggactcgccaattagtgcgaaggatgaactgacggagaacgataaacgtctgctcgaaatctttagcgagtatgttacctggaatcgcgtcagtaacgtactgtcacatattggctcagtgaccgcaaaagattttgggcgtgtttcgggtctgacgatgaaagacatcattaatgaagcagcacgcgaaggccatgatctgttgttcgctgataacccgtcggcggtgctgaaggagctgactggcctcatccagaacacgattcgctccaaatggcacgaagttctggag

SEQ ID NO: 1222 - protein, 346 aa, synthetic construct
  REGION 1..346: note = variant of RNA ligase 2 from Klebsiella phage KP179
MHHHHHHGGSNMFAYYSSLENHYNNKFIEKIRGAGFLMHTVEWVAREKIHGTNFSVIITPTEIVPAKRTGPILEGESFFGHEIIMKKYKDSFVKVQNMLNAMDLVSVQIFGEFAGGGIQKGVDYGDKDFYVFDILSDSGNEKVYWDDYRVESFCTGLGLKLAPLLGRGSFAELSQYPNDFKSIVNRYNELVDTVGLEMANKHVFGPQASSETGVAEGYVLKPVYPIFFNTGTRVAIKCKNSKFSEKAKLDSPISAKDELTENDKRLLEIFSEYVTWNRVSNVLSHIGSVTAKDFGRVSGLTMKDIINEAAREGHDLLFADNPSAVLKELTGLIQNTIRSKWHEVLE

SEQ ID NO: 1223 - DNA, 1038 bp, synthetic construct
  misc_feature 1..1038: note = variant of RNA ligase 2 from Klebsiella phage KP179
  source 1..1038: mol_type = other DNA
atgcatcaccatcaccatcacggtggcagcaacacgtttgcgtattattcaagtctggaaaaccattacaataataagttcattgagaagatccgtggtgcaggcttcctgatgcacaccgtggaatgggtagctcgcgagaagattcatggaacgaactttagcgttatcattactccgaccgaaatcgtcccagccaaacgcacagggccgatcttggaaggcgagtcgttctttggtcacgaaattatcatgaaaaaatataaagactccttcgtgaaggtgcagaacatgctgaatgccatggatcttgttagcgtgcaaatctttggcgaatttgcgggtggtggcattcagaaaggcgtcgattacggagacaaagatttctatgtgtttgacatcctgtctgatagcgggaacgagaaagtttactgggatgactatcgcgtcgaatcgttttgcaccaccctcggtctgaaattagcgcctctgctgggacgtggtagtttcgctgaactgtcccagtacccaaacgatttcaaaagcattgtgaaccgttataatgaattggttaacacggtcggcctggagatggccaataaacacgtctttggtccgcaagcgtcttctgaaactggcgtagcagaaggctacgttcttaaacccgtctatccgatcttctttaataccggtacgcgcgtggcgattaaatgcaagaactccaaattttcggagaaagcgaagcgcgacacggctattagtgcgaaggtggaactgacggagaacgataaacgtctgctcgaaatctttagcgagtatgttacctggaatcgcgtcagtaacgtactgtcacatattggctcagtgaccgcaaaagattttgggcgtgtttcgggtctgacgatgaaagacatcattaatgaagcagcacgcgaaggccatgatctgttgttcgctgataacccgtcggcggtgctgaaggagctgactggcctcatccagaacacgattcgctccaaatggcacgaagttctggag

SEQ ID NO: 1224 - protein, 346 aa, synthetic construct
  REGION 1..346: note = variant of RNA ligase 2 from Klebsiella phage KP179
MHHHHHHGGSNTFAYYSSLENHYNNKFIEKIRGAGFLMHTVEWVAREKIHGTNFSVIITPTEIVPAKRTGPILEGESFFGHEIIMKKYKDSFVKVQNMLNAMDLVSVQIFGEFAGGGIQKGVDYGDKDFYVFDILSDSGNEKVYWDDYRVESFCTTLGLKLAPLLGRGSFAELSQYPNDFKSIVNRYNELVNTVGLEMANKHVFGPQASSETGVAEGYVLKPVYPIFFNTGTRVAIKCKNSKFSEKAKRDTAISAKVELTENDKRLLEIFSEYVTWNRVSNVLSHIGSVTAKDFGRVSGLTMKDIINEAAREGHDLLFADNPSAVLKELTGLIQNTIRSKWHEVLE

SEQ ID NO: 1225 - DNA, 1038 bp, synthetic construct
  misc_feature 1..1038: note = variant of RNA ligase 2 from Klebsiella phage KP179
  source 1..1038: mol_type = other DNA
atgcatcaccatcaccatcacggtggcagcaacatgtttgcgtattattcaagtctggaaaaccattacaatgctaagttcattgacaagatccgtggtgcaggcttcctgatgcacaccgtggaatgggtagctcgcgagaagattcatggaacgaactttagcgttatcattactccgaccgaaatcgtcccagccaaacgcacagggccgatcttggaaggcgagtcgttctttggtcacgaaattatcatgaaaaaatataaagactccttcgtgaaggtgcagaacatgctgaatgccatggatcttgttagcgtgcaaatctttggcgaatttgcgggtggtggcattcagaaaggcgtcgattacggagacaaagatttctatgtgtttgacatcctgtctgatagcgggaacgagaaagtttactgggatgactatcgcgtcgaatcgttttgcaccactctcggtctgaaattagcgcctctgctgggacgtggtagtttcgctgaactgtcccagtacccaaacgatttcaaaagcattgtgaaccgttataatgaattggttgacacggtcggcctggagatggccaataaacacgtctttggtccgcaagcgtcttctgaaactggcgtagcagaaggctacgttcttaaacccgtctatccgatcttctttaataccggtacgcgcgtggcgattaaatgcaagaactccaaattttcggagaaagccaagctggactcgccaattagtaatagcgatgaactgacggagaacgataaacgtctgctcgaaatctttagcgagtatgttacctggaatcgcgtcagtaacgtactgtcacatattggctcagtgaccgcaaaagattttgggcgtgtttcgggtctgacgatgaaagacatcattaatgaagcagcacgcgaaggccatgatctgttgttcgctgataacccgtcggcggtgctgaaggagctgactggcctcatccagaacacgattcgctccaaatggcacgaagttctggag

SEQ ID NO: 1226 - protein, 346 aa, synthetic construct
  REGION 1..346: note = variant of RNA ligase 2 from Klebsiella phage KP179
MHHHHHHGGSNMFAYYSSLENHYNAKFIDKIRGAGFLMHTVEWVAREKIHGTNFSVIITPTEIVPAKRTGPILEGESFFGHEIIMKKYKDSFVKVQNMLNAMDLVSVQIFGEFAGGGIQKGVDYGDKDFYVFDILSDSGNEKVYWDDYRVESFCTTLGLKLAPLLGRGSFAELSQYPNDFKSIVNRYNELVDTVGLEMANKHVFGPQASSETGVAEGYVLKPVYPIFFNTGTRVAIKCKNSKFSEKAKLDSPISNSDELTENDKRLLEIFSEYVTWNRVSNVLSHIGSVTAKDFGRVSGLTMKDIINEAAREGHDLLFADNPSAVLKELTGLIQNTIRSKWHEVLE

SEQ ID NO: 1227 - DNA, 1038 bp, synthetic construct
  misc_feature 1..1038: note = variant of RNA ligase 2 from Klebsiella phage KP179
  source 1..1038: mol_type = other DNA
atgcatcaccatcaccatcacggtggcagcaacatgtttgcgtattattcaagtctggaaaaccattacaatgctaagttcattgacaagatccgtggtgcaggcttcctgatgcacaccgtggaatgggtagctcgcgagaagattcatggaacgaactttagcgttatcattactccgaccgaaatcgtcccagccaaacgcacagggccgatcttggaaggcgagtcgttctttggtcacgaaattatcatgaaaaaatataaagactccttcgtgaaggtgcagaacatgctgaatgccatggatcttgttagcgtgcaaatctttggcgaatttgcgggtggtggcattcagaaaggcgtcgattacggagacaaagatttctatgtgtttgacatcctgtctgatagcgggaacgagaaagtttactgggatgactatcgcgtcgaatcgttttgcaccactctcggtctgaaattagcgcctctgctgggacgtggtagtttcgctgaactgtcccagtacccaaacgatttcaaaagcattgtgaaccgttataatgaattggttgacacggtcggcctggagatggccaataaacacgtctttggtccgcaagcgtcttctgaaactggcgtagcagaaggctacgttcttaaacccgtctatccgatcttctttaataccggtacgcgcgtggcgattaaatgcaagaactccaaattttcggagaaagccaagctggactcgccaattagtgttaaggttgaactgacggacaacgataaacgtctgctcgaaatctttagcgagtatgttacctggaatcgcgtcagtaacgtactgtcacatattggctcagtgaccgcaaaagattttgggcgtgtttcgggtctgacgatgaaagacatcattaatgaagcagcacgcgaaggccatgatctgttgttcgctgataacccgtcggcggtgctgaaggagctgactggcctcatccagaacacgattcgctccaaatggcacgaagttctggag

SEQ ID NO: 1228 - protein, 346 aa, synthetic construct
  REGION 1..346: note = variant of RNA ligase 2 from Klebsiella phage KP179
MHHHHHHGGSNMFAYYSSLENHYNAKFIDKIRGAGFLMHTVEWVAREKIHGTNFSVIITPTEIVPAKRTGPILEGESFFGHEIIMKKYKDSFVKVQNMLNAMDLVSVQIFGEFAGGGIQKGVDYGDKDFYVFDILSDSGNEKVYWDDYRVESFCTTLGLKLAPLLGRGSFAELSQYPNDFKSIVNRYNELVDTVGLEMANKHVFGPQASSETGVAEGYVLKPVYPIFFNTGTRVAIKCKNSKFSEKAKLDSPISVKVELTDNDKRLLEIFSEYVTWNRVSNVLSHIGSVTAKDFGRVSGLTMKDIINEAAREGHDLLFADNPSAVLKELTGLIQNTIRSKWHEVLE

SEQ ID NO: 1229 - DNA, 1038 bp, synthetic construct
  misc_feature 1..1038: note = variant of RNA ligase 2 from Klebsiella phage KP179
  source 1..1038: mol_type = other DNA
atgcatcaccatcaccatcacggtggcagcaacatgtttgcgtattattcaagtctggaaaaccattacaataataagttcattgagaagatccgtggtgcaggcttcctgatgcacaccgtggaatgggtagctcgcgagaagattcatggaacgaactttagcgttatcattactccgaccgaaatcgtcccagccaaacgcacagggccgatcttggaaggcgagtcgttctttggtcacgaaattatcatgaaaaaatataaagactccttcgtgaaggtgcagaacatgctgaatgccatggatcttgttagcgtgcaaatctttggcgaatttgcgggtggtggcattcagaaaggcgtcgattacggagacaaagatttctatgtgtttgacatcctgtctgatagcgggaacgagaaagtttactgggatgactatcgcgtcgaatcgttttgcaccggtctcggtctgaaattagcgcctctgctgggacgtggtagtttcgctgaactgtcccagtacccaaacgatttcaaaagcattgtgaaccgttataatgaattggttgacacggtcggcctggagatggccaataaacacgtctttggtccgcaagcgtcttctgaaactggcgtagcagaaggctacgttcttaaacccgtctatccgatcttctttaataccggtacgcgcgtggcgattaaatgcaagaactccaaattttcggagaaagccaagctggactcgccaattagttataaggatgaactgacggagaacgataaacgtctgctcgaaatctttagcgagtatgttacctggaatcgcgtcagtaacgtactgtcacatattggctcagtgaccgcaaaagattttgggcgtgtttcgggtctgacgatgaaagacatcattaatgaagcagcacgcgaaggccatgatctgttgttcgctgataacccgtcggcggtgctgaaggagctgactggcctcatccagaacacgattcgctccaaatggcacgaagttctggag

SEQ ID NO: 1230 - protein, 346 aa, synthetic construct
  REGION 1..346: note = variant of RNA ligase 2 from Klebsiella phage KP179
MHHHHHHGGSNMFAYYSSLENHYNNKFIEKIRGAGFLMHTVEWVAREKIHGTNFSVIITPTEIVPAKRTGPILEGESFFGHEIIMKKYKDSFVKVQNMLNAMDLVSVQIFGEFAGGGIQKGVDYGDKDFYVFDILSDSGNEKVYWDDYRVESFCTGLGLKLAPLLGRGSFAELSQYPNDFKSIVNRYNELVDTVGLEMANKHVFGPQASSETGVAEGYVLKPVYPIFFNTGTRVAIKCKNSKFSEKAKLDSPISYKDELTENDKRLLEIFSEYVTWNRVSNVLSHIGSVTAKDFGRVSGLTMKDIINEAAREGHDLLFADNPSAVLKELTGLIQNTIRSKWHEVLE

SEQ ID NO: 1231 - DNA, 1038 bp, synthetic construct
  misc_feature 1..1038: note = variant of RNA ligase 2 from Klebsiella phage KP179
  source 1..1038: mol_type = other DNA
atgcatcaccatcaccatcacggtggcagcaacatgtttgcgtattattcaagtctggaaaaccattacaataataagttcattgacaagatccgtggtgcaggcttcctgatgcacaccgtggaatgggtagctcgcgagaagattcatggaacgaactttagcgttatcattactccgaccgaaatcgtcccagccaaacgcacagggccgatcttggaaggcgagtcgttctttggtcacgaaattatcatgaaaaaatataaagactccttcgtgaaggtgcagaacatgctgaatgccatggatcttgttagcgtgcaaatctttggcgaatttgcgggtggtggcattcagaaaggcgtcgattacggagacaaagatttctatgtgtttgacatcctgtctgatagcgggaacgagaaagtttactgggatgactatcgcgtcgaatcgttttgcaccactctcggtctgaaattagcgcctctgctgggacgtggtagtttcgctgaactgtcccagtacccaaacgatttcaaaagcattgtgaaccgttataatgaattggttgacacggtcggcctggagatggccaataaacacgtctttggtccgcaagcgtcttctgaaactggcgtagcagaaggctacgttcttaaacccgtctatccgatcttctttaataccggtacgcgcgtggcgattaaatgcaagaactccaaattttcggagaaagccaagctggactcgccaattagtgttaaggatgaactgacggagaacgataaacgtctgctcgaaatctttagcgagtatgttacctggaatcgcgtcagtaacgtactgtcacatattggctcagtgaccgcaaaagattttgggcgtgtttcgggtctgacgatgaaagacatcattaatgaagcagcacgcgaaggccatgatctgttgttcgctgataacccgtcggcggtgctgaaggagctgactggcctcatccagaacacgattcgctccaaatggcacgaagttctggag

SEQ ID NO: 1232 - protein, 346 aa, synthetic construct
  REGION 1..346: note = variant of RNA ligase 2 from Klebsiella phage KP179
MHHHHHHGGSNMFAYYSSLENHYNNKFIDKIRGAGFLMHTVEWVAREKIHGTNFSVIITPTEIVPAKRTGPILEGESFFGHEIIMKKYKDSFVKVQNMLNAMDLVSVQIFGEFAGGGIQKGVDYGDKDFYVFDILSDSGNEKVYWDDYRVESFCTTLGLKLAPLLGRGSFAELSQYPNDFKSIVNRYNELVDTVGLEMANKHVFGPQASSETGVAEGYVLKPVYPIFFNTGTRVAIKCKNSKFSEKAKLDSPISVKDELTENDKRLLEIFSEYVTWNRVSNVLSHIGSVTAKDFGRVSGLTMKDIINEAAREGHDLLFADNPSAVLKELTGLIQNTIRSKWHEVLE

SEQ ID NO: 1233 - DNA, 1038 bp, synthetic construct
  misc_feature 1..1038: note = variant of RNA ligase 2 from Klebsiella phage KP179
  source 1..1038: mol_type = other DNA
atgcatcaccatcaccatcacggtggcagcaacatgtttgcgtattattcaagtctggaaaaccattacaataataagttcattgacaagatccgtggtgcaggcttcctgatgcacaccgtggaatgggtagctcgcgagaagattcatggaacgaactttagcgttatcattactccgaccgaaatcgtcccagccaaacgcacagggccgatcttggaaggcgagtcgttctttggtcacgaaattatcatgaaaaaatataaagactccttcgtgaaggtgcagaacatgctgaatgccatggatcttgttagcgtgcaaatctttggcgaatttgcgggtggtggcattcagaaaggcgtcgattacggagacaaagatttctatgtgtttgacatcctgtctgatagcgggaacgagaaagtttactgggatgactatcgcgtcgaatcgttttgcaccactctcggtctgaaattagcgcctctgctgggacgtggtagtttcgctgaactgtcccagtacccaaacgatttcaaaagcattgtgaaccgttataatgaattggttgacacggtcggcctggagatggccaataaacacgtctttggtccgcaagcgtcttctgaaactggcgtagcagaaggctacgttcttaaacccgtctatccgatcttctttaataccggtacgcgcgtggcgattaaatgcaagaactccaaattttcggagaaagccaagctggactcgccaattagtgcgagcgatgaactgacggagaacgataaacgtctgctcgaaatctttagcgagtatgttacctggaatcgcgtcagtaacgtactgtcacatattggctcagtgaccgcaaaagattttgggcgtgtttcgggtctgacgatgaaagacatcattaatgaagcagcacgcgaaggccatgatctgttgttcgctgataacccgtcggcggtgctgaaggagctgactggcctcatccagaacacgattcgctccaaatggcacgaagttctggag

SEQ ID NO: 1234 - protein, 346 aa, synthetic construct
  REGION 1..346: note = variant of RNA ligase 2 from Klebsiella phage KP179
MHHHHHHGGSNMFAYYSSLENHYNNKFIDKIRGAGFLMHTVEWVAREKIHGTNFSVIITPTEIVPAKRTGPILEGESFFGHEIIMKKYKDSFVKVQNMLNAMDLVSVQIFGEFAGGGIQKGVDYGDKDFYVFDILSDSGNEKVYWDDYRVESFCTTLGLKLAPLLGRGSFAELSQYPNDFKSIVNRYNELVDTVGLEMANKHVFGPQASSETGVAEGYVLKPVYPIFFNTGTRVAIKCKNSKFSEKAKLDSPISASDELTENDKRLLEIFSEYVTWNRVSNVLSHIGSVTAKDFGRVSGLTMKDIINEAAREGHDLLFADNPSAVLKELTGLIQNTIRSKWHEVLE

SEQ ID NO: 1235 - DNA, 1038 bp, synthetic construct
  misc_feature 1..1038: note = variant of RNA ligase 2 from Klebsiella phage KP179
  source 1..1038: mol_type = other DNA
atgcatcaccatcaccatcacggtggcagcaacacgtttgcgtattattcagcgctggaaaaccattacaataataagttcattgagaagatccgtggtgcaggcttcctgatgcacaccgtggaatgggtagctcgcgagaagattcatggaacgaactttagcgttatcattactccgaccgaaatcgtcccagccaaacgcacagggccgatcttggaaggcgagtcgttctttggtcacgaaattatcatgaaaaaatataaagactccttcgtgaaggtgcagaacatgctgaatgccatggatcttgttagcgtgcaaatctttggcgaatttgcgggtggtggcattcagaaaggcgtcgattacggagacaaagatttctatgtgtttgacatcctgtctgatagcgggaacgagaaagtttactgggatgactatcgcgtcgaatcgttttgcaccaccctcggtctgaaattagcgcctctgctgggacgtggtagtttcgctgaactgtcccagtacccaaacgatttcaaaagcattgtgaaccgttataatgaattggttgacacggtcggcctggagatggccaataaacacgtctttggtccgcaagcgtcttctgaaactggcgtagcagaaggctacgttcttaaacccgtctatccgatcttctttaataccggtacgcgcgtggcgattaaatgcaagaactccaaattttcggagaaagcgaagctggactcggctattagtgcgaaggtggaactgacggagaacgataaacgtctgctcgaaatctttagcgagtatgttacctggaatcgcgtcagtaacgtactgtcacatattggctcagtgaccgcaaaagattttgggcgtgtttcgggtctgacgatgaaagacatcattaatgaagcagcacgcgaaggccatgatctgttgttcgctgataacccgtcggcggtgctgaaggagctgactggcctcatccagaacacgattcgctccaaatggcacgaagttctggag

SEQ ID NO: 1236 - protein, 346 aa, synthetic construct
  REGION 1..346: note = variant of RNA ligase 2 from Klebsiella phage KP179
MHHHHHHGGSNTFAYYSALENHYNNKFIEKIRGAGFLMHTVEWVAREKIHGTNFSVIITPTEIVPAKRTGPILEGESFFGHEIIMKKYKDSFVKVQNMLNAMDLVSVQIFGEFAGGGIQKGVDYGDKDFYVFDILSDSGNEKVYWDDYRVESFCTTLGLKLAPLLGRGSFAELSQYPNDFKSIVNRYNELVDTVGLEMANKHVFGPQASSETGVAEGYVLKPVYPIFFNTGTRVAIKCKNSKFSEKAKLDSAISAKVELTENDKRLLEIFSEYVTWNRVSNVLSHIGSVTAKDFGRVSGLTMKDIINEAAREGHDLLFADNPSAVLKELTGLIQNTIRSKWHEVLE

SEQ ID NO: 1237 - DNA, 1038 bp, synthetic construct
  misc_feature 1..1038: note = variant of RNA ligase 2 from Klebsiella phage KP179
  source 1..1038: mol_type = other DNA
atgcatcaccatcaccatcacggtggcagcaacacgtttgcgtattattcatcgctggaaaaccattacaataataagttcattgagaagatccgtggtgcaggcttcctgatgcacaccgtggaatgggtagctcgcgagaagattcatggaacgaactttagcgttatcattactccgaccgaaatcgtcccagccaaacgcacagggccgatcttggaaggcgagtcgttctttggtcacgaaattatcatgaaaaaatataaagactccttcgtgaaggtgcagaacatgctgaatgccatggatcttgttagcgtgcaaatctttggcgaatttgcgggtggtggcattcagaaaggcgtcgattacggagacaaagatttctatgtgtttgacatcctgtctgatagcgggaacgagaaagtttactgggatgactatcgcgtcgaatcgttttgcaccactctcggtctgaaattagcgcctctgctgggacgtggtagtttcgctgaactgtcccagtacccaaacgatttcaaaagcattgtgaaccgttataatgaattggttgacacggtcggcctggagatggccaataaacacgtctttggtccgcaagcgtcttctgaaactggcgtagcagaaggctacgttcttaaacccgtctatccgatcttctttaataccggtacgcgcgtggcgattaaatgcaagaactccaaattttcggagaaagcgaagcgcgactcgcctattagtgcgaaggtggaactgacggagaacgataaacgtctgctcgaaatctttagcgagtatgttacctggaatcgcgtcagtaacgtactgtcacatattggctcagtgaccgcaaaagattttgggcgtgtttcgggtctgacgatgaaagacatcattaatgaagcagcacgcgaaggccatgatctgttgttcgctgataacccgtcggcggtgctgaaggagctgactggcctcatccagaacacgattcgctccaaatggcacgaagttctggag

SEQ ID NO: 1238 - protein, 346 aa, synthetic construct
  REGION 1..346: note = variant of RNA ligase 2 from Klebsiella phage KP179
MHHHHHHGGSNTFAYYSSLENHYNNKFIEKIRGAGFLMHTVEWVAREKIHGTNFSVIITPTEIVPAKRTGPILEGESFFGHEIIMKKYKDSFVKVQNMLNAMDLVSVQIFGEFAGGGIQKGVDYGDKDFYVFDILSDSGNEKVYWDDYRVESFCTTLGLKLAPLLGRGSFAELSQYPNDFKSIVNRYNELVDTVGLEMANKHVFGPQASSETGVAEGYVLKPVYPIFFNTGTRVAIKCKNSKFSEKAKRDSPISAKVELTENDKRLLEIFSEYVTWNRVSNVLSHIGSVTAKDFGRVSGLTMKDIINEAAREGHDLLFADNPSAVLKELTGLIQNTIRSKWHEVLE

SEQ ID NO: 1239 - DNA, 1038 bp, synthetic construct
  misc_feature 1..1038: note = variant of RNA ligase 2 from Klebsiella phage KP179
  source 1..1038: mol_type = other DNA
atgcatcaccatcaccatcacggtggcagcaacacgtttgcgtattattcaagtctggaaaaccattacaataataagttcattgagaagatccgtggtgcaggcttcctgatgcacaccgtggaatgggtagctcgcgagaagattcatggaacgaactttagcgttatcattactccgaccgaaatcgtcccagccaaacgcacagggccgatcttggaaggcgagtcgttctttggtcacgaaattatcatgaaaaaatataaagactccttcgtgaaggtgcagaacatgctgaatgccatggatcttgttagcgtgcaaatctttggcgaatttgcgggtggtggcattcagaaaggcgtcgattacggagacaaagatttctatgtgtttgacatcctgtctgatagcgggaacgagaaagtttactgggatgactatcgcgtcgaatcgttttgcaccggcctcggtctgaaattagcgcctctgctgggacgtggtagtttcgctgaactgtcccagtacccaaacgatttcaaaagcattgtgaaccgttataatgaattggttgacacggtcggcctggagatggccaataaacacgtctttggtccgcaagcgtcttctgaaactggcgtagcagaaggctacgttcttaaacccgtctatccgatcttctttaataccggtacgcgcgtggcgattaaatgcaagaactccaaattttcggagaaagcgaagctgatttcgcctattagtgcgaaggtggaactgacggagaacgataaacgtctgctcgaaatctttagcgagtatgttacctggaatcgcgtcagtaacgtactgtcacatattggctcagtgaccgcaaaagattttgggcgtgtttcgggtctgacgatgaaagacatcattaatgaagcagcacgcgaaggccatgatctgttgttcgctgataacccgtcggcggtgctgaaggagctgactggcctcatccagaacacgattcgctccaaatggcacgaagttctggag

SEQ ID NO: 1240 - protein, 346 aa, synthetic construct
  REGION 1..346: note = variant of RNA ligase 2 from Klebsiella phage KP179
MHHHHHHGGSNTFAYYSSLENHYNNKFIEKIRGAGFLMHTVEWVAREKIHGTNFSVIITPTEIVPAKRTGPILEGESFFGHEIIMKKYKDSFVKVQNMLNAMDLVSVQIFGEFAGGGIQKGVDYGDKDFYVFDILSDSGNEKVYWDDYRVESFCTGLGLKLAPLLGRGSFAELSQYPNDFKSIVNRYNELVDTVGLEMANKHVFGPQASSETGVAEGYVLKPVYPIFFNTGTRVAIKCKNSKFSEKAKLISPISAKVELTENDKRLLEIFSEYVTWNRVSNVLSHIGSVTAKDFGRVSGLTMKDIINEAAREGHDLLFADNPSAVLKELTGLIQNTIRSKWHEVLE

SEQ ID NO: 1241 - DNA, 1038 bp, synthetic construct
  misc_feature 1..1038: note = variant of RNA ligase 2 from Klebsiella phage KP179
  source 1..1038: mol_type = other DNA
atgcatcaccatcaccatcacggtggcagcaacacgtttgcgtattattcaagtctggaaaaccattacaataataagttcattgagaagatccgtggtgcaggcttcctggaacacaccgtggaatgggtagctcgcgagaagattcatggaacgaactttagcgttatcattactccgaccgaaatcgtcccagccaaacgcacagggccgatcttggaaggcgagtcgttctttggtcacgaaattatcatgaaaaaatataaagactccttcgtgaaggtgcagaacatgctgaatgccatggatcttgttagcgtgcaaatctttggcgaatttgcgggtggtggcattcagaaaggcgtcgattacggagacaaagatttctatgtgtttgacatcctgtctgatagcgggaacgagaaagtttactgggatgactatcgcgtcgaatcgttttgcaccaccctcggtctgaaattagcgcctctgctgggacgtggtagtttcgctgaactgtcccagtacccaaacgatttcaaaagcattgtgaaccgttataatgaattggttgacacggtcggcctggagatggccaataaacacgtctttggtccgcaagcgtcttctgaaactggcgtagcagaaggctacgttcttaaacccgtctatccgatcttctttaataccggtacgcgcgtggcgattaaatgcaagaactccaaattttcggagaaagccaagctggacacggctattagtgcgaaggtggaactgacggagaacgataaacgtctgctcgaaatctttagcgagtatgttacctggaatcgcgtcagtaacgtactgtcacatattggctcagtgaccgcaaaagattttgggcgtgtttcgggtctgacgatgaaagacatcattaatgaagcagcacgcgaaggccatgatctgttgttcgctgataacccgtcggcggtgctgaaggagctgactggcctcatccagaacacgattcgctccaaatggcacgaagttctggag

SEQ ID NO: 1242 - protein, 346 aa, synthetic construct
  REGION 1..346: note = variant of RNA ligase 2 from Klebsiella phage KP179
MHHHHHHGGSNTFAYYSSLENHYNNKFIEKIRGAGFLEHTVEWVAREKIHGTNFSVIITPTEIVPAKRTGPILEGESFFGHEIIMKKYKDSFVKVQNMLNAMDLVSVQIFGEFAGGGIQKGVDYGDKDFYVFDILSDSGNEKVYWDDYRVESFCTTLGLKLAPLLGRGSFAELSQYPNDFKSIVNRYNELVDTVGLEMANKHVFGPQASSETGVAEGYVLKPVYPIFFNTGTRVAIKCKNSKFSEKAKLDTAISAKVELTENDKRLLEIFSEYVTWNRVSNVLSHIGSVTAKDFGRVSGLTMKDIINEAAREGHDLLFADNPSAVLKELTGLIQNTIRSKWHEVLE

SEQ ID NO: 1243 - DNA, 1038 bp, synthetic construct
  misc_feature 1..1038: note = variant of RNA ligase 2 from Klebsiella phage KP179
  source 1..1038: mol_type = other DNA
atgcatcaccatcaccatcacggtggcagcaacacgtttgcgtattattcaagtctggaaaaccattacaataataagttcattgagaagatccgtggtgcaggcttcctgatgcacaccgtggaatgggtagctcgcgagaagattcatggaacgaactttagcgttatcattactccgaccgaaatcgtcccagccaaacgcacagggccgatcttggaaggcgagtcgttctttggtcacgaaattatcatgaaaaaatataaagactccttcgtgaaggtgcagaacatgctgaatgccatggatcttgttagcgtgcaaatctttggcgaatttgcgggtggtggcattcagaaaggcgtcgattacggagacaaagatttctatgtgtttgacatcctgtctgatagcgggaacgagaaagtttactgggatgactatcgcgtcgaatcgttttgcaccggtctcggtctgaaattagcgcctctgctgggacgtggtagtttcgctgaactgtcccagtacccaaacgatttcaaaagcattgtgaaccgttataatgaattggttgacacggtcggcctggagatggccaataaacacgtctttggtccgcaagcgtcttctgaaactggcgtagcagaaggctacgttcttaaacccgtctatccgatcttctttaataccggtacgcgcgtggcgattaaatgcaagaactccaaattttcggagaaagccaagctggactcgccaattagttatagcgatgaactgacggagaacgataaacgtctgctcgaaatctttagcgagtatgttacctggaatcgcgtcagtaacgtactgtcacatattggctcagtgaccgcaaaagattttgggcgtgtttcgggtctgacgatgaaagacatcattaatgaagcagcacgcgaaggccatgatctgttgttcgctgataacccgtcggcggtgctgaaggagctgactggcctcatccagaacacgattcgctccaaatggcacgaagttctggag

SEQ ID NO: 1244 - protein, 346 aa, synthetic construct
  REGION 1..346: note = variant of RNA ligase 2 from Klebsiella phage KP179
MHHHHHHGGSNTFAYYSSLENHYNNKFIEKIRGAGFLMHTVEWVAREKIHGTNFSVIITPTEIVPAKRTGPILEGESFFGHEIIMKKYKDSFVKVQNMLNAMDLVSVQIFGEFAGGGIQKGVDYGDKDFYVFDILSDSGNEKVYWDDYRVESFCTGLGLKLAPLLGRGSFAELSQYPNDFKSIVNRYNELVDTVGLEMANKHVFGPQASSETGVAEGYVLKPVYPIFFNTGTRVAIKCKNSKFSEKAKLDSPISYSDELTENDKRLLEIFSEYVTWNRVSNVLSHIGSVTAKDFGRVSGLTMKDIINEAAREGHDLLFADNPSAVLKELTGLIQNTIRSKWHEVLE

SEQ ID NO: 1245 - DNA, 1038 bp, synthetic construct
  misc_feature 1..1038: note = variant of RNA ligase 2 from Klebsiella phage KP179
  source 1..1038: mol_type = other DNA
atgcatcaccatcaccatcacggtggcagcaacacgtttgcgtattattcaagtctggaaaaccattacaatgctaagttcattgagaagatccgtggtgcaggcttcctgatgcacaccgtggaatgggtagctcgcgagaagattcatggaacgaactttagcgttatcattactccgaccgaaatcgtcccagccaaacgcacagggccgatcttggaaggcgagtcgttctttggtcacgaaattatcatgaaaaaatataaagactccttcgtgaaggtgcagaacatgctgaatgccatggatcttgttagcgtgcaaatctttggcgaatttgcgggtggtggcattcagaaaggcgtcgattacggagacaaagatttctatgtgtttgacatcctgtctgatagcgggaacgagaaagtttactgggatgactatcgcgtcgaatcgttttgcaccactctcggtctgaaattagcgcctctgctgggacgtggtagtttcgctgaactgtcccagtacccaaacgatttcaaaagcattgtgaaccgttataatgaattggttgacacggtcggcctggagatggccaataaacacgtctttggtccgcaagcgtcttctgaaactggcgtagcagaaggctacgttcttaaacccgtctatccgatcttctttaataccggtacgcgcgtggcgattaaatgcaagaactccaaattttcggagaaagccaagctggactcgccaattagtgcgaaggatgaactgacggagaacgataaacgtctgctcgaaatctttagcgagtatgttacctggaatcgcgtcagtaacgtactgtcacatattggctcagtgaccgcaaaagattttgggcgtgtttcgggtctgacgatgaaagacatcattaatgaagcagcacgcgaaggccatgatctgttgttcgctgataacccgtcggcggtgctgaaggagctgactggcctcatccagaacacgattcgctccaaatggcacgaagttctggag

SEQ ID NO: 1246 - protein, 346 aa, synthetic construct
  REGION 1..346: note = variant of RNA ligase 2 from Klebsiella phage KP179
MHHHHHHGGSNTFAYYSSLENHYNAKFIEKIRGAGFLMHTVEWVAREKIHGTNFSVIITPTEIVPAKRTGPILEGESFFGHEIIMKKYKDSFVKVQNMLNAMDLVSVQIFGEFAGGGIQKGVDYGDKDFYVFDILSDSGNEKVYWDDYRVESFCTTLGLKLAPLLGRGSFAELSQYPNDFKSIVNRYNELVDTVGLEMANKHVFGPQASSETGVAEGYVLKPVYPIFFNTGTRVAIKCKNSKFSEKAKLDSPISAKDELTENDKRLLEIFSEYVTWNRVSNVLSHIGSVTAKDFGRVSGLTMKDIINEAAREGHDLLFADNPSAVLKELTGLIQNTIRSKWHEVLE

SEQ ID NO: 1247 - DNA, 1038 bp, synthetic construct
  misc_feature 1..1038: note = variant of RNA ligase 2 from Klebsiella phage KP179
  source 1..1038: mol_type = other DNA
atgcatcaccatcaccatcacggtggcagcaacatgtttgcgtattattcaagtctggaaaaccattacaataataagttcattgagaagatccgtggtgcaggcttcctgatgcacaccgtggaatgggtagctcgcgagaagattcatggaacgaactttagcgttatcattactccgaccgaaatcgtcccagccaaacgcacagggccgatcttggaaggcgagtcgttctttggtcacgaaattatcatgaaaaaatataaagactccttcgtgaaggtgcagaacatgctgaatgccatggatcttgttagcgtgcaaatctttggcgaatttgcgggtggtggcattcagaaaggcgtcgattacggagacaaagatttctatgtgtttgacatcctgtctgatagcgggaacgagaaagtttactgggatgactatcgcgtcgaatcgttttgcaccactctcggtctgaaattagcgcctctgctgggacgtggtagtttcgctgaactgtcccagtacccaaacgatttcaaaagcattgtgaaccgttataatgaattggttgacacggtcggcctggagatggccaataaacacgtctttggtccgcaagcgtcttctgaaactggcgtagcagaaggctacgttcttaaacccgtctatccgatcttctttaataccggtacgcgcgtggcgattaaatgcaagaactccaaattttcggagaaagccaagctggactcgccaattagtgttagcgatgaactgacggacaacgataaacgtctgctcgaaatctttagcgagtatgttacctggaatcgcgtcagtaacgtactgtcacatattggctcagtgaccgcaaaagattttgggcgtgtttcgggtctgacgatgaaagacatcattaatgaagcagcacgcgaaggccatgatctgttgttcgctgataacccgtcggcggtgctgaaggagctgactggcctcatccagaacacgattcgctccaaatggcacgaagttctggag

SEQ ID NO: 1248 - protein, 346 aa, synthetic construct
  REGION 1..346: note = variant of RNA ligase 2 from Klebsiella phage KP179
MHHHHHHGGSNMFAYYSSLENHYNNKFIEKIRGAGFLMHTVEWVAREKIHGTNFSVIITPTEIVPAKRTGPILEGESFFGHEIIMKKYKDSFVKVQNMLNAMDLVSVQIFGEFAGGGIQKGVDYGDKDFYVFDILSDSGNEKVYWDDYRVESFCTTLGLKLAPLLGRGSFAELSQYPNDFKSIVNRYNELVDTVGLEMANKHVFGPQASSETGVAEGYVLKPVYPIFFNTGTRVAIKCKNSKFSEKAKLDSPISVSDELTDNDKRLLEIFSEYVTWNRVSNVLSHIGSVTAKDFGRVSGLTMKDIINEAAREGHDLLFADNPSAVLKELTGLIQNTIRSKWHEVLE

SEQ ID NO: 1249 - DNA, 1038 bp, synthetic construct
  misc_feature 1..1038: note = variant of RNA ligase 2 from Klebsiella phage KP179
  source 1..1038: mol_type = other DNA
atgcatcaccatcaccatcacggtggcagcaacacgtttgcgtattattcaagtctggaaaaccattacaatgctaagttcattgagaagatccgtggtgcaggcttcctgatgcacaccgtggaatgggtagctcgcgagaagattcatggaacgaactttagcgttatcattactccgaccgaaatcgtcccagccaaacgcacagggccgatcttggaaggcgagtcgttctttggtcacgaaattatcatgaaaaaatataaagactccttcgtgaaggtgcagaacatgctgaatgccatggatcttgttagcgtgcaaatctttggcgaatttgcgggtggtggcattcagaaaggcgtcgattacggagacaaagatttctatgtgtttgacatcctgtctgatagcgggaacgagaaagtttactgggatgactatcgcgtcgaatcgttttgcaccggtctcggtctgaaattagcgcctctgctgggacgtggtagtttcgctgaactgtcccagtacccaaacgatttcaaaagcattgtgaaccgttataatgaattggttgacacggtcggcctggagatggccaataaacacgtctttggtccgcaagcgtcttctgaaactggcgtagcagaaggctacgttcttaaacccgtctatccgatcttctttaataccggtacgcgcgtggcgattaaatgcaagaactccaaattttcggagaaagccaagctggactcgccaattagtgcgaaggtggaactgacggacaacgataaacgtctgctcgaaatctttagcgagtatgttacctggaatcgcgtcagtaacgtactgtcacatattggctcagtgaccgcaaaagattttgggcgtgtttcgggtctgacgatgaaagacatcattaatgaagcagcacgcgaaggccatgatctgttgttcgctgataacccgtcggcggtgctgaaggagctgactggcctcatccagaacacgattcgctccaaatggcacgaagttctggag

SEQ ID NO: 1250 - protein, 346 aa, synthetic construct
  REGION 1..346: note = variant of RNA ligase 2 from Klebsiella phage KP179
MHHHHHHGGSNTFAYYSSLENHYNAKFIEKIRGAGFLMHTVEWVAREKIHGTNFSVIITPTEIVPAKRTGPILEGESFFGHEIIMKKYKDSFVKVQNMLNAMDLVSVQIFGEFAGGGIQKGVDYGDKDFYVFDILSDSGNEKVYWDDYRVESFCTGLGLKLAPLLGRGSFAELSQYPNDFKSIVNRYNELVDTVGLEMANKHVFGPQASSETGVAEGYVLKPVYPIFFNTGTRVAIKCKNSKFSEKAKLDSPISAKVELTDNDKRLLEIFSEYVTWNRVSNVLSHIGSVTAKDFGRVSGLTMKDIINEAAREGHDLLFADNPSAVLKELTGLIQNTIRSKWHEVLE

SEQ ID NO: 1251 - DNA, 1038 bp, synthetic construct
  misc_feature 1..1038: note = variant of RNA ligase 2 from Klebsiella phage KP179
  source 1..1038: mol_type = other DNA
atgcatcaccatcaccatcacggtggcagcaacacgtttgcgtattattcatcgctggaaaaccattacaataataagttcattgagaagatccgtggtgcaggcttcctgatgcacaccgtggaatgggtagctcgcgagaagattcatggaacgaactttagcgttatcattactccgaccgaaatcgtcccagccaaacgcacagggccgatcttggaaggcgagtcgttctttggtcacgaaattatcatgaaaaaatataaagactccttcgtgaaggtgcagaacatgctgaatgccatggatcttgttagcgtgcaaatctttggcgaatttgcgggtggtggcattcagaaaggcgtcgattacggagacaaagatttctatgtgtttgacatcctgtctgatagcgggaacgagaaagtttactgggatgactatcgcgtcgaatcgttttgcaccggcctcggtctgaaattagcgcctctgctgggacgtggtagtttcgctgaactgtcccagtacccaaacgatttcaaaagcattgtgaaccgttataatgaattggttgacacggtcggcctggagatggccaataaacacgtctttggtccgcaagcgtcttctgaaactggcgtagcagaaggctacgttcttaaacccgtctatccgatcttctttaataccggtacgcgcgtggcgattaaatgcaagaactccaaattttcggagaaagccaagctggattcggctattagtgcgaaggtggaactgacggagaacgataaacgtctgctcgaaatctttagcgagtatgttacctggaatcgcgtcagtaacgtactgtcacatattggctcagtgaccgcaaaagattttgggcgtgtttcgggtctgacgatgaaagacatcattaatgaagcagcacgcgaaggccatgatctgttgttcgctgataacccgtcggcggtgctgaaggagctgactggcctcatccagaacacgattcgctccaaatggcacgaagttctggag

SEQ ID NO: 1252 - protein, 346 aa, synthetic construct
  REGION 1..346: note = variant of RNA ligase 2 from Klebsiella phage KP179
MHHHHHHGGSNTFAYYSSLENHYNNKFIEKIRGAGFLMHTVEWVAREKIHGTNFSVIITPTEIVPAKRTGPILEGESFFGHEIIMKKYKDSFVKVQNMLNAMDLVSVQIFGEFAGGGIQKGVDYGDKDFYVFDILSDSGNEKVYWDDYRVESFCTGLGLKLAPLLGRGSFAELSQYPNDFKSIVNRYNELVDTVGLEMANKHVFGPQASSETGVAEGYVLKPVYPIFFNTGTRVAIKCKNSKFSEKAKLDSAISAKVELTENDKRLLEIFSEYVTWNRVSNVLSHIGSVTAKDFGRVSGLTMKDIINEAAREGHDLLFADNPSAVLKELTGLIQNTIRSKWHEVLE

SEQ ID NO: 1253 - DNA, 1038 bp, synthetic construct
  misc_feature 1..1038: note = variant of RNA ligase 2 from Klebsiella phage KP179
  source 1..1038: mol_type = other DNA
atgcatcaccatcaccatcacggtggcagcaacatgtttgcgtattattcaagtctggaaaaccattacaatgctaagttcattgagaagatccgtggtgcaggcttcctgatgcacaccgtggaatgggtagctcgcgagaagattcatggaacgaactttagcgttatcattactccgaccgaaatcgtcccagccaaacgcacagggccgatcttggaaggcgagtcgttctttggtcacgaaattatcatgaaaaaatataaagactccttcgtgaaggtgcagaacatgctgaatgccatggatcttgttagcgtgcaaatctttggcgaatttgcgggtggtggcattcagaaaggcgtcgattacggagacaaagatttctatgtgtttgacatcctgtctgatagcgggaacgagaaagtttactgggatgactatcgcgtcgaatcgttttgcaccactctcggtctgaaattagcgcctctgctgggacgtggtagtttcgctgaactgtcccagtacccaaacgatttcaaaagcattgtgaaccgttataatgaattggttgacacggtcggcctggagatggccaataaacacgtctttggtccgcaagcgtcttctgaaactggcgtagcagaaggctacgttcttaaacccgtctatccgatcttctttaataccggtacgcgcgtggcgattaaatgcaagaactccaaattttcggagaaagccaagctggactcgccaattagtgttagcgatgaactgacggagaacgataaacgtctgctcgaaatctttagcgagtatgttacctggaatcgcgtcagtaacgtactgtcacatattggctcagtgaccgcaaaagattttgggcgtgtttcgggtctgacgatgaaagacatcattaatgaagcagcacgcgaaggccatgatctgttgttcgctgataacccgtcggcggtgctgaaggagctgactggcctcatccagaacacgattcgctccaaatggcacgaagttctggag

SEQ ID NO: 1254 - protein, 346 aa, synthetic construct
  REGION 1..346: note = variant of RNA ligase 2 from Klebsiella phage KP179
MHHHHHHGGSNMFAYYSSLENHYNAKFIEKIRGAGFLMHTVEWVAREKIHGTNFSVIITPTEIVPAKRTGPILEGESFFGHEIIMKKYKDSFVKVQNMLNAMDLVSVQIFGEFAGGGIQKGVDYGDKDFYVFDILSDSGNEKVYWDDYRVESFCTTLGLKLAPLLGRGSFAELSQYPNDFKSIVNRYNELVDTVGLEMANKHVFGPQASSETGVAEGYVLKPVYPIFFNTGTRVAIKCKNSKFSEKAKLDSPISVSDELTENDKRLLEIFSEYVTWNRVSNVLSHIGSVTAKDFGRVSGLTMKDIINEAAREGHDLLFADNPSAVLKELTGLIQNTIRSKWHEVLE

SEQ ID NO: 1255 - DNA, 1038 bp, synthetic construct
  misc_feature 1..1038: note = variant of RNA ligase 2 from Klebsiella phage KP179
  source 1..1038: mol_type = other DNA
atgcatcaccatcaccatcacggtggcagcaacatgtttgcgtattattcaagtctggaaaaccattacaatgctaagttcattgacaagatccgtggtgcaggcttcctgatgcacaccgtggaatgggtagctcgcgagaagattcatggaacgaactttagcgttatcattactccgaccgaaatcgtcccagccaaacgcacagggccgatcttggaaggcgagtcgttctttggtcacgaaattatcatgaaaaaatataaagactccttcgtgaaggtgcagaacatgctgaatgccatggatcttgttagcgtgcaaatctttggcgaatttgcgggtggtggcattcagaaaggcgtcgattacggagacaaagatttctatgtgtttgacatcctgtctgatagcgggaacgagaaagtttactgggatgactatcgcgtcgaatcgttttgcaccggtctcggtctgaaattagcgcctctgctgggacgtggtagtttcgctgaactgtcccagtacccaaacgatttcaaaagcattgtgaaccgttataatgaattggttgacacggtcggcctggagatggccaataaacacgtctttggtccgcaagcgtcttctgaaactggcgtagcagaaggctacgttcttaaacccgtctatccgatcttctttaataccggtacgcgcgtggcgattaaatgcaagaactccaaattttcggagaaagccaagctggactcgccaattagttcgaaggatgaactgacggagaacgataaacgtctgctcgaaatctttagcgagtatgttacctggaatcgcgtcagtaacgtactgtcacatattggctcagtgaccgcaaaagattttgggcgtgtttcgggtctgacgatgaaagacatcattaatgaagcagcacgcgaaggccatgatctgttgttcgctgataacccgtcggcggtgctgaaggagctgactggcctcatccagaacacgattcgctccaaatggcacgaagttctggag

SEQ ID NO: 1256 - protein, 346 aa, synthetic construct
  REGION 1..346: note = variant of RNA ligase 2 from Klebsiella phage KP179
MHHHHHHGGSNMFAYYSSLENHYNAKFIDKIRGAGFLMHTVEWVAREKIHGTNFSVIITPTEIVPAKRTGPILEGESFFGHEIIMKKYKDSFVKVQNMLNAMDLVSVQIFGEFAGGGIQKGVDYGDKDFYVFDILSDSGNEKVYWDDYRVESFCTGLGLKLAPLLGRGSFAELSQYPNDFKSIVNRYNELVDTVGLEMANKHVFGPQASSETGVAEGYVLKPVYPIFFNTGTRVAIKCKNSKFSEKAKLDSPISSKDELTENDKRLLEIFSEYVTWNRVSNVLSHIGSVTAKDFGRVSGLTMKDIINEAAREGHDLLFADNPSAVLKELTGLIQNTIRSKWHEVLE

SEQ ID NO: 1257 - DNA, 1038 bp, synthetic construct
  misc_feature 1..1038: note = variant of RNA ligase 2 from Klebsiella phage KP179
  source 1..1038: mol_type = other DNA
atgcatcaccatcaccatcacggtggcagcaacacgtttgcgtattattcaagtctggaaaaccattacaataataagttcattgacaagatccgtggtgcaggcttcctgatgcacaccgtggaatgggtagctcgcgagaagattcatggaacgaactttagcgttatcattactccgaccgaaatcgtcccagccaaacgcacagggccgatcttggaaggcgagtcgttctttggtcacgaaattatcatgaaaaaatataaagactccttcgtgaaggtgcagaacatgctgaatgccatggatcttgttagcgtgcaaatctttggcgaatttgcgggtggtggcattcagaaaggcgtcgattacggagacaaagatttctatgtgtttgacatcctgtctgatagcgggaacgagaaagtttactgggatgactatcgcgtcgaatcgttttgcaccggtctcggtctgaaattagcgcctctgctgggacgtggtagtttcgctgaactgtcccagtacccaaacgatttcaaaagcattgtgaaccgttataatgaattggttgacacggtcggcctggagatggccaataaacacgtctttggtccgcaagcgtcttctgaaactggcgtagcagaaggctacgttcttaaacccgtctatccgatcttctttaataccggtacgcgcgtggcgattaaatgcaagaactccaaattttcggagaaagccaagctggactcgccaattagtgcgaaggttgaactgacggagaacgataaacgtctgctcgaaatctttagcgagtatgttacctggaatcgcgtcagtaacgtactgtcacatattggctcagtgaccgcaaaagattttgggcgtgtttcgggtctgacgatgaaagacatcattaatgaagcagcacgcgaaggccatgatctgttgttcgctgataacccgtcggcggtgctgaaggagctgactggcctcatccagaacacgattcgctccaaatggcacgaagttctggag

SEQ ID NO: 1258 - protein, 346 aa, synthetic construct
  REGION 1..346: note = variant of RNA ligase 2 from Klebsiella phage KP179
MHHHHHHGGSNTFAYYSSLENHYNNKFIDKIRGAGFLMHTVEWVAREKIHGTNFSVIITPTEIVPAKRTGPILEGESFFGHEIIMKKYKDSFVKVQNMLNAMDLVSVQIFGEFAGGGIQKGVDYGDKDFYVFDILSDSGNEKVYWDDYRVESFCTGLGLKLAPLLGRGSFAELSQYPNDFKSIVNRYNELVDTVGLEMANKHVFGPQASSETGVAEGYVLKPVYPIFFNTGTRVAIKCKNSKFSEKAKLDSPISAKVELTENDKRLLEIFSEYVTWNRVSNVLSHIGSVTAKDFGRVSGLTMKDIINEAAREGHDLLFADNPSAVLKELTGLIQNTIRSKWHEVLE

SEQ ID NO: 1259 - DNA, 1038 bp, synthetic construct
  misc_feature 1..1038: note = variant of RNA ligase 2 from Klebsiella phage KP179
  source 1..1038: mol_type = other DNA
atgcatcaccatcaccatcacggtggcagcaacacgtttgcgtattattcaagtctggaaaaccattacaataataagttcattgagaagatccgtggtgcaggcttcctgatgcacaccgtggaatgggtagctcgcgagaagattcatggaacgaactttagcgttatcattactccgaccgaaatcgtcccagccaaacgcacagggccgatcttggaaggcgagtcgttctttggtcacgaaattatcatgaaaaaatataaagactccttcgtgaaggtgcagaacatgctgaatgccatggatcttgttagcgtgcaaatctttggcgaatttgcgggtggtggcattcagaaaggcgtcgattacggagacaaagatttctatgtgtttgacatcctgtctgatagcgggaacgagaaagtttactgggatgactatcgcgtcgaatcgttttgcaccactctcggtctgaaattagcgcctctgctgggacgtggtagtttcgctgaactgtcccagtacccaaacgatttcaaaagcattgtgaaccgttataatgaattggttgacacggtcggcctggagatggccaataaacacgtctttggtccgcaagcgtcttctgaaactggcgtagcagaaggctacgttcttaaacccgtctatccgatcttctttaataccggtacgcgcgtggcgattaaatgcaagaactccaaattttcggagaaagcgaagctggacacggctattagtgcgaaggtggaactgacggagaacgataaacgtctgctcgaaatctttagcgagtatgttacctggaatcgcgtcagtaacgtactgtcacatattggctcagtgaccgcaaaagattttgggcgtgtttcgggtctgacgatgaaagacatcattaatgaagcagcacgcgaaggccatgatctgttgttcgctgataacccgtcggcggtgctgaaggagctgactggcctcatccagaacacgattcgctccaaatggcacgaagttctggag

SEQ ID NO: 1260 - protein, 346 aa, synthetic construct
  REGION 1..346: note = variant of RNA ligase 2 from Klebsiella phage KP179
MHHHHHHGGSNTFAYYSSLENHYNNKFIEKIRGAGFLMHTVEWVAREKIHGTNFSVIITPTEIVPAKRTGPILEGESFFGHEIIMKKYKDSFVKVQNMLNAMDLVSVQIFGEFAGGGIQKGVDYGDKDFYVFDILSDSGNEKVYWDDYRVESFCTTLGLKLAPLLGRGSFAELSQYPNDFKSIVNRYNELVDTVGLEMANKHVFGPQASSETGVAEGYVLKPVYPIFFNTGTRVAIKCKNSKFSEKAKLDTAISAKVELTENDKRLLEIFSEYVTWNRVSNVLSHIGSVTAKDFGRVSGLTMKDIINEAAREGHDLLFADNPSAVLKELTGLIQNTIRSKWHEVLE

SEQ ID NO: 1261 - DNA, 1038 bp, synthetic construct
  misc_feature 1..1038: note = variant of RNA ligase 2 from Klebsiella phage KP179
  source 1..1038: mol_type = other DNA
atgcatcaccatcaccatcacggtggcagcaacacgtttgcgtattattcaagtctggaaaaccattacaataataagttcattgagaagatccgtggtgcaggcttcctgatgcacaccgtggaatgggtagctcgcgagaagattcatggaacgaactttagcgttatcattactccgaccgaaatcgtcccagccaaacgcacagggccgatcttggaaggcgagtcgttctttggtcacgaaattatcatgaaaaaatataaagactccttcgtgaaggtgcagaacatgctgaatgccatggatcttgttagcgtgcaaatctttggcgaatttgcgggtggtggcattcagaaaggcgtcgattacggagacaaagatttctatgtgtttgacatcctgtctgatagcgggaacgagaaagtttactgggatgactatcgcgtcgaatcgttttgcaccactctcggtctgaaattagcgcctctgctgggacgtggtagtttcgctgaactgtcccagtacccaaacgatttcaaaagcattgtgaaccgttataatgaattggttgacacggtcggcctggagatggccaataaacacgtctttggtccgcaagcgtcttctgaaactggcgtagcagaaggctacgttcttaaacccgtctatccgatcttctttaataccggtacgcgcgtggcgattaaatgcaagaactccaaattttcggagaaagccaagctggactcgccaattagtgcgagcgatgaactgacggacaacgataaacgtctgctcgaaatctttagcgagtatgttacctggaatcgcgtcagtaacgtactgtcacatattggctcagtgaccgcaaaagattttgggcgtgtttcgggtctgacgatgaaagacatcattaatgaagcagcacgcgaaggccatgatctgttgttcgctgataacccgtcggcggtgctgaaggagctgactggcctcatccagaacacgattcgctccaaatggcacgaagttctggag

SEQ ID NO: 1262 - protein, 346 aa, synthetic construct
  REGION 1..346: note = variant of RNA ligase 2 from Klebsiella phage KP179
MHHHHHHGGSNTFAYYSSLENHYNNKFIEKIRGAGFLMHTVEWVAREKIHGTNFSVIITPTEIVPAKRTGPILEGESFFGHEIIMKKYKDSFVKVQNMLNAMDLVSVQIFGEFAGGGIQKGVDYGDKDFYVFDILSDSGNEKVYWDDYRVESFCTTLGLKLAPLLGRGSFAELSQYPNDFKSIVNRYNELVDTVGLEMANKHVFGPQASSETGVAEGYVLKPVYPIFFNTGTRVAIKCKNSKFSEKAKLDSPISASDELTDNDKRLLEIFSEYVTWNRVSNVLSHIGSVTAKDFGRVSGLTMKDIINEAAREGHDLLFADNPSAVLKELTGLIQNTIRSKWHEVLE

SEQ ID NO: 1263 - DNA, 1038 bp, synthetic construct
  misc_feature 1..1038: note = variant of RNA ligase 2 from Klebsiella phage KP179
  source 1..1038: mol_type = other DNA
atgcatcaccatcaccatcacggtggcagcaacacgtttgcgtattattcaagtctggaaaaccattacaatgctaagttcattgagaagatccgtggtgcaggcttcctgatgcacaccgtggaatgggtagctcgcgagaagattcatggaacgaactttagcgttatcattactccgaccgaaatcgtcccagccaaacgcacagggccgatcttggaaggcgagtcgttctttggtcacgaaattatcatgaaaaaatataaagactccttcgtgaaggtgcagaacatgctgaatgccatggatcttgttagcgtgcaaatctttggcgaatttgcgggtggtggcattcagaaaggcgtcgattacggagacaaagatttctatgtgtttgacatcctgtctgatagcgggaacgagaaagtttactgggatgactatcgcgtcgaatcgttttgcaccggtctcggtctgaaattagcgcctctgctgggacgtggtagtttcgctgaactgtcccagtacccaaacgatttcaaaagcattgtgaaccgttataatgaattggttgacacggtcggcctggagatggccaataaacacgtctttggtccgcaagcgtcttctgaaactggcgtagcagaaggctacgttcttaaacccgtctatccgatcttctttaataccggtacgcgcgtggcgattaaatgcaagaactccaaattttcggagaaagccaagctggactcgccaattagttatagcgatgaactgacggagaacgataaacgtctgctcgaaatctttagcgagtatgttacctggaatcgcgtcagtaacgtactgtcacatattggctcagtgaccgcaaaagattttgggcgtgtttcgggtctgacgatgaaagacatcattaatgaagcagcacgcgaaggccatgatctgttgttcgctgataacccgtcggcggtgctgaaggagctgactggcctcatccagaacacgattcgctccaaatggcacgaagttctggag

SEQ ID NO: 1264 - protein, 346 aa, synthetic construct
  REGION 1..346: note = variant of RNA ligase 2 from Klebsiella phage KP179
MHHHHHHGGSNTFAYYSSLENHYNAKFIEKIRGAGFLMHTVEWVAREKIHGTNFSVIITPTEIVPAKRTGPILEGESFFGHEIIMKKYKDSFVKVQNMLNAMDLVSVQIFGEFAGGGIQKGVDYGDKDFYVFDILSDSGNEKVYWDDYRVESFCTGLGLKLAPLLGRGSFAELSQYPNDFKSIVNRYNELVDTVGLEMANKHVFGPQASSETGVAEGYVLKPVYPIFFNTGTRVAIKCKNSKFSEKAKLDSPISYSDELTENDKRLLEIFSEYVTWNRVSNVLSHIGSVTAKDFGRVSGLTMKDIINEAAREGHDLLFADNPSAVLKELTGLIQNTIRSKWHEVLE

SEQ ID NO: 1265 - DNA, 1038 bp, synthetic construct
  misc_feature 1..1038: note = variant of RNA ligase 2 from Klebsiella phage KP179
  source 1..1038: mol_type = other DNA
atgcatcaccatcaccatcacggtggcagcaacatgtttgcgtattattcaagtctggaaaaccattacaataataagttcattgagaagatccgtggtgcaggcttcctgatgcacaccgtggaatgggtagctcgcgagaagattcatggaacgaactttagcgttatcattactccgaccgaaatcgtcccagccaaacgcacagggccgatcttggaaggcgagtcgttctttggtcacgaaattatcatgaaaaaatataaagactccttcgtgaaggtgcagaacatgctgaatgccatggatcttgttagcgtgcaaatctttggcgaatttgcgggtggtggcattcagaaaggcgtcgattacggagacaaagatttctatgtgtttgacatcctgtctgatagcgggaacgagaaagtttactgggatgactatcgcgtcgaatcgttttgcaccggtctcggtctgaaattagcgcctctgctgggacgtggtagtttcgctgaactgtcccagtacccaaacgatttcaaaagcattgtgaaccgttataatgaattggttgacacggtcggcctggagatggccaataaacacgtctttggtccgcaagcgtcttctgaaactggcgtagcagaaggctacgttcttaaacccgtctatccgatcttctttaataccggtacgcgcgtggcgattaaatgcaagaactccaaattttcggagaaagccaagctggactcgccaattagttatagcgatgaactgacggagaacgataaacgtctgctcgaaatctttagcgagtatgttacctggaatcgcgtcagtaacgtactgtcacatattggctcagtgaccgcaaaagattttgggcgtgtttcgggtctgacgatgaaagacatcattaatgaagcagcacgcgaaggccatgatctgttgttcgctgataacccgtcggcggtgctgaaggagctgactggcctcatccagaacacgattcgctccaaatggcacgaagttctggag

SEQ ID NO: 1266 - protein, 346 aa, synthetic construct
  REGION 1..346: note = variant of RNA ligase 2 from Klebsiella phage KP179
MHHHHHHGGSNMFAYYSSLENHYNNKFIEKIRGAGFLMHTVEWVAREKIHGTNFSVIITPTEIVPAKRTGPILEGESFFGHEIIMKKYKDSFVKVQNMLNAMDLVSVQIFGEFAGGGIQKGVDYGDKDFYVFDILSDSGNEKVYWDDYRVESFCTGLGLKLAPLLGRGSFAELSQYPNDFKSIVNRYNELVDTVGLEMANKHVFGPQASSETGVAEGYVLKPVYPIFFNTGTRVAIKCKNSKFSEKAKLDSPISYSDELTENDKRLLEIFSEYVTWNRVSNVLSHIGSVTAKDFGRVSGLTMKDIINEAAREGHDLLFADNPSAVLKELTGLIQNTIRSKWHEVLE

SEQ ID NO: 1267 - DNA, 1038 bp, synthetic construct
  misc_feature 1..1038: note = variant of RNA ligase 2 from Klebsiella phage KP179
  source 1..1038: mol_type = other DNA
atgcatcaccatcaccatcacggtggcagcaacacgtttgcgtattattcatcgctggaaaaccattacaataataagttcattgagaagatccgtggtgcaggcttcctgatgcacaccgtggaatgggtagctcgcgagaagattcatggaacgaactttagcgttatcattactccgaccgaaatcgtcccagccaaacgcacagggccgatcttggaaggcgagtcgttctttggtcacgaaattatcatgaaaaaatataaagactccttcgtgaaggtgcagaacatgctgaatgccatggatcttgttagcgtgcaaatctttggcgaatttgcgggtggtggcattcagaaaggcgtcgattacggagacaaagatttctatgtgtttgacatcctgtctgatagcgggaacgagaaagtttactgggatgactatcgcgtcgaatcgttttgcaccggcctcggtctgaaattagcgcctctgctgggacgtggtagtttcgctgaactgtcccagtacccaaacgatttcaaaagcattgtgaaccgttataatgaattggttgacacggtcggcctggagatggccaataaacacgtctttggtccgcaagcgtcttctgaaactggcgtagcagaaggctacgttcttaaacccgtctatccgatcttctttaataccggtacgcgcgtggcgattaaatgcaagaactccaaattttcggagaaagcgaagcgcgacacggctattagtgcgaaggtggaactgacggagaacgataaacgtctgctcgaaatctttagcgagtatgttacctggaatcgcgtcagtaacgtactgtcacatattggctcagtgaccgcaaaagattttgggcgtgtttcgggtctgacgatgaaagacatcattaatgaagcagcacgcgaaggccatgatctgttgttcgctgataacccgtcggcggtgctgaaggagctgactggcctcatccagaacacgattcgctccaaatggcacgaagttctggag

SEQ ID NO: 1268 - protein, 346 aa, synthetic construct
  REGION 1..346: note = variant of RNA ligase 2 from Klebsiella phage KP179
MHHHHHHGGSNTFAYYSSLENHYNNKFIEKIRGAGFLMHTVEWVAREKIHGTNFSVIITPTEIVPAKRTGPILEGESFFGHEIIMKKYKDSFVKVQNMLNAMDLVSVQIFGEFAGGGIQKGVDYGDKDFYVFDILSDSGNEKVYWDDYRVESFCTGLGLKLAPLLGRGSFAELSQYPNDFKSIVNRYNELVDTVGLEMANKHVFGPQASSETGVAEGYVLKPVYPIFFNTGTRVAIKCKNSKFSEKAKRDTAISAKVELTENDKRLLEIFSEYVTWNRVSNVLSHIGSVTAKDFGRVSGLTMKDIINEAAREGHDLLFADNPSAVLKELTGLIQNTIRSKWHEVLE

SEQ ID NO: 1269 - DNA, 1038 bp, synthetic construct
  misc_feature 1..1038: note = variant of RNA ligase 2 from Klebsiella phage KP179
  source 1..1038: mol_type = other DNA
atgcatcaccatcaccatcacggtggcagcaacacgtttgcgtattattcaagtctggaaaaccattacaatgctaagttcattgacaagatccgtggtgcaggcttcctgatgcacaccgtggaatgggtagctcgcgagaagattcatggaacgaactttagcgttatcattactccgaccgaaatcgtcccagccaaacgcacagggccgatcttggaaggcgagtcgttctttggtcacgaaattatcatgaaaaaatataaagactccttcgtgaaggtgcagaacatgctgaatgccatggatcttgttagcgtgcaaatctttggcgaatttgcgggtggtggcattcagaaaggcgtcgattacggagacaaagatttctatgtgtttgacatcctgtctgatagcgggaacgagaaagtttactgggatgactatcgcgtcgaatcgttttgcaccactctcggtctgaaattagcgcctctgctgggacgtggtagtttcgctgaactgtcccagtacccaaacgatttcaaaagcattgtgaaccgttataatgaattggttgacacggtcggcctggagatggccaataaacacgtctttggtccgcaagcgtcttctgaaactggcgtagcagaaggctacgttcttaaacccgtctatccgatcttctttaataccggtacgcgcgtggcgattaaatgcaagaactccaaattttcggagaaagccaagctggactcgccaattagtgttaaggttgaactgacggagaacgataaacgtctgctcgaaatctttagcgagtatgttacctggaatcgcgtcagtaacgtactgtcacatattggctcagtgaccgcaaaagattttgggcgtgtttcgggtctgacgatgaaagacatcattaatgaagcagcacgcgaaggccatgatctgttgttcgctgataacccgtcggcggtgctgaaggagctgactggcctcatccagaacacgattcgctccaaatggcacgaagttctggag

SEQ ID NO: 1270 - protein, 346 aa, synthetic construct
  REGION 1..346: note = variant of RNA ligase 2 from Klebsiella phage KP179
MHHHHHHGGSNTFAYYSSLENHYNAKFIDKIRGAGFLMHTVEWVAREKIHGTNFSVIITPTEIVPAKRTGPILEGESFFGHEIIMKKYKDSFVKVQNMLNAMDLVSVQIFGEFAGGGIQKGVDYGDKDFYVFDILSDSGNEKVYWDDYRVESFCTTLGLKLAPLLGRGSFAELSQYPNDFKSIVNRYNELVDTVGLEMANKHVFGPQASSETGVAEGYVLKPVYPIFFNTGTRVAIKCKNSKFSEKAKLDSPISVKVELTENDKRLLEIFSEYVTWNRVSNVLSHIGSVTAKDFGRVSGLTMKDIINEAAREGHDLLFADNPSAVLKELTGLIQNTIRSKWHEVLE

SEQ ID NO: 1271 - DNA, 1038 bp, synthetic construct
  misc_feature 1..1038: note = variant of RNA ligase 2 from Klebsiella phage KP179
  source 1..1038: mol_type = other DNA
atgcatcaccatcaccatcacggtggcagcaacatgtttgcgtattattcaagtctggaaaaccattacaataataagttcattgacaagatccgtggtgcaggcttcctgatgcacaccgtggaatgggtagctcgcgagaagattcatggaacgaactttagcgttatcattactccgaccgaaatcgtcccagccaaacgcacagggccgatcttggaaggcgagtcgttctttggtcacgaaattatcatgaaaaaatataaagactccttcgtgaaggtgcagaacatgctgaatgccatggatcttgttagcgtgcaaatctttggcgaatttgcgggtggtggcattcagaaaggcgtcgattacggagacaaagatttctatgtgtttgacatcctgtctgatagcgggaacgagaaagtttactgggatgactatcgcgtcgaatcgttttgcaccggtctcggtctgaaattagcgcctctgctgggacgtggtagtttcgctgaactgtcccagtacccaaacgatttcaaaagcattgtgaaccgttataatgaattggttgacacggtcggcctggagatggccaataaacacgtctttggtccgcaagcgtcttctgaaactggcgtagcagaaggctacgttcttaaacccgtctatccgatcttctttaataccggtacgcgcgtggcgattaaatgcaagaactccaaattttcggagaaagccaagctggactcgccaattagtgcgaaggtggaactgacggagaacgataaacgtctgctcgaaatctttagcgagtatgttacctggaatcgcgtcagtaacgtactgtcacatattggctcagtgaccgcaaaagattttgggcgtgtttcgggtctgacgatgaaagacatcattaatgaagcagcacgcgaaggccatgatctgttgttcgctgataacccgtcggcggtgctgaaggagctgactggcctcatccagaacacgattcgctccaaatggcacgaagttctggag

SEQ ID NO: 1272 - protein, 346 aa, synthetic construct
  REGION 1..346: note = variant of RNA ligase 2 from Klebsiella phage KP179
MHHHHHHGGSNMFAYYSSLENHYNNKFIDKIRGAGFLMHTVEWVAREKIHGTNFSVIITPTEIVPAKRTGPILEGESFFGHEIIMKKYKDSFVKVQNMLNAMDLVSVQIFGEFAGGGIQKGVDYGDKDFYVFDILSDSGNEKVYWDDYRVESFCTGLGLKLAPLLGRGSFAELSQYPNDFKSIVNRYNELVDTVGLEMANKHVFGPQASSETGVAEGYVLKPVYPIFFNTGTRVAIKCKNSKFSEKAKLDSPISAKVELTENDKRLLEIFSEYVTWNRVSNVLSHIGSVTAKDFGRVSGLTMKDIINEAAREGHDLLFADNPSAVLKELTGLIQNTIRSKWHEVLE

SEQ ID NO: 1273 - DNA, 1038 bp, synthetic construct
  misc_feature 1..1038: note = variant of RNA ligase 2 from Klebsiella phage KP179
  source 1..1038: mol_type = other DNA
atgcatcaccatcaccatcacggtggcagcaacacgtttgcgtattattcaagtctggaaaaccattacaataataagttcattgagaagatccgtggtgcaggcttcctgatgcacaccgtggaatgggtagctcgcgagaagattcatggaacgaactttagcgttatcattactccgaccgaaatcgtcccagccaaacgcacagggccgatcttggaaggcgagtcgttctttggtcacgaaattatcatgaaaaaatataaagactccttcgtgaaggtgcagaacatgctgaatgccatggatcttgttagcgtgcaaatctttggcgaatttgcgggtggtggcattcagaaaggcgtcgattacggagacaaagatttctatgtgtttgacatcctgtctgatagcgggaacgagaaagtttactgggatgactatcgcgtcgaatcgttttgcaccactctcggtctgaaattagcgcctctgctgggacgtggtagtttcgctgaactgtcccagtacccaaacgatttcaaaagcattgtgaaccgttataatgaattggttgacacggtcggcctggagatggccaataaacacgtctttggtccgcaagcgtcttctgaaactggcgtagcagaaggctacgttcttaaacccgtctatccgatcttctttaataccggtacgcgcgtggcgattaaatgcaagaactccaaattttcggagaaagccaagctggactcgccaattagtgttagcgttgaactgacggagaacgataaacgtctgctcgaaatctttagcgagtatgttacctggaatcgcgtcagtaacgtactgtcacatattggctcagtgaccgcaaaagattttgggcgtgtttcgggtctgacgatgaaagacatcattaatgaagcagcacgcgaaggccatgatctgttgttcgctgataacccgtcggcggtgctgaaggagctgactggcctcatccagaacacgattcgctccaaatggcacgaagttctggag

SEQ ID NO: 1274 - protein, 346 aa, synthetic construct
  REGION 1..346: note = variant of RNA ligase 2 from Klebsiella phage KP179
MHHHHHHGGSNTFAYYSSLENHYNNKFIEKIRGAGFLMHTVEWVAREKIHGTNFSVIITPTEIVPAKRTGPILEGESFFGHEIIMKKYKDSFVKVQNMLNAMDLVSVQIFGEFAGGGIQKGVDYGDKDFYVFDILSDSGNEKVYWDDYRVESFCTTLGLKLAPLLGRGSFAELSQYPNDFKSIVNRYNELVDTVGLEMANKHVFGPQASSETGVAEGYVLKPVYPIFFNTGTRVAIKCKNSKFSEKAKLDSPISVSVELTENDKRLLEIFSEYVTWNRVSNVLSHIGSVTAKDFGRVSGLTMKDIINEAAREGHDLLFADNPSAVLKELTGLIQNTIRSKWHEVLE

SEQ ID NO: 1275 - DNA, 1038 bp, synthetic construct
  misc_feature 1..1038: note = variant of RNA ligase 2 from Klebsiella phage KP179
  source 1..1038: mol_type = other DNA
atgcatcaccatcaccatcacggtggcagcaacatgtttgcgtattattcaagtctggaaaaccattacaataataagttcattgagaagatccgtggtgcaggcttcctgatgcacaccgtggaatgggtagctcgcgagaagattcatggaacgaactttagcgttatcattactccgaccgaaatcgtcccagccaaacgcacagggccgatcttggaaggcgagtcgttctttggtcacgaaattatcatgaaaaaatataaagactccttcgtgaaggtgcagaacatgctgaatgccatggatcttgttagcgtgcaaatctttggcgaatttgcgggtggtggcattcagaaaggcgtcgattacggagacaaagatttctatgtgtttgacatcctgtctgatagcgggaacgagaaagtttactgggatgactatcgcgtcgaatcgttttgcaccactctcggtctgaaattagcgcctctgctgggacgtggtagtttcgctgaactgtcccagtacccaaacgatttcaaaagcattgtgaaccgttataatgaattggttgacacggtcggcctggagatggccaataaacacgtctttggtccgcaagcgtcttctgaaactggcgtagcagaaggctacgttcttaaacccgtctatccgatcttctttaataccggtacgcgcgtggcgattaaatgcaagaactccaaattttcggagaaagccaagctggactcgccaattagttatagcgttgaactgacggagaacgataaacgtctgctcgaaatctttagcgagtatgttacctggaatcgcgtcagtaacgtactgtcacatattggctcagtgaccgcaaaagattttgggcgtgtttcgggtctgacgatgaaagacatcattaatgaagcagcacgcgaaggccatgatctgttgttcgctgataacccgtcggcggtgctgaaggagctgactggcctcatccagaacacgattcgctccaaatggcacgaagttctggag

SEQ ID NO: 1276 - protein, 346 aa, synthetic construct
  REGION 1..346: note = variant of RNA ligase 2 from Klebsiella phage KP179
MHHHHHHGGSNMFAYYSSLENHYNNKFIEKIRGAGFLMHTVEWVAREKIHGTNFSVIITPTEIVPAKRTGPILEGESFFGHEIIMKKYKDSFVKVQNMLNAMDLVSVQIFGEFAGGGIQKGVDYGDKDFYVFDILSDSGNEKVYWDDYRVESFCTTLGLKLAPLLGRGSFAELSQYPNDFKSIVNRYNELVDTVGLEMANKHVFGPQASSETGVAEGYVLKPVYPIFFNTGTRVAIKCKNSKFSEKAKLDSPISYSVELTENDKRLLEIFSEYVTWNRVSNVLSHIGSVTAKDFGRVSGLTMKDIINEAAREGHDLLFADNPSAVLKELTGLIQNTIRSKWHEVLE

SEQ ID NO: 1277 - DNA, 1038 bp, synthetic construct
  misc_feature 1..1038: note = variant of RNA ligase 2 from Klebsiella phage KP179
  source 1..1038: mol_type = other DNA
atgcatcaccatcaccatcacggtggcagcaacacgtttgcgtattattcaagtctggaaaaccattacaataataagttcattgagaagatccgtggtgcaggcttcctggaacacaccgtggaatgggtagctcgcgagaagattcatggaacgaactttagcgttatcattactccgaccgaaatcgtcccagccaaacgcacagggccgatcttggaaggcgagtcgttctttggtcacgaaattatcatgaaaaaatataaagactccttcgtgaaggtgcagaacatgctgaatgccatggatcttgttagcgtgcaaatctttggcgaatttgcgggtggtggcattcagaaaggcgtcgattacggagacaaagatttctatgtgtttgacatcctgtctgatagcgggaacgagaaagtttactgggatgactatcgcgtcgaatcgttttgcaccaccctcggtctgaaattagcgcctctgctgggacgtggtagtttcgctgaactgtcccagtacccaaacgatttcaaaagcattgtgaaccgttataatgaattggttgacacggtcggcctggagatggccaataaacacgtctttggtccgcaagcgtcttctgaaactggcgtagcagaaggctacgttcttaaacccgtctatccgatcttctttaataccggtacgcgcgtggcgattaaatgcaagaactccaaattttcggagaaagcgaagctgatttcggctattagtgcgaaggtggaactgacggagaacgataaacgtctgctcgaaatctttagcgagtatgttacctggaatcgcgtcagtaacgtactgtcacatattggctcagtgaccgcaaaagattttgggcgtgtttcgggtctgacgatgaaagacatcattaatgaagcagcacgcgaaggccatgatctgttgttcgctgataacccgtcggcggtgctgaaggagctgactggcctcatccagaacacgattcgctccaaatggcacgaagttctggag

SEQ ID NO: 1278 - protein, 346 aa, synthetic construct
  REGION 1..346: note = variant of RNA ligase 2 from Klebsiella phage KP179
MHHHHHHGGSNTFAYYSSLENHYNNKFIEKIRGAGFLEHTVEWVAREKIHGTNFSVIITPTEIVPAKRTGPILEGESFFGHEIIMKKYKDSFVKVQNMLNAMDLVSVQIFGEFAGGGIQKGVDYGDKDFYVFDILSDSGNEKVYWDDYRVESFCTTLGLKLAPLLGRGSFAELSQYPNDFKSIVNRYNELVDTVGLEMANKHVFGPQASSETGVAEGYVLKPVYPIFFNTGTRVAIKCKNSKFSEKAKLISAISAKVELTENDKRLLEIFSEYVTWNRVSNVLSHIGSVTAKDFGRVSGLTMKDIINEAAREGHDLLFADNPSAVLKELTGLIQNTIRSKWHEVLE

SEQ ID NO: 1279 - DNA, 1038 bp, synthetic construct
  misc_feature 1..1038: note = variant of RNA ligase 2 from Klebsiella phage KP179
  source 1..1038: mol_type = other DNA
atgcatcaccatcaccatcacggtggcagcaacacgtttgcgtattattcaagtctggaaaaccattacaataataagttcattgagaagatccgtggtgcaggcttcctgatgcacaccgtggaatgggtagctcgcgagaagattcatggaacgaactttagcgttatcattactccgaccgaaatcgtcccagccaaacgcacagggccgatcttggaaggcgagtcgttctttggtcacgaaattatcatgaaaaaatataaagactccttcgtgaaggtgcagaacatgctgaatgccatggatcttgttagcgtgcaaatctttggcgaatttgcgggtggtggcattcagaaaggcgtcgattacggagacaaagatttctatgtgtttgacatcctgtctgatagcgggaacgagaaagtttactgggatgactatcgcgtcgaatcgttttgcaccactctcggtctgaaattagcgcctctgctgggacgtggtagtttcgctgaactgtcccagtacccaaacgatttcaaaagcattgtgaaccgttataatgaattggttgacacggtcggcctggagatggccaataaacacgtctttggtccgcaagcgtcttctgaaactggcgtagcagaaggctacgttcttaaacccgtctatccgatcttctttaataccggtacgcgcgtggcgattaaatgcaagaactccaaattttcggagaaacgtaagcgcgactcggctattagtgcgaaggtggaactgacggagaacgataaacgtctgctcgaaatctttagcgagtatgttacctggaatcgcgtcagtaacgtactgtcacatattggctcagtgaccgcaaaagattttgggcgtgtttcgggtctgacgatgaaagacatcattaatgaagcagcacgcgaaggccatgatctgttgttcgctgataacccgtcggcggtgctgaaggagctgactggcctcatccagaacacgattcgctccaaatggcacgaagttctggag

SEQ ID NO: 1280 - protein, 346 aa, synthetic construct
  REGION 1..346: note = variant of RNA ligase 2 from Klebsiella phage KP179
MHHHHHHGGSNTFAYYSSLENHYNNKFIEKIRGAGFLMHTVEWVAREKIHGTNFSVIITPTEIVPAKRTGPILEGESFFGHEIIMKKYKDSFVKVQNMLNAMDLVSVQIFGEFAGGGIQKGVDYGDKDFYVFDILSDSGNEKVYWDDYRVESFCTTLGLKLAPLLGRGSFAELSQYPNDFKSIVNRYNELVDTVGLEMANKHVFGPQASSETGVAEGYVLKPVYPIFFNTGTRVAIKCKNSKFSEKRKRDSAISAKVELTENDKRLLEIFSEYVTWNRVSNVLSHIGSVTAKDFGRVSGLTMKDIINEAAREGHDLLFADNPSAVLKELTGLIQNTIRSKWHEVLE

SEQ ID NO: 1281 - DNA, 1038 bp, synthetic construct
  misc_feature 1..1038: note = variant of RNA ligase 2 from Klebsiella phage KP179
  source 1..1038: mol_type = other DNA
atgcatcaccatcaccatcacggtggcagcaacatgtttgcgtattattcaagtctggaaaaccattacaataataagttcattgagaagatccgtggtgcaggcttcctgatgcacaccgtggaatgggtagctcgcgagaagattcatggaacgaactttagcgttatcattactccgaccgaaatcgtcccagccaaacgcacagggccgatcttggaaggcgagtcgttctttggtcacgaaattatcatgaaaaaatataaagactccttcgtgaaggtgcagaacatgctgaatgccatggatcttgttagcgtgcaaatctttggcgaatttgcgggtggtggcattcagaaaggcgtcgattacggagacaaagatttctatgtgtttgacatcctgtctgatagcgggaacgagaaagtttactgggatgactatcgcgtcgaatcgttttgcaccactctcggtctgaaattagcgcctctgctgggacgtggtagtttcgctgaactgtcccagtacccaaacgatttcaaaagcattgtgaaccgttataatgaattggttgacacggtcggcctggagatggccaataaacacgtctttggtccgcaagcgtcttctgaaactggcgtagcagaaggctacgttcttaaacccgtctatccgatcttctttaataccggtacgcgcgtggcgattaaatgcaagaactccaaattttcggagaaagccaagctggactcgccaattagtgcgagcgatgaactgacggagaacgataaacgtctgctcgaaatctttagcgagtatgttacctggaatcgcgtcagtaacgtactgtcacatattggctcagtgaccgcaaaagattttgggcgtgtttcgggtctgacgatgaaagacatcattaatgaagcagcacgcgaaggccatgatctgttgttcgctgataacccgtcggcggtgctgaaggagctgactggcctcatccagaacacgattcgctccaaatggcacgaagttctggag

SEQ ID NO: 1282 - protein, 346 aa, synthetic construct
  REGION 1..346: note = variant of RNA ligase 2 from Klebsiella phage KP179
MHHHHHHGGSNMFAYYSSLENHYNNKFIEKIRGAGFLMHTVEWVAREKIHGTNFSVIITPTEIVPAKRTGPILEGESFFGHEIIMKKYKDSFVKVQNMLNAMDLVSVQIFGEFAGGGIQKGVDYGDKDFYVFDILSDSGNEKVYWDDYRVESFCTTLGLKLAPLLGRGSFAELSQYPNDFKSIVNRYNELVDTVGLEMANKHVFGPQASSETGVAEGYVLKPVYPIFFNTGTRVAIKCKNSKFSEKAKLDSPISASDELTENDKRLLEIFSEYVTWNRVSNVLSHIGSVTAKDFGRVSGLTMKDIINEAAREGHDLLFADNPSAVLKELTGLIQNTIRSKWHEVLE

SEQ ID NO: 1283 - DNA, 1038 bp, synthetic construct
  misc_feature 1..1038: note = variant of RNA ligase 2 from Klebsiella phage KP179
  source 1..1038: mol_type = other DNA
atgcatcaccatcaccatcacggtggcagcaacatgtttgcgtattattcaagtctggaaaaccattacaataataagttcattgagaagatccgtggtgcaggcttcctgatgcacaccgtggaatgggtagctcgcgagaagattcatggaacgaactttagcgttatcattactccgaccgaaatcgtcccagccaaacgcacagggccgatcttggaaggcgagtcgttctttggtcacgaaattatcatgaaaaaatataaagactccttcgtgaaggtgcagaacatgctgaatgccatggatcttgttagcgtgcaaatctttggcgaatttgcgggtggtggcattcagaaaggcgtcgattacggagacaaagatttctatgtgtttgacatcctgtctgatagcgggaacgagaaagtttactgggatgactatcgcgtcgaatcgttttgcaccggtctcggtctgaaattagcgcctctgctgggacgtggtagtttcgctgaactgtcccagtacccaaacgatttcaaaagcattgtgaaccgttataatgaattggttgacacggtcggcctggagatggccaataaacacgtctttggtccgcaagcgtcttctgaaactggcgtagcagaaggctacgttcttaaacccgtctatccgatcttctttaataccggtacgcgcgtggcgattaaatgcaagaactccaaattttcggagaaagccaagctggactcgccaattagttcgaaggatgaactgacggagaacgataaacgtctgctcgaaatctttagcgagtatgttacctggaatcgcgtcagtaacgtactgtcacatattggctcagtgaccgcaaaagattttgggcgtgtttcgggtctgacgatgaaagacatcattaatgaagcagcacgcgaaggccatgatctgttgttcgctgataacccgtcggcggtgctgaaggagctgactggcctcatccagaacacgattcgctccaaatggcacgaagttctggag

SEQ ID NO: 1284 - protein, 346 aa, synthetic construct
  REGION 1..346: note = variant of RNA ligase 2 from Klebsiella phage KP179
MHHHHHHGGSNMFAYYSSLENHYNNKFIEKIRGAGFLMHTVEWVAREKIHGTNFSVIITPTEIVPAKRTGPILEGESFFGHEIIMKKYKDSFVKVQNMLNAMDLVSVQIFGEFAGGGIQKGVDYGDKDFYVFDILSDSGNEKVYWDDYRVESFCTGLGLKLAPLLGRGSFAELSQYPNDFKSIVNRYNELVDTVGLEMANKHVFGPQASSETGVAEGYVLKPVYPIFFNTGTRVAIKCKNSKFSEKAKLDSPISSKDELTENDKRLLEIFSEYVTWNRVSNVLSHIGSVTAKDFGRVSGLTMKDIINEAAREGHDLLFADNPSAVLKELTGLIQNTIRSKWHEVLE

SEQ ID NO: 1285 - DNA, 1038 bp, synthetic construct
  misc_feature 1..1038: note = variant of RNA ligase 2 from Klebsiella phage KP179
  source 1..1038: mol_type = other DNA
atgcatcaccatcaccatcacggtggcagcaacatgtttgcgtattattcaagtctggaaaaccattacaataataagttcattgagaagatccgtggtgcaggcttcctgatgcacaccgtggaatgggtagctcgcgagaagattcatggaacgaactttagcgttatcattactccgaccgaaatcgtcccagccaaacgcacagggccgatcttggaaggcgagtcgttctttggtcacgaaattatcatgaaaaaatataaagactccttcgtgaaggtgcagaacatgctgaatgccatggatcttgttagcgtgcaaatctttggcgaatttgcgggtggtggcattcagaaaggcgtcgattacggagacaaagatttctatgtgtttgacatcctgtctgatagcgggaacgagaaagtttactgggatgactatcgcgtcgaatcgttttgcaccggtctcggtctgaaattagcgcctctgctgggacgtggtagtttcgctgaactgtcccagtacccaaacgatttcaaaagcattgtgaaccgttataatgaattggttgacacggtcggcctggagatggccaataaacacgtctttggtccgcaagcgtcttctgaaactggcgtagcagaaggctacgttcttaaacccgtctatccgatcttctttaataccggtacgcgcgtggcgattaaatgcaagaactccaaattttcggagaaagccaagctggactcgccaattagtgttaaggatgaactgacggagaacgataaacgtctgctcgaaatctttagcgagtatgttacctggaatcgcgtcagtaacgtactgtcacatattggctcagtgaccgcaaaagattttgggcgtgtttcgggtctgacgatgaaagacatcattaatgaagcagcacgcgaaggccatgatctgttgttcgctgataacccgtcggcggtgctgaaggagctgactggcctcatccagaacacgattcgctccaaatggcacgaagttctggag

SEQ ID NO: 1286 - protein, 346 aa, synthetic construct
  REGION 1..346: note = variant of RNA ligase 2 from Klebsiella phage KP179
MHHHHHHGGSNMFAYYSSLENHYNNKFIEKIRGAGFLMHTVEWVAREKIHGTNFSVIITPTEIVPAKRTGPILEGESFFGHEIIMKKYKDSFVKVQNMLNAMDLVSVQIFGEFAGGGIQKGVDYGDKDFYVFDILSDSGNEKVYWDDYRVESFCTGLGLKLAPLLGRGSFAELSQYPNDFKSIVNRYNELVDTVGLEMANKHVFGPQASSETGVAEGYVLKPVYPIFFNTGTRVAIKCKNSKFSEKAKLDSPISVKDELTENDKRLLEIFSEYVTWNRVSNVLSHIGSVTAKDFGRVSGLTMKDIINEAAREGHDLLFADNPSAVLKELTGLIQNTIRSKWHEVLE

SEQ ID NO: 1287 - DNA, 1038 bp, synthetic construct
  misc_feature 1..1038: note = variant of RNA ligase 2 from Klebsiella phage KP179
  source 1..1038: mol_type = other DNA
atgcatcaccatcaccatcacggtggcagcaacacgtttgcgtattattcaagtctggaaaaccattacaataataagttcattgagaagatccgtggtgcaggcttcctgatgcacaccgtggaatgggtagctcgcgagaagattcatggaacgaactttagcgttatcattacttcgaccgaaatcgtcccagccaaacgcacagggccgatcttggaaggcgagtcgttctttggtcacgaaattatcatgaaaaaatataaagactccttcgtgaaggtgcagaacatgctgaatgccatggatcttgttagcgtgcaaatctttggcgaatttgcgggtggtggcattcagaaaggcgtcgattacggagacaaagatttctatgtgtttgacatcctgtctgatagcgggaacgagaaagtttactgggatgactatcgcgtcgaatcgttttgcaccaccctcggtctgaaattagcgcctctgctgggacgtggtagtttcgctgaactgtcccagtacccaaacgatttcaaaagcattgtgaaccgttataatgaattggttgacacggtcggcctggagatggccaataaacacgtctttggtccgcaagcgtcttctgaaactggcgtagcagaaggctacgttcttaaacccgtctatccgatcttctttaataccggtacgcgcgtggcgattaaatgcaagaactccaaattttcggagaaagccaagctggactcgccaattagtgcgaaggtggaactgacggagaacgataaacgtctgctcgaaatctttagcgagtatgttacctggaatcgcgtcagtaacgtactgtcacatattggctcagtgaccgcaaaagattttgggcgtgtttcgggtctgacgatgaaagacatcattaatgaagcagcacgcgaaggccatgatctgttgttcgctgataacccgtcggcggtgctgaaggagctgactggcctcatccagaacacgattcgctccaaatggcacgaagttctggag

SEQ ID NO: 1288 - protein, 346 aa, synthetic construct
  REGION 1..346: note = variant of RNA ligase 2 from Klebsiella phage KP179
MHHHHHHGGSNTFAYYSSLENHYNNKFIEKIRGAGFLMHTVEWVAREKIHGTNFSVIITSTEIVPAKRTGPILEGESFFGHEIIMKKYKDSFVKVQNMLNAMDLVSVQIFGEFAGGGIQKGVDYGDKDFYVFDILSDSGNEKVYWDDYRVESFCTTLGLKLAPLLGRGSFAELSQYPNDFKSIVNRYNELVDTVGLEMANKHVFGPQASSETGVAEGYVLKPVYPIFFNTGTRVAIKCKNSKFSEKAKLDSPISAKVELTENDKRLLEIFSEYVTWNRVSNVLSHIGSVTAKDFGRVSGLTMKDIINEAAREGHDLLFADNPSAVLKELTGLIQNTIRSKWHEVLE

SEQ ID NO: 1289 - DNA, 1038 bp, synthetic construct
  misc_feature 1..1038: note = variant of RNA ligase 2 from Klebsiella phage KP179
  source 1..1038: mol_type = other DNA
atgcatcaccatcaccatcacggtggcagcaacatgtttgcgtattattcaagtctggaaaaccattacaataataagttcattgagaagatccgtggtgcaggcttcctgatgcacaccgtggaatgggtagctcgcgagaagattcatggaacgaactttagcgttatcattactccgaccgaaatcgtcccagccaaacgcacagggccgatcttggaaggcgagtcgttctttggtcacgaaattatcatgaaaaaatataaagactccttcgtgaaggtgcagaacatgctgaatgccatggatcttgttagcgtgcaaatctttggcgaatttgcgggtggtggcattcagaaaggcgtcgattacggagacaaagatttctatgtgtttgacatcctgtctgatagcgggaacgagaaagtttactgggatgactatcgcgtcgaatcgttttgcaccactctcggtctgaaattagcgcctctgctgggacgtggtagtttcgctgaactgtcccagtacccaaacgatttcaaaagcattgtgaaccgttataatgaattggttgacacggtcggcctggagatggccaataaacacgtctttggtccgcaagcgtcttctgaaactggcgtagcagaaggctacgttcttaaacccgtctatccgatcttctttaataccggtacgcgcgtggcgattaaatgcaagaactccaaattttcggagaaagccaagctggactcgccaattagttatagcgttgaactgacggacaacgataaacgtctgctcgaaatctttagcgagtatgttacctggaatcgcgtcagtaacgtactgtcacatattggctcagtgaccgcaaaagattttgggcgtgtttcgggtctgacgatgaaagacatcattaatgaagcagcacgcgaaggccatgatctgttgttcgctgataacccgtcggcggtgctgaaggagctgactggcctcatccagaacacgattcgctccaaatggcacgaagttctggag

SEQ ID NO: 1290 - protein, 346 aa, synthetic construct
  REGION 1..346: note = variant of RNA ligase 2 from Klebsiella phage KP179
MHHHHHHGGSNMFAYYSSLENHYNNKFIEKIRGAGFLMHTVEWVAREKIHGTNFSVIITPTEIVPAKRTGPILEGESFFGHEIIMKKYKDSFVKVQNMLNAMDLVSVQIFGEFAGGGIQKGVDYGDKDFYVFDILSDSGNEKVYWDDYRVESFCTTLGLKLAPLLGRGSFAELSQYPNDFKSIVNRYNELVDTVGLEMANKHVFGPQASSETGVAEGYVLKPVYPIFFNTGTRVAIKCKNSKFSEKAKLDSPISYSVELTDNDKRLLEIFSEYVTWNRVSNVLSHIGSVTAKDFGRVSGLTMKDIINEAAREGHDLLFADNPSAVLKELTGLIQNTIRSKWHEVLE

SEQ ID NO: 1291 - DNA, 1038 bp, synthetic construct
  misc_feature 1..1038: note = variant of RNA ligase 2 from Klebsiella phage KP179
  source 1..1038: mol_type = other DNA
atgcatcaccatcaccatcacggtggcagcaacatgtttgcgtattattcaagtctggaaaaccattacaataataagttcattgagaagatccgtggtgcaggcttcctgatgcacaccgtggaatgggtagctcgcgagaagattcatggaacgaactttagcgttatcattactccgaccgaaatcgtcccagccaaacgcacagggccgatcttggaaggcgagtcgttctttggtcacgaaattatcatgaaaaaatataaagactccttcgtgaaggtgcagaacatgctgaatgccatggatcttgttagcgtgcaaatctttggcgaatttgcgggtggtggcattcagaaaggcgtcgattacggagacaaagatttctatgtgtttgacatcctgtctgatagcgggaacgagaaagtttactgggatgactatcgcgtcgaatcgttttgcaccactctcggtctgaaattagcgcctctgctgggacgtggtagtttcgctgaactgtcccagtacccaaacgatttcaaaagcattgtgaaccgttataatgaattggttgacacggtcggcctggagatggccaataaacacgtctttggtccgcaagcgtcttctgaaactggcgtagcagaaggctacgttcttaaacccgtctatccgatcttctttaataccggtacgcgcgtggcgattaaatgcaagaactccaaattttcggagaaagccaagctggactcgccaattagtgcgagcgttgaactgacggagaacgataaacgtctgctcgaaatctttagcgagtatgttacctggaatcgcgtcagtaacgtactgtcacatattggctcagtgaccgcaaaagattttgggcgtgtttcgggtctgacgatgaaagacatcattaatgaagcagcacgcgaaggccatgatctgttgttcgctgataacccgtcggcggtgctgaaggagctgactggcctcatccagaacacgattcgctccaaatggcacgaagttctggag

SEQ ID NO: 1292 - protein, 346 aa, synthetic construct
  REGION 1..346: note = variant of RNA ligase 2 from Klebsiella phage KP179
MHHHHHHGGSNMFAYYSSLENHYNNKFIEKIRGAGFLMHTVEWVAREKIHGTNFSVIITPTEIVPAKRTGPILEGESFFGHEIIMKKYKDSFVKVQNMLNAMDLVSVQIFGEFAGGGIQKGVDYGDKDFYVFDILSDSGNEKVYWDDYRVESFCTTLGLKLAPLLGRGSFAELSQYPNDFKSIVNRYNELVDTVGLEMANKHVFGPQASSETGVAEGYVLKPVYPIFFNTGTRVAIKCKNSKFSEKAKLDSPISASVELTENDKRLLEIFSEYVTWNRVSNVLSHIGSVTAKDFGRVSGLTMKDIINEAAREGHDLLFADNPSAVLKELTGLIQNTIRSKWHEVLE

SEQ ID NO: 1293 - DNA, 1038 bp, synthetic construct
  misc_feature 1..1038: note = variant of RNA ligase 2 from Klebsiella phage KP179
  source 1..1038: mol_type = other DNA
atgcatcaccatcaccatcacggtggcagcaacatgtttgcgtattattcaagtctggaaaaccattacaataataagttcattgagaagatccgtggtgcaggcttcctgatgcacaccgtggaatgggtagctcgcgagaagattcatggaacgaactttagcgttatcattactccgaccgaaatcgtcccagccaaacgcacagggccgatcttggaaggcgagtcgttctttggtcacgaaattatcatgaaaaaatataaagactccttcgtgaaggtgcagaacatgctgaatgccatggatcttgttagcgtgcaaatctttggcgaatttgcgggtggtggcattcagaaaggcgtcgattacggagacaaagatttctatgtgtttgacatcctgtctgatagcgggaacgagaaagtttactgggatgactatcgcgtcgaatcgttttgcaccactctcggtctgaaattagcgcctctgctgggacgtggtagtttcgctgaactgtcccagtacccaaacgatttcaaaagcattgtgaaccgttataatgaattggttgacacggtcggcctggagatggccaataaacacgtctttggtccgcaagcgtcttctgaaactggcgtagcagaaggctacgttcttaaacccgtctatccgatcttctttaataccggtacgcgcgtggcgattaaatgcaagaactccaaattttcggagaaagccaagctggactcgccaattagttcgaaggttgaactgacggagaacgataaacgtctgctcgaaatctttagcgagtatgttacctggaatcgcgtcagtaacgtactgtcacatattggctcagtgaccgcaaaagattttgggcgtgtttcgggtctgacgatgaaagacatcattaatgaagcagcacgcgaaggccatgatctgttgttcgctgataacccgtcggcggtgctgaaggagctgactggcctcatccagaacacgattcgctccaaatggcacgaagttctggag

SEQ ID NO: 1294 - protein, 346 aa, synthetic construct
  REGION 1..346: note = variant of RNA ligase 2 from Klebsiella phage KP179
MHHHHHHGGSNMFAYYSSLENHYNNKFIEKIRGAGFLMHTVEWVAREKIHGTNFSVIITPTEIVPAKRTGPILEGESFFGHEIIMKKYKDSFVKVQNMLNAMDLVSVQIFGEFAGGGIQKGVDYGDKDFYVFDILSDSGNEKVYWDDYRVESFCTTLGLKLAPLLGRGSFAELSQYPNDFKSIVNRYNELVDTVGLEMANKHVFGPQASSETGVAEGYVLKPVYPIFFNTGTRVAIKCKNSKFSEKAKLDSPISSKVELTENDKRLLEIFSEYVTWNRVSNVLSHIGSVTAKDFGRVSGLTMKDIINEAAREGHDLLFADNPSAVLKELTGLIQNTIRSKWHEVLE

SEQ ID NO: 1295 - DNA, 1038 bp, synthetic construct
  misc_feature 1..1038: note = variant of RNA ligase 2 from Klebsiella phage KP179
  source 1..1038: mol_type = other DNA
atgcatcaccatcaccatcacggtggcagcaacacgtttgcgtattattcaagtctggaaaaccattacaataataagttcattgagaagatccgtggtgcaggcttcctgatgcacaccgtggaatgggtagctcgcgagaagattcatggaacgaactttagcgttatcattactccgaccgaaatcgtcccagccaaacgcacagggccgatcttggaaggcgagtcgttctttggtcacgaaattatcatgaaaaaatataaagactccttcgtgaaggtgcagaacatgctgaatgccatggatcttgttagcgtgcaaatctttggcgaatttgcgggtggtggcattcagaaaggcgtcgattacggagacaaagatttctatgtgtttgacatcctgtctgatagcgggaacgagaaagtttactgggatgactatcgcgtcgaatcgttttgcaccactctcggtctgaaattagcgcctctgctgggacgtggtagtttcgctgaactgtcccagtacccaaacgatttcaaaagcattgtgaaccgttataatgaattggttgacacggtcggcctggagatggccaataaacacgtctttggtccgcaagcgtcttctgaaactggcgtagcagaaggctacgttcttaaacccgtctatccgatcttctttaataccggtacgcgcgtggcgattaaatgcaagaactccaaattttcggagaaagccaagctggactcgccaattagttcgaaggatgaactgacggacaacgataaacgtctgctcgaaatctttagcgagtatgttacctggaatcgcgtcagtaacgtactgtcacatattggctcagtgaccgcaaaagattttgggcgtgtttcgggtctgacgatgaaagacatcattaatgaagcagcacgcgaaggccatgatctgttgttcgctgataacccgtcggcggtgctgaaggagctgactggcctcatccagaacacgattcgctccaaatggcacgaagttctggag

SEQ ID NO: 1296 - protein, 346 aa, synthetic construct
  REGION 1..346: note = variant of RNA ligase 2 from Klebsiella phage KP179
MHHHHHHGGSNTFAYYSSLENHYNNKFIEKIRGAGFLMHTVEWVAREKIHGTNFSVIITPTEIVPAKRTGPILEGESFFGHEIIMKKYKDSFVKVQNMLNAMDLVSVQIFGEFAGGGIQKGVDYGDKDFYVFDILSDSGNEKVYWDDYRVESFCTTLGLKLAPLLGRGSFAELSQYPNDFKSIVNRYNELVDTVGLEMANKHVFGPQASSETGVAEGYVLKPVYPIFFNTGTRVAIKCKNSKFSEKAKLDSPISSKDELTDNDKRLLEIFSEYVTWNRVSNVLSHIGSVTAKDFGRVSGLTMKDIINEAAREGHDLLFADNPSAVLKELTGLIQNTIRSKWHEVLE

SEQ ID NO: 1297 - DNA, 1038 bp, synthetic construct
  misc_feature 1..1038: note = variant of RNA ligase 2 from Klebsiella phage KP179
  source 1..1038: mol_type = other DNA
atgcatcaccatcaccatcacggtggcagcaacatgtttgcgtattattcaagtctggaaaaccattacaataataagttcattgagaagatccgtggtgcaggcttcctgatgcacaccgtggaatgggtagctcgcgagaagattcatggaacgaactttagcgttatcattactccgaccgaaatcgtcccagccaaacgcacagggccgatcttggaaggcgagtcgttctttggtcacgaaattatcatgaaaaaatataaagactccttcgtgaaggtgcagaacatgctgaatgccatggatcttgttagcgtgcaaatctttggcgaatttgcgggtggtggcattcagaaaggcgtcgattacggagacaaagatttctatgtgtttgacatcctgtctgatagcgggaacgagaaagtttactgggatgactatcgcgtcgaatcgttttgcaccggtctcggtctgaaattagcgcctctgctgggacgtggtagtttcgctgaactgtcccagtacccaaacgatttcaaaagcattgtgaaccgttataatgaattggttgacacggtcggcctggagatggccaataaacacgtctttggtccgcaagcgtcttctgaaactggcgtagcagaaggctacgttcttaaacccgtctatccgatcttctttaataccggtacgcgcgtggcgattaaatgcaagaactccaaattttcggagaaagccaagctggactcgccaattagtgcgagcgttgaactgacggagaacgataaacgtctgctcgaaatctttagcgagtatgttacctggaatcgcgtcagtaacgtactgtcacatattggctcagtgaccgcaaaagattttgggcgtgtttcgggtctgacgatgaaagacatcattaatgaagcagcacgcgaaggccatgatctgttgttcgctgataacccgtcggcggtgctgaaggagctgactggcctcatccagaacacgattcgctccaaatggcacgaagttctggag

SEQ ID NO: 1298 - protein, 346 aa, synthetic construct
  REGION 1..346: note = variant of RNA ligase 2 from Klebsiella phage KP179
MHHHHHHGGSNMFAYYSSLENHYNNKFIEKIRGAGFLMHTVEWVAREKIHGTNFSVIITPTEIVPAKRTGPILEGESFFGHEIIMKKYKDSFVKVQNMLNAMDLVSVQIFGEFAGGGIQKGVDYGDKDFYVFDILSDSGNEKVYWDDYRVESFCTGLGLKLAPLLGRGSFAELSQYPNDFKSIVNRYNELVDTVGLEMANKHVFGPQASSETGVAEGYVLKPVYPIFFNTGTRVAIKCKNSKFSEKAKLDSPISASVELTENDKRLLEIFSEYVTWNRVSNVLSHIGSVTAKDFGRVSGLTMKDIINEAAREGHDLLFADNPSAVLKELTGLIQNTIRSKWHEVLE

SEQ ID NO: 1299 - DNA, 1038 bp, synthetic construct
  misc_feature 1..1038: note = variant of RNA ligase 2 from Klebsiella phage KP179
  source 1..1038: mol_type = other DNA
atgcatcaccatcaccatcacggtggcagcaacatgtttgcgtattattcaagtctggaaaaccattacaataataagttcattgagaagatccgtggtgcaggcttcctgatgcacaccgtggaatgggtagctcgcgagaagattcatggaacgaactttagcgttatcattactccgaccgaaatcgtcccagccaaacgcacagggccgatcttggaaggcgagtcgttctttggtcacgaaattatcatgaaaaaatataaagactccttcgtgaaggtgcagaacatgctgaatgccatggatcttgttagcgtgcaaatctttggcgaatttgcgggtggtggcattcagaaaggcgtcgattacggagacaaagatttctatgtgtttgacatcctgtctgatagcgggaacgagaaagtttactgggatgactatcgcgtcgaatcgttttgcaccactctcggtctgaaattagcgcctctgctgggacgtggtagtttcgctgaactgtcccagtacccaaacgatttcaaaagcattgtgaaccgttataatgaattggttgacacggtcggcctggagatggccaataaacacgtctttggtccgcaagcgtcttctgaaactggcgtagcagaaggctacgttcttaaacccgtctatccgatcttctttaataccggtacgcgcgtggcgattaaatgcaagaactccaaattttcggagaaagccaagctggactcgccaattagttataaggatgaactgacggacaacgataaacgtctgctcgaaatctttagcgagtatgttacctggaatcgcgtcagtaacgtactgtcacatattggctcagtgaccgcaaaagattttgggcgtgtttcgggtctgacgatgaaagacatcattaatgaagcagcacgcgaaggccatgatctgttgttcgctgataacccgtcggcggtgctgaaggagctgactggcctcatccagaacacgattcgctccaaatggcacgaagttctggag

SEQ ID NO: 1300 - protein, 346 aa, synthetic construct
  REGION 1..346: note = variant of RNA ligase 2 from Klebsiella phage KP179
MHHHHHHGGSNMFAYYSSLENHYNNKFIEKIRGAGFLMHTVEWVAREKIHGTNFSVIITPTEIVPAKRTGPILEGESFFGHEIIMKKYKDSFVKVQNMLNAMDLVSVQIFGEFAGGGIQKGVDYGDKDFYVFDILSDSGNEKVYWDDYRVESFCTTLGLKLAPLLGRGSFAELSQYPNDFKSIVNRYNELVDTVGLEMANKHVFGPQASSETGVAEGYVLKPVYPIFFNTGTRVAIKCKNSKFSEKAKLDSPISYKDELTDNDKRLLEIFSEYVTWNRVSNVLSHIGSVTAKDFGRVSGLTMKDIINEAAREGHDLLFADNPSAVLKELTGLIQNTIRSKWHEVLE

SEQ ID NO: 1301 - DNA, 1038 bp, synthetic construct
  misc_feature 1..1038: note = variant of RNA ligase 2 from Klebsiella phage KP179
  source 1..1038: mol_type = other DNA
atgcatcaccatcaccatcacggtggcagcaacacgtttgcgtattattcaagtctggaaaaccattacaatgctaagttcattgagaagatccgtggtgcaggcttcctgatgcacaccgtggaatgggtagctcgcgagaagattcatggaacgaactttagcgttatcattactccgaccgaaatcgtcccagccaaacgcacagggccgatcttggaaggcgagtcgttctttggtcacgaaattatcatgaaaaaatataaagactccttcgtgaaggtgcagaacatgctgaatgccatggatcttgttagcgtgcaaatctttggcgaatttgcgggtggtggcattcagaaaggcgtcgattacggagacaaagatttctatgtgtttgacatcctgtctgatagcgggaacgagaaagtttactgggatgactatcgcgtcgaatcgttttgcaccactctcggtctgaaattagcgcctctgctgggacgtggtagtttcgctgaactgtcccagtacccaaacgatttcaaaagcattgtgaaccgttataatgaattggttgacacggtcggcctggagatggccaataaacacgtctttggtccgcaagcgtcttctgaaactggcgtagcagaaggctacgttcttaaacccgtctatccgatcttctttaataccggtacgcgcgtggcgattaaatgcaagaactccaaattttcggagaaagccaagctggactcgccaattagtgttaaggatgaactgacggacaacgataaacgtctgctcgaaatctttagcgagtatgttacctggaatcgcgtcagtaacgtactgtcacatattggctcagtgaccgcaaaagattttgggcgtgtttcgggtctgacgatgaaagacatcattaatgaagcagcacgcgaaggccatgatctgttgttcgctgataacccgtcggcggtgctgaaggagctgactggcctcatccagaacacgattcgctccaaatggcacgaagttctggag

SEQ ID NO: 1302 - protein, 346 aa, synthetic construct
  REGION 1..346: note = variant of RNA ligase 2 from Klebsiella phage KP179
MHHHHHHGGSNTFAYYSSLENHYNAKFIEKIRGAGFLMHTVEWVAREKIHGTNFSVIITPTEIVPAKRTGPILEGESFFGHEIIMKKYKDSFVKVQNMLNAMDLVSVQIFGEFAGGGIQKGVDYGDKDFYVFDILSDSGNEKVYWDDYRVESFCTTLGLKLAPLLGRGSFAELSQYPNDFKSIVNRYNELVDTVGLEMANKHVFGPQASSETGVAEGYVLKPVYPIFFNTGTRVAIKCKNSKFSEKAKLDSPISVKDELTDNDKRLLEIFSEYVTWNRVSNVLSHIGSVTAKDFGRVSGLTMKDIINEAAREGHDLLFADNPSAVLKELTGLIQNTIRSKWHEVLE

SEQ ID NO: 1303 - DNA, 1038 bp, synthetic construct
  misc_feature 1..1038: note = variant of RNA ligase 2 from Klebsiella phage KP179
  source 1..1038: mol_type = other DNA
atgcatcaccatcaccatcacggtggcagcaacatgtttgcgtattattcaagtctggaaaaccattacaatgctaagttcattgacaagatccgtggtgcaggcttcctgatgcacaccgtggaatgggtagctcgcgagaagattcatggaacgaactttagcgttatcattactccgaccgaaatcgtcccagccaaacgcacagggccgatcttggaaggcgagtcgttctttggtcacgaaattatcatgaaaaaatataaagactccttcgtgaaggtgcagaacatgctgaatgccatggatcttgttagcgtgcaaatctttggcgaatttgcgggtggtggcattcagaaaggcgtcgattacggagacaaagatttctatgtgtttgacatcctgtctgatagcgggaacgagaaagtttactgggatgactatcgcgtcgaatcgttttgcaccactctcggtctgaaattagcgcctctgctgggacgtggtagtttcgctgaactgtcccagtacccaaacgatttcaaaagcattgtgaaccgttataatgaattggttgacacggtcggcctggagatggccaataaacacgtctttggtccgcaagcgtcttctgaaactggcgtagcagaaggctacgttcttaaacccgtctatccgatcttctttaataccggtacgcgcgtggcgattaaatgcaagaactccaaattttcggagaaagccaagctggactcgccaattagtaatagcgttgaactgacggacaacgataaacgtctgctcgaaatctttagcgagtatgttacctggaatcgcgtcagtaacgtactgtcacatattggctcagtgaccgcaaaagattttgggcgtgtttcgggtctgacgatgaaagacatcattaatgaagcagcacgcgaaggccatgatctgttgttcgctgataacccgtcggcggtgctgaaggagctgactggcctcatccagaacacgattcgctccaaatggcacgaagttctggag

SEQ ID NO: 1304 - protein, 346 aa, synthetic construct
  REGION 1..346: note = variant of RNA ligase 2 from Klebsiella phage KP179
MHHHHHHGGSNMFAYYSSLENHYNAKFIDKIRGAGFLMHTVEWVAREKIHGTNFSVIITPTEIVPAKRTGPILEGESFFGHEIIMKKYKDSFVKVQNMLNAMDLVSVQIFGEFAGGGIQKGVDYGDKDFYVFDILSDSGNEKVYWDDYRVESFCTTLGLKLAPLLGRGSFAELSQYPNDFKSIVNRYNELVDTVGLEMANKHVFGPQASSETGVAEGYVLKPVYPIFFNTGTRVAIKCKNSKFSEKAKLDSPISNSVELTDNDKRLLEIFSEYVTWNRVSNVLSHIGSVTAKDFGRVSGLTMKDIINEAAREGHDLLFADNPSAVLKELTGLIQNTIRSKWHEVLE

SEQ ID NO: 1305 - DNA, 1038 bp, synthetic construct
  misc_feature 1..1038: note = variant of RNA ligase 2 from Klebsiella phage KP179
  source 1..1038: mol_type = other DNA
atgcatcaccatcaccatcacggtggcagcaacatgtttgcgtattattcaagtctggaaaaccattacaataataagttcattgagaagatccgtggtgcaggcttcctgatgcacaccgtggaatgggtagctcgcgagaagattcatggaacgaactttagcgttatcattactccgaccgaaatcgtcccagccaaacgcacagggccgatcttggaaggcgagtcgttctttggtcacgaaattatcatgaaaaaatataaagactccttcgtgaaggtgcagaacatgctgaatgccatggatcttgttagcgtgcaaatctttggcgaatttgcgggtggtggcattcagaaaggcgtcgattacggagacaaagatttctatgtgtttgacatcctgtctgatagcgggaacgagaaagtttactgggatgactatcgcgtcgaatcgttttgcaccactctcggtctgaaattagcgcctctgctgggacgtggtagtttcgctgaactgtcccagtacccaaacgatttcaaaagcattgtgaaccgttataatgaattggttgacacggtcggcctggagatggccaataaacacgtctttggtccgcaagcgtcttctgaaactggcgtagcagaaggctacgttcttaaacccgtctatccgatcttctttaataccggtacgcgcgtggcgattaaatgcaagaactccaaattttcggagaaagccaagctggactcgccaattagtgttaaggatgaactgacggagaacgataaacgtctgctcgaaatctttagcgagtatgttacctggaatcgcgtcagtaacgtactgtcacatattggctcagtgaccgcaaaagattttgggcgtgtttcgggtctgacgatgaaagacatcattaatgaagcagcacgcgaaggccatgatctgttgttcgctgataacccgtcggcggtgctgaaggagctgactggcctcatccagaacacgattcgctccaaatggcacgaagttctggag

SEQ ID NO: 1306 - protein, 346 aa, synthetic construct
  REGION 1..346: note = variant of RNA ligase 2 from Klebsiella phage KP179
MHHHHHHGGSNMFAYYSSLENHYNNKFIEKIRGAGFLMHTVEWVAREKIHGTNFSVIITPTEIVPAKRTGPILEGESFFGHEIIMKKYKDSFVKVQNMLNAMDLVSVQIFGEFAGGGIQKGVDYGDKDFYVFDILSDSGNEKVYWDDYRVESFCTTLGLKLAPLLGRGSFAELSQYPNDFKSIVNRYNELVDTVGLEMANKHVFGPQASSETGVAEGYVLKPVYPIFFNTGTRVAIKCKNSKFSEKAKLDSPISVKDELTENDKRLLEIFSEYVTWNRVSNVLSHIGSVTAKDFGRVSGLTMKDIINEAAREGHDLLFADNPSAVLKELTGLIQNTIRSKWHEVLE

SEQ ID NO: 1307 - DNA, 1038 bp, synthetic construct
  misc_feature 1..1038: note = variant of RNA ligase 2 from Klebsiella phage KP179
  source 1..1038: mol_type = other DNA
atgcatcaccatcaccatcacggtggcagcaacatgtttgcgtattattcaagtctggaaaaccattacaataataagttcattgacaagatccgtggtgcaggcttcctgatgcacaccgtggaatgggtagctcgcgagaagattcatggaacgaactttagcgttatcattactccgaccgaaatcgtcccagccaaacgcacagggccgatcttggaaggcgagtcgttctttggtcacgaaattatcatgaaaaaatataaagactccttcgtgaaggtgcagaacatgctgaatgccatggatcttgttagcgtgcaaatctttggcgaatttgcgggtggtggcattcagaaaggcgtcgattacggagacaaagatttctatgtgtttgacatcctgtctgatagcgggaacgagaaagtttactgggatgactatcgcgtcgaatcgttttgcaccggtctcggtctgaaattagcgcctctgctgggacgtggtagtttcgctgaactgtcccagtacccaaacgatttcaaaagcattgtgaaccgttataatgaattggttgacacggtcggcctggagatggccaataaacacgtctttggtccgcaagcgtcttctgaaactggcgtagcagaaggctacgttcttaaacccgtctatccgatcttctttaataccggtacgcgcgtggcgattaaatgcaagaactccaaattttcggagaaagccaagctggactcgccaattagtgttagcgttgaactgacggagaacgataaacgtctgctcgaaatctttagcgagtatgttacctggaatcgcgtcagtaacgtactgtcacatattggctcagtgaccgcaaaagattttgggcgtgtttcgggtctgacgatgaaagacatcattaatgaagcagcacgcgaaggccatgatctgttgttcgctgataacccgtcggcggtgctgaaggagctgactggcctcatccagaacacgattcgctccaaatggcacgaagttctggag

SEQ ID NO: 1308 - protein, 346 aa, synthetic construct
  REGION 1..346: note = variant of RNA ligase 2 from Klebsiella phage KP179
MHHHHHHGGSNMFAYYSSLENHYNNKFIDKIRGAGFLMHTVEWVAREKIHGTNFSVIITPTEIVPAKRTGPILEGESFFGHEIIMKKYKDSFVKVQNMLNAMDLVSVQIFGEFAGGGIQKGVDYGDKDFYVFDILSDSGNEKVYWDDYRVESFCTGLGLKLAPLLGRGSFAELSQYPNDFKSIVNRYNELVDTVGLEMANKHVFGPQASSETGVAEGYVLKPVYPIFFNTGTRVAIKCKNSKFSEKAKLDSPISVSVELTENDKRLLEIFSEYVTWNRVSNVLSHIGSVTAKDFGRVSGLTMKDIINEAAREGHDLLFADNPSAVLKELTGLIQNTIRSKWHEVLE

SEQ ID NO: 1309 - DNA, 1038 bp, synthetic construct
  misc_feature 1..1038: note = variant of RNA ligase 2 from Klebsiella phage KP179
  source 1..1038: mol_type = other DNA
atgcatcaccatcaccatcacggtggcagcaacacgtttgcgtattattcaagtctggaaaaccattacaataataagttcattgagaagatccgtggtgcaggcttcctgatgcacaccgtggaatgggtagctcgcgagaagattcatggaacgaactttagcgttatcattactccgaccgaaatcgtcccagccaaacgcacagggccgatcttggaaggcgagtcgttctttggtcacgaaattatcatgaaaaaatataaagactccttcgtgaaggtgcagaacatgctgaatgccatggatcttgttagcgtgcaaatctttggcgaatttgcgggtggtggcattcagaaaggcgtcgattacggagacaaagatttctatgtgtttgacatcctgtctgatagcgggaacgagaaagtttactgggatgactatcgcgtcgaatcgttttgcaccactctcggtctgaaattagcgcctctgctgggacgtggtagtttcgctgaactgtcccagtacccaaacgatttcaaaagcattgtgaaccgttataatgaattggttgacacggtcggcctggagatggccaataaacacgtctttggtccgcaagcgtcttctgaaactggcgtagcagaaggctacgttcttaaacccgtctatccgatcttctttaataccggtacgcgcgtggcgattaaatgcaagaactccaaattttcggagaaagccaagctggactcgccaattagttcgagcgttgaactgacggagaacgataaacgtctgctcgaaatctttagcgagtatgttacctggaatcgcgtcagtaacgtactgtcacatattggctcagtgaccgcaaaagattttgggcgtgtttcgggtctgacgatgaaagacatcattaatgaagcagcacgcgaaggccatgatctgttgttcgctgataacccgtcggcggtgctgaaggagctgactggcctcatccagaacacgattcgctccaaatggcacgaagttctggag

SEQ ID NO: 1310 - protein, 346 aa, synthetic construct
  REGION 1..346: note = variant of RNA ligase 2 from Klebsiella phage KP179
MHHHHHHGGSNTFAYYSSLENHYNNKFIEKIRGAGFLMHTVEWVAREKIHGTNFSVIITPTEIVPAKRTGPILEGESFFGHEIIMKKYKDSFVKVQNMLNAMDLVSVQIFGEFAGGGIQKGVDYGDKDFYVFDILSDSGNEKVYWDDYRVESFCTTLGLKLAPLLGRGSFAELSQYPNDFKSIVNRYNELVDTVGLEMANKHVFGPQASSETGVAEGYVLKPVYPIFFNTGTRVAIKCKNSKFSEKAKLDSPISSSVELTENDKRLLEIFSEYVTWNRVSNVLSHIGSVTAKDFGRVSGLTMKDIINEAAREGHDLLFADNPSAVLKELTGLIQNTIRSKWHEVLE

SEQ ID NO: 1311 - DNA, 1038 bp, synthetic construct
  misc_feature 1..1038: note = variant of RNA ligase 2 from Klebsiella phage KP179
  source 1..1038: mol_type = other DNA
atgcatcaccatcaccatcacggtggcagcaacatgtttgcgtattattcaagtctggaaaaccattacaatgctaagttcattgagaagatccgtggtgcaggcttcctgatgcacaccgtggaatgggtagctcgcgagaagattcatggaacgaactttagcgttatcattactccgaccgaaatcgtcccagccaaacgcacagggccgatcttggaaggcgagtcgttctttggtcacgaaattatcatgaaaaaatataaagactccttcgtgaaggtgcagaacatgctgaatgccatggatcttgttagcgtgcaaatctttggcgaatttgcgggtggtggcattcagaaaggcgtcgattacggagacaaagatttctatgtgtttgacatcctgtctgatagcgggaacgagaaagtttactgggatgactatcgcgtcgaatcgttttgcaccggtctcggtctgaaattagcgcctctgctgggacgtggtagtttcgctgaactgtcccagtacccaaacgatttcaaaagcattgtgaaccgttataatgaattggttgacacggtcggcctggagatggccaataaacacgtctttggtccgcaagcgtcttctgaaactggcgtagcagaaggctacgttcttaaacccgtctatccgatcttctttaataccggtacgcgcgtggcgattaaatgcaagaactccaaattttcggagaaagccaagctggactcgccaattagtgttagcgttgaactgacggagaacgataaacgtctgctcgaaatctttagcgagtatgttacctggaatcgcgtcagtaacgtactgtcacatattggctcagtgaccgcaaaagattttgggcgtgtttcgggtctgacgatgaaagacatcattaatgaagcagcacgcgaaggccatgatctgttgttcgctgataacccgtcggcggtgctgaaggagctgactggcctcatccagaacacgattcgctccaaatggcacgaagttctggag

SEQ ID NO: 1312 - protein, 346 aa, synthetic construct
  REGION 1..346: note = variant of RNA ligase 2 from Klebsiella phage KP179
MHHHHHHGGSNMFAYYSSLENHYNAKFIEKIRGAGFLMHTVEWVAREKIHGTNFSVIITPTEIVPAKRTGPILEGESFFGHEIIMKKYKDSFVKVQNMLNAMDLVSVQIFGEFAGGGIQKGVDYGDKDFYVFDILSDSGNEKVYWDDYRVESFCTGLGLKLAPLLGRGSFAELSQYPNDFKSIVNRYNELVDTVGLEMANKHVFGPQASSETGVAEGYVLKPVYPIFFNTGTRVAIKCKNSKFSEKAKLDSPISVSVELTENDKRLLEIFSEYVTWNRVSNVLSHIGSVTAKDFGRVSGLTMKDIINEAAREGHDLLFADNPSAVLKELTGLIQNTIRSKWHEVLE

SEQ ID NO: 1313 - DNA, 1038 bp, synthetic construct
  misc_feature 1..1038: note = variant of RNA ligase 2 from Klebsiella phage KP179
  source 1..1038: mol_type = other DNA
atgcatcaccatcaccatcacggtggcagcaacacgtttgcgtattattcaagtctggaaaaccattacaataataagttcattgagaagatccgtggtgcaggcttcctgatgcacaccgtggaatgggtagctcgcgagaagattcatggaacgaactttagcgttatcattactccgaccgaaatcgtcccagccaaacgcacagggccgatcttggaaggcgagtcgttctttggtcacgaaattatcatgaaaaaatataaagactccttcgtgaaggtgcagaacatgctgaatgccatggatcttgttagcgtgcaaatctttggcgaatttgcgggtggtggcattcagaaaggcgtcgattacggagacaaagatttctatgtgtttgacatcctgtctgatagcgggaacgagaaagtttactgggatgactatcgcgtcgaatcgttttgcaccaccctcggtctgaaattagcgcctctgctgggacgtggtagtttcgctgaactgtcccagtacccaaacgatttcaaaagcattgtgaaccgttataatgaattggttgacacggtcggcctggagatggccaataaacacgtctttggtccgcaagcgtcttctgaaactggcgtagcagaaggctacgttcttaaacccgtctatccgatcttctttaataccggtacgcgcgtggcgattaaatgcaagaactccaaattttcggagaaacgtaagctggacacggctattagtgcgaaggtggaactgacggagaacgataaacgtctgctcgaaatctttagcgagtatgttacctggaatcgcgtcagtaacgtactgtcacatattggctcagtgaccgcaaaagattttgggcgtgtttcgggtctgacgatgaaagacatcattaatgaagcagcacgcgaaggccatgatctgttgttcgctgataacccgtcggcggtgctgaaggagctgactggcctcatccagaacacgattcgctccaaatggcacgaagttctggag

SEQ ID NO: 1314 - protein, 346 aa, synthetic construct
  REGION 1..346: note = variant of RNA ligase 2 from Klebsiella phage KP179
MHHHHHHGGSNTFAYYSSLENHYNNKFIEKIRGAGFLMHTVEWVAREKIHGTNFSVIITPTEIVPAKRTGPILEGESFFGHEIIMKKYKDSFVKVQNMLNAMDLVSVQIFGEFAGGGIQKGVDYGDKDFYVFDILSDSGNEKVYWDDYRVESFCTTLGLKLAPLLGRGSFAELSQYPNDFKSIVNRYNELVDTVGLEMANKHVFGPQASSETGVAEGYVLKPVYPIFFNTGTRVAIKCKNSKFSEKRKLDTAISAKVELTENDKRLLEIFSEYVTWNRVSNVLSHIGSVTAKDFGRVSGLTMKDIINEAAREGHDLLFADNPSAVLKELTGLIQNTIRSKWHEVLE

SEQ ID NO: 1315 - DNA, 1038 bp, synthetic construct
  misc_feature 1..1038: note = variant of RNA ligase 2 from Klebsiella phage KP179
  source 1..1038: mol_type = other DNA
atgcatcaccatcaccatcacggtggcagcaacacgtttgcgtattattcaagtctggaaaaccattacaataataagttcattgagaagatccgtggtgcaggcttcctgatgcacaccgtggaatgggtagctcgcgagaagattcatggaacgaactttagcgttatcattactccgaccgaaatcgtcccagccaaacgcacagggccgatcttggaaggcgagtcgttctttggtcacgaaattatcatgaaaaaatataaagactccttcgtgaaggtgcagaacatgctgaatgccatggatcttgttagcgtgcaaatctttggcgaatttgcgggtggtggcattcagaaaggcgtcgattacggagacaaagatttctatgtgtttgacatcctgtctgatagcgggaacgagaaagtttactgggatgactatcgcgtcgaatcgttttgcaccactctcggtctgaaattagcgcctctgctgggacgtggtagtttcgctgaactgtcccagtacccaaacgatttcaaaagcattgtgaaccgttataatgaattggttgacacggtcggcctggagatggccaataaacacgtctttggtccgcaagcgtcttctgaaactggcgtagcagaaggctacgttcttaaacccgtctatccgatcttctttaataccggtacgcgcgtggcgattaaatgcaagaactccaaattttcggagaaagccaagctggactcgccaattagtgcgagcgttgaactgacggacaacgataaacgtctgctcgaaatctttagcgagtatgttacctggaatcgcgtcagtaacgtactgtcacatattggctcagtgaccgcaaaagattttgggcgtgtttcgggtctgacgatgaaagacatcattaatgaagcagcacgcgaaggccatgatctgttgttcgctgataacccgtcggcggtgctgaaggagctgactggcctcatccagaacacgattcgctccaaatggcacgaagttctggag

SEQ ID NO: 1316 - protein, 346 aa, synthetic construct
  REGION 1..346: note = variant of RNA ligase 2 from Klebsiella phage KP179
MHHHHHHGGSNTFAYYSSLENHYNNKFIEKIRGAGFLMHTVEWVAREKIHGTNFSVIITPTEIVPAKRTGPILEGESFFGHEIIMKKYKDSFVKVQNMLNAMDLVSVQIFGEFAGGGIQKGVDYGDKDFYVFDILSDSGNEKVYWDDYRVESFCTTLGLKLAPLLGRGSFAELSQYPNDFKSIVNRYNELVDTVGLEMANKHVFGPQASSETGVAEGYVLKPVYPIFFNTGTRVAIKCKNSKFSEKAKLDSPISASVELTDNDKRLLEIFSEYVTWNRVSNVLSHIGSVTAKDFGRVSGLTMKDIINEAAREGHDLLFADNPSAVLKELTGLIQNTIRSKWHEVLE

SEQ ID NO: 1317 - DNA, 1038 bp, synthetic construct
  misc_feature 1..1038: note = variant of RNA ligase 2 from Klebsiella phage KP179
  source 1..1038: mol_type = other DNA
atgcatcaccatcaccatcacggtggcagcaacacgtttgcgtattattcaagtctggaaaaccattacaataataagttcattgagaagatccgtggtgcaggcttcctggaacacaccgtggaatgggtagctcgcgagaagattcatggaacgaactttagcgttatcattactccgaccgaaatcgtcccagccaaacgcacagggccgatcttggaaggcgagtcgttctttggtcacgaaattatcatgaaaaaatataaagactccttcgtgaaggtgcagaacatgctgaatgccatggatcttgttagcgtgcaaatctttggcgaatttgcgggtggtggcattcagaaaggcgtcgattacggagacaaagatttctatgtgtttgacatcctgtctgatagcgggaacgagaaagtttactgggatgactatcgcgtcgaatcgttttgcaccaccctcggtctgaaattagcgcctctgctgggacgtggtagtttcgctgaactgtcccagtacccaaacgatttcaaaagcattgtgaaccgttataatgaattggttgacacggtcggcctggagatggccaataaacacgtctttggtccgcaagcgtcttctgaaactggcgtagcagaaggctacgttcttaaacccgtctatccgatcttctttaataccggtacgcgcgtggcgattaaatgcaagaactccaaattttcggagaaagcgaagctggacacgcctattagtgcgaaggtggaactgacggagaacgataaacgtctgctcgaaatctttagcgagtatgttacctggaatcgcgtcagtaacgtactgtcacatattggctcagtgaccgcaaaagattttgggcgtgtttcgggtctgacgatgaaagacatcattaatgaagcagcacgcgaaggccatgatctgttgttcgctgataacccgtcggcggtgctgaaggagctgactggcctcatccagaacacgattcgctccaaatggcacgaagttctggag

SEQ ID NO: 1318 - protein, 346 aa, synthetic construct
  REGION 1..346: note = variant of RNA ligase 2 from Klebsiella phage KP179
MHHHHHHGGSNTFAYYSSLENHYNNKFIEKIRGAGFLEHTVEWVAREKIHGTNFSVIITPTEIVPAKRTGPILEGESFFGHEIIMKKYKDSFVKVQNMLNAMDLVSVQIFGEFAGGGIQKGVDYGDKDFYVFDILSDSGNEKVYWDDYRVESFCTTLGLKLAPLLGRGSFAELSQYPNDFKSIVNRYNELVDTVGLEMANKHVFGPQASSETGVAEGYVLKPVYPIFFNTGTRVAIKCKNSKFSEKAKLDTPISAKVELTENDKRLLEIFSEYVTWNRVSNVLSHIGSVTAKDFGRVSGLTMKDIINEAAREGHDLLFADNPSAVLKELTGLIQNTIRSKWHEVLE

SEQ ID NO: 1319 - DNA, 1038 bp, synthetic construct
  misc_feature 1..1038: note = variant of RNA ligase 2 from Klebsiella phage KP179
  source 1..1038: mol_type = other DNA
atgcatcaccatcaccatcacggtggcagcaacatgtttgcgtattattcaagtctggaaaaccattacaatgctaagttcattgacaagatccgtggtgcaggcttcctgatgcacaccgtggaatgggtagctcgcgagaagattcatggaacgaactttagcgttatcattactccgaccgaaatcgtcccagccaaacgcacagggccgatcttggaaggcgagtcgttctttggtcacgaaattatcatgaaaaaatataaagactccttcgtgaaggtgcagaacatgctgaatgccatggatcttgttagcgtgcaaatctttggcgaatttgcgggtggtggcattcagaaaggcgtcgattacggagacaaagatttctatgtgtttgacatcctgtctgatagcgggaacgagaaagtttactgggatgactatcgcgtcgaatcgttttgcaccggtctcggtctgaaattagcgcctctgctgggacgtggtagtttcgctgaactgtcccagtacccaaacgatttcaaaagcattgtgaaccgttataatgaattggttgacacggtcggcctggagatggccaataaacacgtctttggtccgcaagcgtcttctgaaactggcgtagcagaaggctacgttcttaaacccgtctatccgatcttctttaataccggtacgcgcgtggcgattaaatgcaagaactccaaattttcggagaaagccaagctggactcgccaattagtgcgaaggttgaactgacggacaacgataaacgtctgctcgaaatctttagcgagtatgttacctggaatcgcgtcagtaacgtactgtcacatattggctcagtgaccgcaaaagattttgggcgtgtttcgggtctgacgatgaaagacatcattaatgaagcagcacgcgaaggccatgatctgttgttcgctgataacccgtcggcggtgctgaaggagctgactggcctcatccagaacacgattcgctccaaatggcacgaagttctggag

SEQ ID NO: 1320 - protein, 346 aa, synthetic construct
  REGION 1..346: note = variant of RNA ligase 2 from Klebsiella phage KP179
MHHHHHHGGSNMFAYYSSLENHYNAKFIDKIRGAGFLMHTVEWVAREKIHGTNFSVIITPTEIVPAKRTGPILEGESFFGHEIIMKKYKDSFVKVQNMLNAMDLVSVQIFGEFAGGGIQKGVDYGDKDFYVFDILSDSGNEKVYWDDYRVESFCTGLGLKLAPLLGRGSFAELSQYPNDFKSIVNRYNELVDTVGLEMANKHVFGPQASSETGVAEGYVLKPVYPIFFNTGTRVAIKCKNSKFSEKAKLDSPISAKVELTDNDKRLLEIFSEYVTWNRVSNVLSHIGSVTAKDFGRVSGLTMKDIINEAAREGHDLLFADNPSAVLKELTGLIQNTIRSKWHEVLE

SEQ ID NO: 1321 - DNA, 1038 bp, synthetic construct
  misc_feature 1..1038: note = variant of RNA ligase 2 from Klebsiella phage KP179
  source 1..1038: mol_type = other DNA
atgcatcaccatcaccatcacggtggcagcaacatgtttgcgtattattcaagtctggaaaaccattacaataataagttcattgagaagatccgtggtgcaggcttcctgatgcacaccgtggaatgggtagctcgcgagaagattcatggaacgaactttagcgttatcattactccgaccgaaatcgtcccagccaaacgcacagggccgatcttggaaggcgagtcgttctttggtcacgaaattatcatgaaaaaatataaagactccttcgtgaaggtgcagaacatgctgaatgccatggatcttgttagcgtgcaaatctttggcgaatttgcgggtggtggcattcagaaaggcgtcgattacggagacaaagatttctatgtgtttgacatcctgtctgatagcgggaacgagaaagtttactgggatgactatcgcgtcgaatcgttttgcaccactctcggtctgaaattagcgcctctgctgggacgtggtagtttcgctgaactgtcccagtacccaaacgatttcaaaagcattgtgaaccgttataatgaattggttgacacggtcggcctggagatggccaataaacacgtctttggtccgcaagcgtcttctgaaactggcgtagcagaaggctacgttcttaaacccgtctatccgatcttctttaataccggtacgcgcgtggcgattaaatgcaagaactccaaattttcggagaaagccaagctggactcgccaattagtgcgaaggatgaactgacggagaacgataaacgtctgctcgaaatctttagcgagtatgttacctggaatcgcgtcagtaacgtactgtcacatattggctcagtgaccgcaaaagattttgggcgtgtttcgggtctgacgatgaaagacatcattaatgaagcagcacgcgaaggccatgatctgttgttcgctgataacccgtcggcggtgctgaaggagctgactggcctcatccagaacacgattcgctccaaatggcacgaagttctggag

SEQ ID NO: 1322 - protein, 346 aa, synthetic construct
  REGION 1..346: note = variant of RNA ligase 2 from Klebsiella phage KP179
MHHHHHHGGSNMFAYYSSLENHYNNKFIEKIRGAGFLMHTVEWVAREKIHGTNFSVIITPTEIVPAKRTGPILEGESFFGHEIIMKKYKDSFVKVQNMLNAMDLVSVQIFGEFAGGGIQKGVDYGDKDFYVFDILSDSGNEKVYWDDYRVESFCTTLGLKLAPLLGRGSFAELSQYPNDFKSIVNRYNELVDTVGLEMANKHVFGPQASSETGVAEGYVLKPVYPIFFNTGTRVAIKCKNSKFSEKAKLDSPISAKDELTENDKRLLEIFSEYVTWNRVSNVLSHIGSVTAKDFGRVSGLTMKDIINEAAREGHDLLFADNPSAVLKELTGLIQNTIRSKWHEVLE

SEQ ID NO: 1323 - DNA, 1038 bp, synthetic construct
  misc_feature 1..1038: note = variant of RNA ligase 2 from Klebsiella phage KP179
  source 1..1038: mol_type = other DNA
atgcatcaccatcaccatcacggtggcagcaacacgtttgcgtattattcaagtctggaaaaccattacaataataagttcattgagaagatccgtggtgcaggcttcctgatgcacaccgtggaatgggtagctcgcgagaagattcatggaacgaactttagcgttatcattactccgaccgaaatcgtcccagccaaacgcacagggccgatcttggaaggcgagtcgttctttggtcacgaaattatcatgaaaaaatataaagactccttcgtgaaggtgcagaacatgctgaatgccatggatcttgttagcgtgcaaatctttggcgaatttgcgggtggtggcattcagaaaggcgtcgattacggagacaaagatttctatgtgtttgacatcctgtctgatagcgggaacgagaaagtttactgggatgactatcgcgtcgaatcgttttgcaccggtctcggtctgaaattagcgcctctgctgggacgtggtagtttcgctgaactgtcccagtacccaaacgatttcaaaagcattgtgaaccgttataatgaattggttgacacggtcggcctggagatggccaataaacacgtctttggtccgcaagcgtcttctgaaactggcgtagcagaaggctacgttcttaaacccgtctatccgatcttctttaataccggtacgcgcgtggcgattaaatgcaagaactccaaattttcggagaaagccaagctggactcgccaattagtaatagcgttgaactgacggacaacgataaacgtctgctcgaaatctttagcgagtatgttacctggaatcgcgtcagtaacgtactgtcacatattggctcagtgaccgcaaaagattttgggcgtgtttcgggtctgacgatgaaagacatcattaatgaagcagcacgcgaaggccatgatctgttgttcgctgataacccgtcggcggtgctgaaggagctgactggcctcatccagaacacgattcgctccaaatggcacgaagttctggag

SEQ ID NO: 1324 - protein, 346 aa, synthetic construct
  REGION 1..346: note = variant of RNA ligase 2 from Klebsiella phage KP179
MHHHHHHGGSNTFAYYSSLENHYNNKFIEKIRGAGFLMHTVEWVAREKIHGTNFSVIITPTEIVPAKRTGPILEGESFFGHEIIMKKYKDSFVKVQNMLNAMDLVSVQIFGEFAGGGIQKGVDYGDKDFYVFDILSDSGNEKVYWDDYRVESFCTGLGLKLAPLLGRGSFAELSQYPNDFKSIVNRYNELVDTVGLEMANKHVFGPQASSETGVAEGYVLKPVYPIFFNTGTRVAIKCKNSKFSEKAKLDSPISNSVELTDNDKRLLEIFSEYVTWNRVSNVLSHIGSVTAKDFGRVSGLTMKDIINEAAREGHDLLFADNPSAVLKELTGLIQNTIRSKWHEVLE

SEQ ID NO: 1325 - DNA, 1038 bp, synthetic construct
  misc_feature 1..1038: note = variant of RNA ligase 2 from Klebsiella phage KP179
  source 1..1038: mol_type = other DNA
atgcatcaccatcaccatcacggtggcagcaacatgtttgcgtattattcaagtctggaaaaccattacaatgctaagttcattgagaagatccgtggtgcaggcttcctgatgcacaccgtggaatgggtagctcgcgagaagattcatggaacgaactttagcgttatcattactccgaccgaaatcgtcccagccaaacgcacagggccgatcttggaaggcgagtcgttctttggtcacgaaattatcatgaaaaaatataaagactccttcgtgaaggtgcagaacatgctgaatgccatggatcttgttagcgtgcaaatctttggcgaatttgcgggtggtggcattcagaaaggcgtcgattacggagacaaagatttctatgtgtttgacatcctgtctgatagcgggaacgagaaagtttactgggatgactatcgcgtcgaatcgttttgcaccggtctcggtctgaaattagcgcctctgctgggacgtggtagtttcgctgaactgtcccagtacccaaacgatttcaaaagcattgtgaaccgttataatgaattggttgacacggtcggcctggagatggccaataaacacgtctttggtccgcaagcgtcttctgaaactggcgtagcagaaggctacgttcttaaacccgtctatccgatcttctttaataccggtacgcgcgtggcgattaaatgcaagaactccaaattttcggagaaagccaagctggactcgccaattagttcgaaggttgaactgacggagaacgataaacgtctgctcgaaatctttagcgagtatgttacctggaatcgcgtcagtaacgtactgtcacatattggctcagtgaccgcaaaagattttgggcgtgtttcgggtctgacgatgaaagacatcattaatgaagcagcacgcgaaggccatgatctgttgttcgctgataacccgtcggcggtgctgaaggagctgactggcctcatccagaacacgattcgctccaaatggcacgaagttctggag

SEQ ID NO: 1326 - protein, 346 aa, synthetic construct
  REGION 1..346: note = variant of RNA ligase 2 from Klebsiella phage KP179
MHHHHHHGGSNMFAYYSSLENHYNAKFIEKIRGAGFLMHTVEWVAREKIHGTNFSVIITPTEIVPAKRTGPILEGESFFGHEIIMKKYKDSFVKVQNMLNAMDLVSVQIFGEFAGGGIQKGVDYGDKDFYVFDILSDSGNEKVYWDDYRVESFCTGLGLKLAPLLGRGSFAELSQYPNDFKSIVNRYNELVDTVGLEMANKHVFGPQASSETGVAEGYVLKPVYPIFFNTGTRVAIKCKNSKFSEKAKLDSPISSKVELTENDKRLLEIFSEYVTWNRVSNVLSHIGSVTAKDFGRVSGLTMKDIINEAAREGHDLLFADNPSAVLKELTGLIQNTIRSKWHEVLE

SEQ ID NO: 1327 - DNA, 1038 bp, synthetic construct
  misc_feature 1..1038: note = variant of RNA ligase 2 from Klebsiella phage KP179
  source 1..1038: mol_type = other DNA
atgcatcaccatcaccatcacggtggcagcaacacgtttgcgtattattcaagtctggaaaaccattacaatgctaagttcattgagaagatccgtggtgcaggcttcctgatgcacaccgtggaatgggtagctcgcgagaagattcatggaacgaactttagcgttatcattactccgaccgaaatcgtcccagccaaacgcacagggccgatcttggaaggcgagtcgttctttggtcacgaaattatcatgaaaaaatataaagactccttcgtgaaggtgcagaacatgctgaatgccatggatcttgttagcgtgcaaatctttggcgaatttgcgggtggtggcattcagaaaggcgtcgattacggagacaaagatttctatgtgtttgacatcctgtctgatagcgggaacgagaaagtttactgggatgactatcgcgtcgaatcgttttgcaccactctcggtctgaaattagcgcctctgctgggacgtggtagtttcgctgaactgtcccagtacccaaacgatttcaaaagcattgtgaaccgttataatgaattggttgacacggtcggcctggagatggccaataaacacgtctttggtccgcaagcgtcttctgaaactggcgtagcagaaggctacgttcttaaacccgtctatccgatcttctttaataccggtacgcgcgtggcgattaaatgcaagaactccaaattttcggagaaagccaagctggactcgccaattagttcgaaggttgaactgacggagaacgataaacgtctgctcgaaatctttagcgagtatgttacctggaatcgcgtcagtaacgtactgtcacatattggctcagtgaccgcaaaagattttgggcgtgtttcgggtctgacgatgaaagacatcattaatgaagcagcacgcgaaggccatgatctgttgttcgctgataacccgtcggcggtgctgaaggagctgactggcctcatccagaacacgattcgctccaaatggcacgaagttctggag

SEQ ID NO: 1328 - protein, 346 aa, synthetic construct
  REGION 1..346: note = variant of RNA ligase 2 from Klebsiella phage KP179
MHHHHHHGGSNTFAYYSSLENHYNAKFIEKIRGAGFLMHTVEWVAREKIHGTNFSVIITPTEIVPAKRTGPILEGESFFGHEIIMKKYKDSFVKVQNMLNAMDLVSVQIFGEFAGGGIQKGVDYGDKDFYVFDILSDSGNEKVYWDDYRVESFCTTLGLKLAPLLGRGSFAELSQYPNDFKSIVNRYNELVDTVGLEMANKHVFGPQASSETGVAEGYVLKPVYPIFFNTGTRVAIKCKNSKFSEKAKLDSPISSKVELTENDKRLLEIFSEYVTWNRVSNVLSHIGSVTAKDFGRVSGLTMKDIINEAAREGHDLLFADNPSAVLKELTGLIQNTIRSKWHEVLE

SEQ ID NO: 1329 - DNA, 1038 bp, synthetic construct
  misc_feature 1..1038: note = variant of RNA ligase 2 from Klebsiella phage KP179
  source 1..1038: mol_type = other DNA
atgcatcaccatcaccatcacggtggcagcaacatgtttgcgtattattcaagtctggaaaaccattacaatgctaagttcattgacaagatccgtggtgcaggcttcctgatgcacaccgtggaatgggtagctcgcgagaagattcatggaacgaactttagcgttatcattactccgaccgaaatcgtcccagccaaacgcacagggccgatcttggaaggcgagtcgttctttggtcacgaaattatcatgaaaaaatataaagactccttcgtgaaggtgcagaacatgctgaatgccatggatcttgttagcgtgcaaatctttggcgaatttgcgggtggtggcattcagaaaggcgtcgattacggagacaaagatttctatgtgtttgacatcctgtctgatagcgggaacgagaaagtttactgggatgactatcgcgtcgaatcgttttgcaccggtctcggtctgaaattagcgcctctgctgggacgtggtagtttcgctgaactgtcccagtacccaaacgatttcaaaagcattgtgaaccgttataatgaattggttgacacggtcggcctggagatggccaataaacacgtctttggtccgcaagcgtcttctgaaactggcgtagcagaaggctacgttcttaaacccgtctatccgatcttctttaataccggtacgcgcgtggcgattaaatgcaagaactccaaattttcggagaaagccaagctggactcgccaattagtgttaaggatgaactgacggacaacgataaacgtctgctcgaaatctttagcgagtatgttacctggaatcgcgtcagtaacgtactgtcacatattggctcagtgaccgcaaaagattttgggcgtgtttcgggtctgacgatgaaagacatcattaatgaagcagcacgcgaaggccatgatctgttgttcgctgataacccgtcggcggtgctgaaggagctgactggcctcatccagaacacgattcgctccaaatggcacgaagttctggag

SEQ ID NO: 1330 - protein, 346 aa, synthetic construct
  REGION 1..346: note = variant of RNA ligase 2 from Klebsiella phage KP179
MHHHHHHGGSNMFAYYSSLENHYNAKFIDKIRGAGFLMHTVEWVAREKIHGTNFSVIITPTEIVPAKRTGPILEGESFFGHEIIMKKYKDSFVKVQNMLNAMDLVSVQIFGEFAGGGIQKGVDYGDKDFYVFDILSDSGNEKVYWDDYRVESFCTGLGLKLAPLLGRGSFAELSQYPNDFKSIVNRYNELVDTVGLEMANKHVFGPQASSETGVAEGYVLKPVYPIFFNTGTRVAIKCKNSKFSEKAKLDSPISVKDELTDNDKRLLEIFSEYVTWNRVSNVLSHIGSVTAKDFGRVSGLTMKDIINEAAREGHDLLFADNPSAVLKELTGLIQNTIRSKWHEVLE

SEQ ID NO: 1331 - DNA, 1038 bp, synthetic construct
  misc_feature 1..1038: note = variant of RNA ligase 2 from Klebsiella phage KP179
  source 1..1038: mol_type = other DNA
atgcatcaccatcaccatcacggtggcagcaacatgtttgcgtattattcaagtctggaaaaccattacaataataagttcattgacaagatccgtggtgcaggcttcctgatgcacaccgtggaatgggtagctcgcgagaagattcatggaacgaactttagcgttatcattactccgaccgaaatcgtcccagccaaacgcacagggccgatcttggaaggcgagtcgttctttggtcacgaaattatcatgaaaaaatataaagactccttcgtgaaggtgcagaacatgctgaatgccatggatcttgttagcgtgcaaatctttggcgaatttgcgggtggtggcattcagaaaggcgtcgattacggagacaaagatttctatgtgtttgacatcctgtctgatagcgggaacgagaaagtttactgggatgactatcgcgtcgaatcgttttgcaccactctcggtctgaaattagcgcctctgctgggacgtggtagtttcgctgaactgtcccagtacccaaacgatttcaaaagcattgtgaaccgttataatgaattggttgacacggtcggcctggagatggccaataaacacgtctttggtccgcaagcgtcttctgaaactggcgtagcagaaggctacgttcttaaacccgtctatccgatcttctttaataccggtacgcgcgtggcgattaaatgcaagaactccaaattttcggagaaagccaagctggactcgccaattagtgcgagcgttgaactgacggacaacgataaacgtctgctcgaaatctttagcgagtatgttacctggaatcgcgtcagtaacgtactgtcacatattggctcagtgaccgcaaaagattttgggcgtgtttcgggtctgacgatgaaagacatcattaatgaagcagcacgcgaaggccatgatctgttgttcgctgataacccgtcggcggtgctgaaggagctgactggcctcatccagaacacgattcgctccaaatggcacgaagttctggag

SEQ ID NO: 1332 - protein, 346 aa, synthetic construct
  REGION 1..346: note = variant of RNA ligase 2 from Klebsiella phage KP179
MHHHHHHGGSNMFAYYSSLENHYNNKFIDKIRGAGFLMHTVEWVAREKIHGTNFSVIITPTEIVPAKRTGPILEGESFFGHEIIMKKYKDSFVKVQNMLNAMDLVSVQIFGEFAGGGIQKGVDYGDKDFYVFDILSDSGNEKVYWDDYRVESFCTTLGLKLAPLLGRGSFAELSQYPNDFKSIVNRYNELVDTVGLEMANKHVFGPQASSETGVAEGYVLKPVYPIFFNTGTRVAIKCKNSKFSEKAKLDSPISASVELTDNDKRLLEIFSEYVTWNRVSNVLSHIGSVTAKDFGRVSGLTMKDIINEAAREGHDLLFADNPSAVLKELTGLIQNTIRSKWHEVLE

SEQ ID NO: 1333 - DNA, 1038 bp, synthetic construct
  misc_feature 1..1038: note = variant of RNA ligase 2 from Klebsiella phage KP179
  source 1..1038: mol_type = other DNA
atgcatcaccatcaccatcacggtggcagcaacacgtttgcgtattattcaagtctggaaaaccattacaataataagttcattgagaagatccgtggtgcaggcttcctgatgcacaccgtggaatgggtagctcgcgagaagattcatggaacgaactttagcgttatcattactccgaccgaaatcgtcccagccaaacgcacagggccgatcttggaaggcgagtcgttctttggtcacgaaattatcatgaaaaaatataaagactccttcgtgaaggtgcagaacatgctgaatgccatggatcttgttagcgtgcaaatctttggcgaatttgcgggtggtggcattcagaaaggcgtcgattacggagacaaagatttctatgtgtttgacatcctgtctgatagcgggaacgagaaagtttactgggatgactatcgcgtcgaatcgttttgcaccggtctcggtctgaaattagcgcctctgctgggacgtggtagtttcgctgaactgtcccagtacccaaacgatttcaaaagcattgtgaaccgttataatgaattggttgacacggtcggcctggagatggccaataaacacgtctttggtccgcaagcgtcttctgaaactggcgtagcagaaggctacgttcttaaacccgtctatccgatcttctttaataccggtacgcgcgtggcgattaaatgcaagaactccaaattttcggagaaagccaagctggactcgccaattagtgttaaggatgaactgacggagaacgataaacgtctgctcgaaatctttagcgagtatgttacctggaatcgcgtcagtaacgtactgtcacatattggctcagtgaccgcaaaagattttgggcgtgtttcgggtctgacgatgaaagacatcattaatgaagcagcacgcgaaggccatgatctgttgttcgctgataacccgtcggcggtgctgaaggagctgactggcctcatccagaacacgattcgctccaaatggcacgaagttctggag

SEQ ID NO: 1334 - protein, 346 aa, synthetic construct
  REGION 1..346: note = variant of RNA ligase 2 from Klebsiella phage KP179
MHHHHHHGGSNTFAYYSSLENHYNNKFIEKIRGAGFLMHTVEWVAREKIHGTNFSVIITPTEIVPAKRTGPILEGESFFGHEIIMKKYKDSFVKVQNMLNAMDLVSVQIFGEFAGGGIQKGVDYGDKDFYVFDILSDSGNEKVYWDDYRVESFCTGLGLKLAPLLGRGSFAELSQYPNDFKSIVNRYNELVDTVGLEMANKHVFGPQASSETGVAEGYVLKPVYPIFFNTGTRVAIKCKNSKFSEKAKLDSPISVKDELTENDKRLLEIFSEYVTWNRVSNVLSHIGSVTAKDFGRVSGLTMKDIINEAAREGHDLLFADNPSAVLKELTGLIQNTIRSKWHEVLE

SEQ ID NO: 1335 - DNA, 1038 bp, synthetic construct
  misc_feature 1..1038: note = variant of RNA ligase 2 from Klebsiella phage KP179
  source 1..1038: mol_type = other DNA
atgcatcaccatcaccatcacggtggcagcaacacgtttgcgtattattcaagtctggaaaaccattacaataataagttcattgacaagatccgtggtgcaggcttcctgatgcacaccgtggaatgggtagctcgcgagaagattcatggaacgaactttagcgttatcattactccgaccgaaatcgtcccagccaaacgcacagggccgatcttggaaggcgagtcgttctttggtcacgaaattatcatgaaaaaatataaagactccttcgtgaaggtgcagaacatgctgaatgccatggatcttgttagcgtgcaaatctttggcgaatttgcgggtggtggcattcagaaaggcgtcgattacggagacaaagatttctatgtgtttgacatcctgtctgatagcgggaacgagaaagtttactgggatgactatcgcgtcgaatcgttttgcaccggtctcggtctgaaattagcgcctctgctgggacgtggtagtttcgctgaactgtcccagtacccaaacgatttcaaaagcattgtgaaccgttataatgaattggttgacacggtcggcctggagatggccaataaacacgtctttggtccgcaagcgtcttctgaaactggcgtagcagaaggctacgttcttaaacccgtctatccgatcttctttaataccggtacgcgcgtggcgattaaatgcaagaactccaaattttcggagaaagccaagctggactcgccaattagtgcgaaggttgaactgacggacaacgataaacgtctgctcgaaatctttagcgagtatgttacctggaatcgcgtcagtaacgtactgtcacatattggctcagtgaccgcaaaagattttgggcgtgtttcgggtctgacgatgaaagacatcattaatgaagcagcacgcgaaggccatgatctgttgttcgctgataacccgtcggcggtgctgaaggagctgactggcctcatccagaacacgattcgctccaaatggcacgaagttctggag

SEQ ID NO: 1336 - protein, 346 aa, synthetic construct
  REGION 1..346: note = variant of RNA ligase 2 from Klebsiella phage KP179
MHHHHHHGGSNTFAYYSSLENHYNNKFIDKIRGAGFLMHTVEWVAREKIHGTNFSVIITPTEIVPAKRTGPILEGESFFGHEIIMKKYKDSFVKVQNMLNAMDLVSVQIFGEFAGGGIQKGVDYGDKDFYVFDILSDSGNEKVYWDDYRVESFCTGLGLKLAPLLGRGSFAELSQYPNDFKSIVNRYNELVDTVGLEMANKHVFGPQASSETGVAEGYVLKPVYPIFFNTGTRVAIKCKNSKFSEKAKLDSPISAKVELTDNDKRLLEIFSEYVTWNRVSNVLSHIGSVTAKDFGRVSGLTMKDIINEAAREGHDLLFADNPSAVLKELTGLIQNTIRSKWHEVLE

SEQ ID NO: 1337 - DNA, 1038 bp, synthetic construct
  misc_feature 1..1038: note = variant of RNA ligase 2 from Klebsiella phage KP179
  source 1..1038: mol_type = other DNA
atgcatcaccatcaccatcacggtggcagcaacatgtttgcgtattattcaagtctggaaaaccattacaataataagttcattgagaagatccgtggtgcaggcttcctgatgcacaccgtggaatgggtagctcgcgagaagattcatggaacgaactttagcgttatcattactccgaccgaaatcgtcccagccaaacgcacagggccgatcttggaaggcgagtcgttctttggtcacgaaattatcatgaaaaaatataaagactccttcgtgaaggtgcagaacatgctgaatgccatggatcttgttagcgtgcaaatctttggcgaatttgcgggtggtggcattcagaaaggcgtcgattacggagacaaagatttctatgtgtttgacatcctgtctgatagcgggaacgagaaagtttactgggatgactatcgcgtcgaatcgttttgcaccactctcggtctgaaattagcgcctctgctgggacgtggtagtttcgctgaactgtcccagtacccaaacgatttcaaaagcattgtgaaccgttataatgaattggttgacacggtcggcctggagatggccaataaacacgtctttggtccgcaagcgtcttctgaaactggcgtagcagaaggctacgttcttaaacccgtctatccgatcttctttaataccggtacgcgcgtggcgattaaatgcaagaactccaaattttcggagaaagccaagctggactcgccaattagttcgaaggatgaactgacggacaacgataaacgtctgctcgaaatctttagcgagtatgttacctggaatcgcgtcagtaacgtactgtcacatattggctcagtgaccgcaaaagattttgggcgtgtttcgggtctgacgatgaaagacatcattaatgaagcagcacgcgaaggccatgatctgttgttcgctgataacccgtcggcggtgctgaaggagctgactggcctcatccagaacacgattcgctccaaatggcacgaagttctggag

SEQ ID NO: 1338 - protein, 346 aa, synthetic construct
  REGION 1..346: note = variant of RNA ligase 2 from Klebsiella phage KP179
MHHHHHHGGSNMFAYYSSLENHYNNKFIEKIRGAGFLMHTVEWVAREKIHGTNFSVIITPTEIVPAKRTGPILEGESFFGHEIIMKKYKDSFVKVQNMLNAMDLVSVQIFGEFAGGGIQKGVDYGDKDFYVFDILSDSGNEKVYWDDYRVESFCTTLGLKLAPLLGRGSFAELSQYPNDFKSIVNRYNELVDTVGLEMANKHVFGPQASSETGVAEGYVLKPVYPIFFNTGTRVAIKCKNSKFSEKAKLDSPISSKDELTDNDKRLLEIFSEYVTWNRVSNVLSHIGSVTAKDFGRVSGLTMKDIINEAAREGHDLLFADNPSAVLKELTGLIQNTIRSKWHEVLE

SEQ ID NO: 1339 - DNA, 1038 bp, synthetic construct
  misc_feature 1..1038: note = variant of RNA ligase 2 from Klebsiella phage KP179
  source 1..1038: mol_type = other DNA
atgcatcaccatcaccatcacggtggcagcaacacgtttgcgtattattcaagtctggaaaaccattacaatgctaagttcattgacaagatccgtggtgcaggcttcctgatgcacaccgtggaatgggtagctcgcgagaagattcatggaacgaactttagcgttatcattactccgaccgaaatcgtcccagccaaacgcacagggccgatcttggaaggcgagtcgttctttggtcacgaaattatcatgaaaaaatataaagactccttcgtgaaggtgcagaacatgctgaatgccatggatcttgttagcgtgcaaatctttggcgaatttgcgggtggtggcattcagaaaggcgtcgattacggagacaaagatttctatgtgtttgacatcctgtctgatagcgggaacgagaaagtttactgggatgactatcgcgtcgaatcgttttgcaccggtctcggtctgaaattagcgcctctgctgggacgtggtagtttcgctgaactgtcccagtacccaaacgatttcaaaagcattgtgaaccgttataatgaattggttgacacggtcggcctggagatggccaataaacacgtctttggtccgcaagcgtcttctgaaactggcgtagcagaaggctacgttcttaaacccgtctatccgatcttctttaataccggtacgcgcgtggcgattaaatgcaagaactccaaattttcggagaaagccaagctggactcgccaattagtgcgaaggatgaactgacggacaacgataaacgtctgctcgaaatctttagcgagtatgttacctggaatcgcgtcagtaacgtactgtcacatattggctcagtgaccgcaaaagattttgggcgtgtttcgggtctgacgatgaaagacatcattaatgaagcagcacgcgaaggccatgatctgttgttcgctgataacccgtcggcggtgctgaaggagctgactggcctcatccagaacacgattcgctccaaatggcacgaagttctggag

SEQ ID NO: 1340 - protein, 346 aa, synthetic construct
  REGION 1..346: note = variant of RNA ligase 2 from Klebsiella phage KP179
MHHHHHHGGSNTFAYYSSLENHYNAKFIDKIRGAGFLMHTVEWVAREKIHGTNFSVIITPTEIVPAKRTGPILEGESFFGHEIIMKKYKDSFVKVQNMLNAMDLVSVQIFGEFAGGGIQKGVDYGDKDFYVFDILSDSGNEKVYWDDYRVESFCTGLGLKLAPLLGRGSFAELSQYPNDFKSIVNRYNELVDTVGLEMANKHVFGPQASSETGVAEGYVLKPVYPIFFNTGTRVAIKCKNSKFSEKAKLDSPISAKDELTDNDKRLLEIFSEYVTWNRVSNVLSHIGSVTAKDFGRVSGLTMKDIINEAAREGHDLLFADNPSAVLKELTGLIQNTIRSKWHEVLE

SEQ ID NO: 1341 - DNA, 1038 bp, synthetic construct
  misc_feature 1..1038: note = variant of RNA ligase 2 from Klebsiella phage KP179
  source 1..1038: mol_type = other DNA
atgcatcaccatcaccatcacggtggcagcaacatgtttgcgtattattcaagtctggaaaaccattacaatgctaagttcattgagaagatccgtggtgcaggcttcctgatgcacaccgtggaatgggtagctcgcgagaagattcatggaacgaactttagcgttatcattactccgaccgaaatcgtcccagccaaacgcacagggccgatcttggaaggcgagtcgttctttggtcacgaaattatcatgaaaaaatataaagactccttcgtgaaggtgcagaacatgctgaatgccatggatcttgttagcgtgcaaatctttggcgaatttgcgggtggtggcattcagaaaggcgtcgattacggagacaaagatttctatgtgtttgacatcctgtctgatagcgggaacgagaaagtttactgggatgactatcgcgtcgaatcgttttgcaccactctcggtctgaaattagcgcctctgctgggacgtggtagtttcgctgaactgtcccagtacccaaacgatttcaaaagcattgtgaaccgttataatgaattggttgacacggtcggcctggagatggccaataaacacgtctttggtccgcaagcgtcttctgaaactggcgtagcagaaggctacgttcttaaacccgtctatccgatcttctttaataccggtacgcgcgtggcgattaaatgcaagaactccaaattttcggagaaagccaagctggactcgccaattagtgttagcgttgaactgacggacaacgataaacgtctgctcgaaatctttagcgagtatgttacctggaatcgcgtcagtaacgtactgtcacatattggctcagtgaccgcaaaagattttgggcgtgtttcgggtctgacgatgaaagacatcattaatgaagcagcacgcgaaggccatgatctgttgttcgctgataacccgtcggcggtgctgaaggagctgactggcctcatccagaacacgattcgctccaaatggcacgaagttctggag

SEQ ID NO: 1342 - protein, 346 aa, synthetic construct
  REGION 1..346: note = variant of RNA ligase 2 from Klebsiella phage KP179
MHHHHHHGGSNMFAYYSSLENHYNAKFIEKIRGAGFLMHTVEWVAREKIHGTNFSVIITPTEIVPAKRTGPILEGESFFGHEIIMKKYKDSFVKVQNMLNAMDLVSVQIFGEFAGGGIQKGVDYGDKDFYVFDILSDSGNEKVYWDDYRVESFCTTLGLKLAPLLGRGSFAELSQYPNDFKSIVNRYNELVDTVGLEMANKHVFGPQASSETGVAEGYVLKPVYPIFFNTGTRVAIKCKNSKFSEKAKLDSPISVSVELTDNDKRLLEIFSEYVTWNRVSNVLSHIGSVTAKDFGRVSGLTMKDIINEAAREGHDLLFADNPSAVLKELTGLIQNTIRSKWHEVLE

SEQ ID NO: 1343 - DNA, 1038 bp, synthetic construct
  misc_feature 1..1038: note = variant of RNA ligase 2 from Klebsiella phage KP179
  source 1..1038: mol_type = other DNA
atgcatcaccatcaccatcacggtggcagcaacatgtttgcgtattattcaagtctggaaaaccattacaataataagttcattgagaagatccgtggtgcaggcttcctgatgcacaccgtggaatgggtagctcgcgagaagattcatggaacgaactttagcgttatcattactccgaccgaaatcgtcccagccaaacgcacagggccgatcttggaaggcgagtcgttctttggtcacgaaattatcatgaaaaaatataaagactccttcgtgaaggtgcagaacatgctgaatgccatggatcttgttagcgtgcaaatctttggcgaatttgcgggtggtggcattcagaaaggcgtcgattacggagacaaagatttctatgtgtttgacatcctgtctgatagcgggaacgagaaagtttactgggatgactatcgcgtcgaatcgttttgcaccggtctcggtctgaaattagcgcctctgctgggacgtggtagtttcgctgaactgtcccagtacccaaacgatttcaaaagcattgtgaaccgttataatgaattggttgacacggtcggcctggagatggccaataaacacgtctttggtccgcaagcgtcttctgaaactggcgtagcagaaggctacgttcttaaacccgtctatccgatcttctttaataccggtacgcgcgtggcgattaaatgcaagaactccaaattttcggagaaagccaagctggactcgccaattagtgttaaggttgaactgacggacaacgataaacgtctgctcgaaatctttagcgagtatgttacctggaatcgcgtcagtaacgtactgtcacatattggctcagtgaccgcaaaagattttgggcgtgtttcgggtctgacgatgaaagacatcattaatgaagcagcacgcgaaggccatgatctgttgttcgctgataacccgtcggcggtgctgaaggagctgactggcctcatccagaacacgattcgctccaaatggcacgaagttctggag

SEQ ID NO: 1344 - protein, 346 aa, synthetic construct
  REGION 1..346: note = variant of RNA ligase 2 from Klebsiella phage KP179
MHHHHHHGGSNMFAYYSSLENHYNNKFIEKIRGAGFLMHTVEWVAREKIHGTNFSVIITPTEIVPAKRTGPILEGESFFGHEIIMKKYKDSFVKVQNMLNAMDLVSVQIFGEFAGGGIQKGVDYGDKDFYVFDILSDSGNEKVYWDDYRVESFCTGLGLKLAPLLGRGSFAELSQYPNDFKSIVNRYNELVDTVGLEMANKHVFGPQASSETGVAEGYVLKPVYPIFFNTGTRVAIKCKNSKFSEKAKLDSPISVKVELTDNDKRLLEIFSEYVTWNRVSNVLSHIGSVTAKDFGRVSGLTMKDIINEAAREGHDLLFADNPSAVLKELTGLIQNTIRSKWHEVLE

SEQ ID NO: 1345 - DNA, 1038 bp, synthetic construct
  misc_feature 1..1038: note = variant of RNA ligase 2 from Klebsiella phage KP179
  source 1..1038: mol_type = other DNA
atgcatcaccatcaccatcacggtggcagcaacacgtttgcgtattattcaagtctggaaaaccattacaataataagttcattgagaagatccgtggtgcaggcttcctgatgcacaccgtggaatgggtagctcgcgagaagattcatggaacgaactttagcgttatcattactccgaccgaaatcgtcccagccaaacgcacagggccgatcttggaaggcgagtcgttctttggtcacgaaattatcatgaaaaaatataaagactccttcgtgaaggtgcagaacatgctgaatgccatggatcttgttagcgtgcaaatctttggcgaatttgcgggtggtggcattcagaaaggcgtcgattacggagacaaagatttctatgtgtttgacatcctgtctgatagcgggaacgagaaagtttactgggatgactatcgcgtcgaatcgttttgcaccactgtgggtctgaaattagcgcctctgctgggacgtggtagtttcgctgaactgtcccagtacccaaacgatttcaaaagcattgtgaaccgttataatgaattggttgacacggtcggcctggagatggccaataaacacgtctttggtccgcaagcgtcttctgaaactggcgtagcagaaggctacgttcttaaacccgtctatccgatcttctttaataccggtacgcgcgtggcgattaaatgcaagaactccaaattttcggagaaagccaagctggactcgccaattagtgcgaaggtggaactgacggagaacgataaacgtctgctcgaaatctttagcgagtatgttacctggaatcgcgtcagtaacgtactgtcacatattggctcagtgaccgcaaaagattttgggcgtgtttcgggtctgacgatgaaagacatcattaatgaagcagcacgcgaaggccatgatctgttgttcgctgataacccgtcggcggtgctgaaggagctgactggcctcatccagaacacgattcgctccaaatggcacgaagttctggag

SEQ ID NO: 1346 - protein, 346 aa, synthetic construct
  REGION 1..346: note = variant of RNA ligase 2 from Klebsiella phage KP179
MHHHHHHGGSNTFAYYSSLENHYNNKFIEKIRGAGFLMHTVEWVAREKIHGTNFSVIITPTEIVPAKRTGPILEGESFFGHEIIMKKYKDSFVKVQNMLNAMDLVSVQIFGEFAGGGIQKGVDYGDKDFYVFDILSDSGNEKVYWDDYRVESFCTTVGLKLAPLLGRGSFAELSQYPNDFKSIVNRYNELVDTVGLEMANKHVFGPQASSETGVAEGYVLKPVYPIFFNTGTRVAIKCKNSKFSEKAKLDSPISAKVELTENDKRLLEIFSEYVTWNRVSNVLSHIGSVTAKDFGRVSGLTMKDIINEAAREGHDLLFADNPSAVLKELTGLIQNTIRSKWHEVLE

SEQ ID NO: 1347 - DNA, 1038 bp, synthetic construct
  misc_feature 1..1038: note = variant of RNA ligase 2 from Klebsiella phage KP179
  source 1..1038: mol_type = other DNA
atgcatcaccatcaccatcacggtggcagcaacacgtttgcgtattattcaagtctggaaaaccattacaataataagttcattgagaagatccgtggtgcaggcttcctgatgcacaccgtggaatgggtagctcgcgagaagattcatggaacgaactttagcgttatcattactccgaccgaaatcgtcccagccaaacgcacagggccgatcttggaaggcgagtcgttctttggtcacgaaattatcatgaaaaaatataaagactccttcgtgaaggtgcagaacatgctgaatgccatggatcttgttagcgtgcaaatctttggcgaatttgcgggtggtggcattcagaaaggcgtcgattacggagacaaagatttctatgtgtttgacatcctgtctgatagcgggaacgagaaagtttactgggatgactatcgcgtcgaatcgttttgcaccactctcggtctgaaattagcgcctctgctgggacgtggtagtttcgctgaactgtcccagtacccaaacgatttcaaaagcctggtgaaccgttataatgaattggttgacacggtcggcctggagatggccaataaacacgtctttggtccgcaagcgtcttctgaaactggcgtagcagaaggctacgttcttaaacccgtctatccgatcttctttaataccggtacgcgcgtggcgattaaatgcaagaactccaaattttcggagaaagccaagctggactcgccaattagtgcgaaggtggaactgacggagaacgataaacgtctgctcgaaatctttagcgagtatgttacctggaatcgcgtcagtaacgtactgtcacatattggctcagtgaccgcaaaagattttgggcgtgtttcgggtctgacgatgaaagacatcattaatgaagcagcacgcgaaggccatgatctgttgttcgctgataacccgtcggcggtgctgaaggagctgactggcctcatccagaacacgattcgctccaaatggcacgaagttctggag

SEQ ID NO: 1348 - protein, 346 aa, synthetic construct
  REGION 1..346: note = variant of RNA ligase 2 from Klebsiella phage KP179
MHHHHHHGGSNTFAYYSSLENHYNNKFIEKIRGAGFLMHTVEWVAREKIHGTNFSVIITPTEIVPAKRTGPILEGESFFGHEIIMKKYKDSFVKVQNMLNAMDLVSVQIFGEFAGGGIQKGVDYGDKDFYVFDILSDSGNEKVYWDDYRVESFCTTLGLKLAPLLGRGSFAELSQYPNDFKSLVNRYNELVDTVGLEMANKHVFGPQASSETGVAEGYVLKPVYPIFFNTGTRVAIKCKNSKFSEKAKLDSPISAKVELTENDKRLLEIFSEYVTWNRVSNVLSHIGSVTAKDFGRVSGLTMKDIINEAAREGHDLLFADNPSAVLKELTGLIQNTIRSKWHEVLE

SEQ ID NO: 1349 - DNA, 1038 bp, synthetic construct
  misc_feature 1..1038: note = variant of RNA ligase 2 from Klebsiella phage KP179
  source 1..1038: mol_type = other DNA
atgcatcaccatcaccatcacggtggcagcaacacgtttgcgtattattcaagtctggaaaaccattacaataataagttcattgagaagatccgtggtgcaggcttcctgatgcacaccgtggaatgggtagctcgcgagaagattcatggaacgaactttagcgttatcattactccgaccgaaatcgtcccagccaaacgcacagggccgatcttggaaggcgagtcgttctttggtcacgaaattatcatgaaaaaatataaagactccttcgtgaaggcgcagaacatgctgaatgccatggatcttgttagcgtgcaaatctttggcgaatttgcgggtggtggcattcagaaaggcgtcgattacggagacaaagatttctatgtgtttgacatcctgtctgatagcgggaacgagaaagtttactgggatgactatcgcgtcgaatcgttttgcaccactctcggtctgaaattagcgcctctgctgggacgtggtagtttcgctgaactgtcccagtacccaaacgatttcaaaagcattgtgaaccgttataatgaattggttgacacggtcggcctggagatggccaataaacacgtctttggtccgcaagcgtcttctgaaactggcgtagcagaaggctacgttcttaaacccgtctatccgatcttctttaataccggtacgcgcgtggcgattaaatgcaagaactccaaattttcggagaaagccaagctggactcgccaattagtgcgaaggtggaactgacggagaacgataaacgtctgctcgaaatctttagcgagtatgttacctggaatcgcgtcagtaacgtactgtcacatattggctcagtgaccgcaaaagattttgggcgtgtttcgggtctgacgatgaaagacatcattaatgaagcagcacgcgaaggccatgatctgttgttcgctgataacccgtcggcggtgctgaaggagctgactggcctcatccagaacacgattcgctccaaatggcacgaagttctggag

SEQ ID NO: 1350 - protein, 346 aa, synthetic construct
  REGION 1..346: note = variant of RNA ligase 2 from Klebsiella phage KP179
MHHHHHHGGSNTFAYYSSLENHYNNKFIEKIRGAGFLMHTVEWVAREKIHGTNFSVIITPTEIVPAKRTGPILEGESFFGHEIIMKKYKDSFVKAQNMLNAMDLVSVQIFGEFAGGGIQKGVDYGDKDFYVFDILSDSGNEKVYWDDYRVESFCTTLGLKLAPLLGRGSFAELSQYPNDFKSIVNRYNELVDTVGLEMANKHVFGPQASSETGVAEGYVLKPVYPIFFNTGTRVAIKCKNSKFSEKAKLDSPISAKVELTENDKRLLEIFSEYVTWNRVSNVLSHIGSVTAKDFGRVSGLTMKDIINEAAREGHDLLFADNPSAVLKELTGLIQNTIRSKWHEVLE

SEQ ID NO: 1351 - DNA, 1038 bp, synthetic construct
  misc_feature 1..1038: note = variant of RNA ligase 2 from Klebsiella phage KP179
  source 1..1038: mol_type = other DNA
atgcatcaccatcaccatcacggtggcagcaacacgtttgcgtattattcaagtctggaaaaccattacaataataagttcattgagaagatccgtggtgcaggcttcctgatgcacaccgtggaatgggtagctcgcgagaagattcatggaacgaactttagcgttatcattactccgaccgaaatcgtcccagccaaacgcacagggccgatcttggaaggcgagtcgttctttggtcacgaaattatcatgaaaaaatataaagactccttcgtgaaggtgcagaacatgctgaatgccatggatcttgttagcgtgcaaatctttggcgaatttgcgggtggtggcattcagaaaggcgtcgattacggagacaaagatttctatgtgtttgacatcctgtctgatagcgggaacgagaaagtttactgggatgactatcgcgtcgaatcgttttgcaccactctcggtctgaaattagcgcctctgctgggacgtggtagtttcgctgaactgtcccagtacccaaacgatttcaaaagcgtggtgaaccgttataatgaattggttgacacggtcggcctggagatggccaataaacacgtctttggtccgcaagcgtcttctgaaactggcgtagcagaaggctacgttcttaaacccgtctatccgatcttctttaataccggtacgcgcgtggcgattaaatgcaagaactccaaattttcggagaaagccaagctggactcgccaattagtgcgaaggtggaactgacggagaacgataaacgtctgctcgaaatctttagcgagtatgttacctggaatcgcgtcagtaacgtactgtcacatattggctcagtgaccgcaaaagattttgggcgtgtttcgggtctgacgatgaaagacatcattaatgaagcagcacgcgaaggccatgatctgttgttcgctgataacccgtcggcggtgctgaaggagctgactggcctcatccagaacacgattcgctccaaatggcacgaagttctggag

SEQ ID NO: 1352 - protein, 346 aa, synthetic construct
  REGION 1..346: note = variant of RNA ligase 2 from Klebsiella phage KP179
MHHHHHHGGSNTFAYYSSLENHYNNKFIEKIRGAGFLMHTVEWVAREKIHGTNFSVIITPTEIVPAKRTGPILEGESFFGHEIIMKKYKDSFVKVQNMLNAMDLVSVQIFGEFAGGGIQKGVDYGDKDFYVFDILSDSGNEKVYWDDYRVESFCTTLGLKLAPLLGRGSFAELSQYPNDFKSVVNRYNELVDTVGLEMANKHVFGPQASSETGVAEGYVLKPVYPIFFNTGTRVAIKCKNSKFSEKAKLDSPISAKVELTENDKRLLEIFSEYVTWNRVSNVLSHIGSVTAKDFGRVSGLTMKDIINEAAREGHDLLFADNPSAVLKELTGLIQNTIRSKWHEVLE

SEQ ID NO: 1353 - DNA, 1038 bp, synthetic construct
  misc_feature 1..1038: note = variant of RNA ligase 2 from Klebsiella phage KP179
  source 1..1038: mol_type = other DNA
atgcatcaccatcaccatcacggtggcagcaacacgtttgcgtattattcaagtctggaaaaccattacaataataagttcattgagaagatccgtggtgcaggcttcctgatgcacaccgtggaatgggtagctcgcgagaagattcatggaacgaactttagcgttatcattactccgaccgaaatcgtcccagccaaacgcacagggccgatcttggaaggcgagtcgttctttggtcacgaaattatcatgaaaaaatataaagactccttcgtgaaggtgcagaacatgctgaatgccatggatcttgttagcgtgcaaatctttggcgaatttgcgggtggtggcattcagaaaggcgtcgattacggagacaaagatttctatgtgtttgacatcctgtctgatagcgggaacgagaaagtttactgggatgactatcgcgtcgaatcgttttgcaccactctcggtctgaaattagcgcctctgctgggacgtggtagtttcgctgaactgtcccagtacccaaacgatttcaaaagcattgtgcctcgttataatgaattggttgacacggtcggcctggagatggccaataaacacgtctttggtccgcaagcgtcttctgaaactggcgtagcagaaggctacgttcttaaacccgtctatccgatcttctttaataccggtacgcgcgtggcgattaaatgcaagaactccaaattttcggagaaagccaagctggactcgccaattagtgcgaaggtggaactgacggagaacgataaacgtctgctcgaaatctttagcgagtatgttacctggaatcgcgtcagtaacgtactgtcacatattggctcagtgaccgcaaaagattttgggcgtgtttcgggtctgacgatgaaagacatcattaatgaagcagcacgcgaaggccatgatctgttgttcgctgataacccgtcggcggtgctgaaggagctgactggcctcatccagaacacgattcgctccaaatggcacgaagttctggag

SEQ ID NO: 1354 - protein, 346 aa, synthetic construct
  REGION 1..346: note = variant of RNA ligase 2 from Klebsiella phage KP179
MHHHHHHGGSNTFAYYSSLENHYNNKFIEKIRGAGFLMHTVEWVAREKIHGTNFSVIITPTEIVPAKRTGPILEGESFFGHEIIMKKYKDSFVKVQNMLNAMDLVSVQIFGEFAGGGIQKGVDYGDKDFYVFDILSDSGNEKVYWDDYRVESFCTTLGLKLAPLLGRGSFAELSQYPNDFKSIVPRYNELVDTVGLEMANKHVFGPQASSETGVAEGYVLKPVYPIFFNTGTRVAIKCKNSKFSEKAKLDSPISAKVELTENDKRLLEIFSEYVTWNRVSNVLSHIGSVTAKDFGRVSGLTMKDIINEAAREGHDLLFADNPSAVLKELTGLIQNTIRSKWHEVLE

SEQ ID NO: 1355 - DNA, 1038 bp, synthetic construct
  misc_feature 1..1038: note = variant of RNA ligase 2 from Klebsiella phage KP179
  source 1..1038: mol_type = other DNA
atgcatcaccatcaccatcacggtggcagcaacacgtttgcgtattattcaagtctggaaaaccattacaataataagttcattgagaagatccgtggtgcaggcttcctgatgcacaccgtggaatgggtagctcgcgagaagattcatggaacgaactttagcgttatcattactccgaccgaaatcgtcccagccaaacgcacagggccgatcttggaaggcgagtcgttctttggtcacgaaattatcatgaaaaaatataaagactccttcgtgaaggtgcagaacatgctgaatgccatggatcttgttagcgtgcaaatctttggcgaatttgcgggtggtggcattcagaaaggcgtcgattacggagacaaagatttctatgtgtttgacatcctgtctgatagcgggaacgagaaagtttactgggatgactatcgcgtcgaatcgttttgcaccactctcggtctgaaattagcgcctctgctgggacgtggtagtttcgctgaactgtcccagtacccaaacgatttcgagagcattgtgaaccgttataatgaattggttgacacggtcggcctggagatggccaataaacacgtctttggtccgcaagcgtcttctgaaactggcgtagcagaaggctacgttcttaaacccgtctatccgatcttctttaataccggtacgcgcgtggcgattaaatgcaagaactccaaattttcggagaaagccaagctggactcgccaattagtgcgaaggtggaactgacggagaacgataaacgtctgctcgaaatctttagcgagtatgttacctggaatcgcgtcagtaacgtactgtcacatattggctcagtgaccgcaaaagattttgggcgtgtttcgggtctgacgatgaaagacatcattaatgaagcagcacgcgaaggccatgatctgttgttcgctgataacccgtcggcggtgctgaaggagctgactggcctcatccagaacacgattcgctccaaatggcacgaagttctggag

SEQ ID NO: 1356 - protein, 346 aa, synthetic construct
  REGION 1..346: note = variant of RNA ligase 2 from Klebsiella phage KP179
MHHHHHHGGSNTFAYYSSLENHYNNKFIEKIRGAGFLMHTVEWVAREKIHGTNFSVIITPTEIVPAKRTGPILEGESFFGHEIIMKKYKDSFVKVQNMLNAMDLVSVQIFGEFAGGGIQKGVDYGDKDFYVFDILSDSGNEKVYWDDYRVESFCTTLGLKLAPLLGRGSFAELSQYPNDFESIVNRYNELVDTVGLEMANKHVFGPQASSETGVAEGYVLKPVYPIFFNTGTRVAIKCKNSKFSEKAKLDSPISAKVELTENDKRLLEIFSEYVTWNRVSNVLSHIGSVTAKDFGRVSGLTMKDIINEAAREGHDLLFADNPSAVLKELTGLIQNTIRSKWHEVLE

SEQ ID NO: 1357 - DNA, 1038 bp, synthetic construct
  misc_feature 1..1038: note = variant of RNA ligase 2 from Klebsiella phage KP179
  source 1..1038: mol_type = other DNA
atgcatcaccatcaccatcacggtggcagcaacacgtttgcgtattattcaagtctggaaaaccattacaataataagttcattgagaagatccgtggtgcaggcttcctgatgcacaccgtggaatgggtagctcgcgagaagattcatggaacgaactttagcgttatcattactccgaccgaaatcgtcccagccaaacgcacagggccgatcttggaaggcgagtcgttctttggtcacgaaattatcatgaaaaaatataaagactccttcgtgaaggtgcagaacatgctgaatgccatggatcttgttagcgtgcaaatctttggcgaatttgcgggtggtggcattcagaaaggcgtcgattacggagacaaagatttctatgtgtttgacatcctgtctgatagcgggaacgagaaagtttactgggatgactatcgcgtcgaatcgttttgcaccactctcggtctgaaattagcgcctctgctgggacgtggtagtttcgctgaactgtcccagtacccaaacgatttcaaaagcattgtgaaccgttataatgaattggttgacacggtcggcctggagatggccaataaacacgtctttggtccgcaagcgtcttctgaaactgatgtagcagaaggctacgttcttaaacccgtctatccgatcttctttaataccggtacgcgcgtggcgattaaatgcaagaactccaaattttcggagaaagccaagctggactcgccaattagtgcgaaggtggaactgacggagaacgataaacgtctgctcgaaatctttagcgagtatgttacctggaatcgcgtcagtaacgtactgtcacatattggctcagtgaccgcaaaagattttgggcgtgtttcgggtctgacgatgaaagacatcattaatgaagcagcacgcgaaggccatgatctgttgttcgctgataacccgtcggcggtgctgaaggagctgactggcctcatccagaacacgattcgctccaaatggcacgaagttctggag

SEQ ID NO: 1358 - protein, 346 aa, synthetic construct
  REGION 1..346: note = variant of RNA ligase 2 from Klebsiella phage KP179
MHHHHHHGGSNTFAYYSSLENHYNNKFIEKIRGAGFLMHTVEWVAREKIHGTNFSVIITPTEIVPAKRTGPILEGESFFGHEIIMKKYKDSFVKVQNMLNAMDLVSVQIFGEFAGGGIQKGVDYGDKDFYVFDILSDSGNEKVYWDDYRVESFCTTLGLKLAPLLGRGSFAELSQYPNDFKSIVNRYNELVDTVGLEMANKHVFGPQASSETDVAEGYVLKPVYPIFFNTGTRVAIKCKNSKFSEKAKLDSPISAKVELTENDKRLLEIFSEYVTWNRVSNVLSHIGSVTAKDFGRVSGLTMKDIINEAAREGHDLLFADNPSAVLKELTGLIQNTIRSKWHEVLE

SEQ ID NO: 1359 - DNA, 1038 bp, synthetic construct
  misc_feature 1..1038: note = variant of RNA ligase 2 from Klebsiella phage KP179
  source 1..1038: mol_type = other DNA
atgcatcaccatcaccatcacggtggcagcaacacgtttgcgtattattcaagtctggaaaaccattacaataataagttcattgagaagatccgtggtgcaggcttcctgatgcacaccgtggaatgggtagctcgcgagaagattcatggaacgaactttagcgttatcattactccgaccgaaatcgtcccagccaaacgcacagggccgatcttggaaggcgagtcgttctttggtcacgaaattatcatgaaaaaatatatggactccttcgtgaaggtgcagaacatgctgaatgccatggatcttgttagcgtgcaaatctttggcgaatttgcgggtggtggcattcagaaaggcgtcgattacggagacaaagatttctatgtgtttgacatcctgtctgatagcgggaacgagaaagtttactgggatgactatcgcgtcgaatcgttttgcaccactctcggtctgaaattagcgcctctgctgggacgtggtagtttcgctgaactgtcccagtacccaaacgatttcaaaagcattgtgaaccgttataatgaattggttgacacggtcggcctggagatggccaataaacacgtctttggtccgcaagcgtcttctgaaactggcgtagcagaaggctacgttcttaaacccgtctatccgatcttctttaataccggtacgcgcgtggcgattaaatgcaagaactccaaattttcggagaaagccaagctggactcgccaattagtgcgaaggtggaactgacggagaacgataaacgtctgctcgaaatctttagcgagtatgttacctggaatcgcgtcagtaacgtactgtcacatattggctcagtgaccgcaaaagattttgggcgtgtttcgggtctgacgatgaaagacatcattaatgaagcagcacgcgaaggccatgatctgttgttcgctgataacccgtcggcggtgctgaaggagctgactggcctcatccagaacacgattcgctccaaatggcacgaagttctggag

SEQ ID NO: 1360 - protein, 346 aa, synthetic construct
  REGION 1..346: note = variant of RNA ligase 2 from Klebsiella phage KP179
MHHHHHHGGSNTFAYYSSLENHYNNKFIEKIRGAGFLMHTVEWVAREKIHGTNFSVIITPTEIVPAKRTGPILEGESFFGHEIIMKKYMDSFVKVQNMLNAMDLVSVQIFGEFAGGGIQKGVDYGDKDFYVFDILSDSGNEKVYWDDYRVESFCTTLGLKLAPLLGRGSFAELSQYPNDFKSIVNRYNELVDTVGLEMANKHVFGPQASSETGVAEGYVLKPVYPIFFNTGTRVAIKCKNSKFSEKAKLDSPISAKVELTENDKRLLEIFSEYVTWNRVSNVLSHIGSVTAKDFGRVSGLTMKDIINEAAREGHDLLFADNPSAVLKELTGLIQNTIRSKWHEVLE

SEQ ID NO: 1361 - DNA, 1038 bp, synthetic construct
  misc_feature 1..1038: note = variant of RNA ligase 2 from Klebsiella phage KP179
  source 1..1038: mol_type = other DNA
atgcatcaccatcaccatcacggtggcagcaacacgtttgcgtattattcaagtctggaaaaccattacaataataagttcattgagaagatccgtggtgcaggcttcctgatgcacaccgtggaatgggtagctcgcgagaagattcatggaacgaactttagcgttatcattactccgaccgaaatcgtcccagccaaacgcacagggccgatcttggaaggcgagtcgttctttggtcacgaaattatcatgaaaaaatatggggactccttcgtgaaggtgcagaacatgctgaatgccatggatcttgttagcgtgcaaatctttggcgaatttgcgggtggtggcattcagaaaggcgtcgattacggagacaaagatttctatgtgtttgacatcctgtctgatagcgggaacgagaaagtttactgggatgactatcgcgtcgaatcgttttgcaccactctcggtctgaaattagcgcctctgctgggacgtggtagtttcgctgaactgtcccagtacccaaacgatttcaaaagcattgtgaaccgttataatgaattggttgacacggtcggcctggagatggccaataaacacgtctttggtccgcaagcgtcttctgaaactggcgtagcagaaggctacgttcttaaacccgtctatccgatcttctttaataccggtacgcgcgtggcgattaaatgcaagaactccaaattttcggagaaagccaagctggactcgccaattagtgcgaaggtggaactgacggagaacgataaacgtctgctcgaaatctttagcgagtatgttacctggaatcgcgtcagtaacgtactgtcacatattggctcagtgaccgcaaaagattttgggcgtgtttcgggtctgacgatgaaagacatcattaatgaagcagcacgcgaaggccatgatctgttgttcgctgataacccgtcggcggtgctgaaggagctgactggcctcatccagaacacgattcgctccaaatggcacgaagttctggag

SEQ ID NO: 1362 - protein, 346 aa, synthetic construct
  REGION 1..346: note = variant of RNA ligase 2 from Klebsiella phage KP179
MHHHHHHGGSNTFAYYSSLENHYNNKFIEKIRGAGFLMHTVEWVAREKIHGTNFSVIITPTEIVPAKRTGPILEGESFFGHEIIMKKYGDSFVKVQNMLNAMDLVSVQIFGEFAGGGIQKGVDYGDKDFYVFDILSDSGNEKVYWDDYRVESFCTTLGLKLAPLLGRGSFAELSQYPNDFKSIVNRYNELVDTVGLEMANKHVFGPQASSETGVAEGYVLKPVYPIFFNTGTRVAIKCKNSKFSEKAKLDSPISAKVELTENDKRLLEIFSEYVTWNRVSNVLSHIGSVTAKDFGRVSGLTMKDIINEAAREGHDLLFADNPSAVLKELTGLIQNTIRSKWHEVLE

SEQ ID NO: 1363 - DNA, 1038 bp, synthetic construct
  misc_feature 1..1038: note = variant of RNA ligase 2 from Klebsiella phage KP179
  source 1..1038: mol_type = other DNA
atgcatcaccatcaccatcacggtggcagcaacacgtttgcgtattattcaagtctggaaaaccattacaataataagttcatggagaagatccgtggtgcaggcttcctgatgcacaccgtggaatgggtagctcgcgagaagattcatggaacgaactttagcgttatcattactccgaccgaaatcgtcccagccaaacgcacagggccgatcttggaaggcgagtcgttctttggtcacgaaattatcatgaaaaaatataaagactccttcgtgaaggtgcagaacatgctgaatgccatggatcttgttagcgtgcaaatctttggcgaatttgcgggtggtggcattcagaaaggcgtcgattacggagacaaagatttctatgtgtttgacatcctgtctgatagcgggaacgagaaagtttactgggatgactatcgcgtcgaatcgttttgcaccactctcggtctgaaattagcgcctctgctgggacgtggtagtttcgctgaactgtcccagtacccaaacgatttcaaaagcattgtgaaccgttataatgaattggttgacacggtcggcctggagatggccaataaacacgtctttggtccgcaagcgtcttctgaaactggcgtagcagaaggctacgttcttaaacccgtctatccgatcttctttaataccggtacgcgcgtggcgattaaatgcaagaactccaaattttcggagaaagccaagctggactcgccaattagtgcgaaggtggaactgacggagaacgataaacgtctgctcgaaatctttagcgagtatgttacctggaatcgcgtcagtaacgtactgtcacatattggctcagtgaccgcaaaagattttgggcgtgtttcgggtctgacgatgaaagacatcattaatgaagcagcacgcgaaggccatgatctgttgttcgctgataacccgtcggcggtgctgaaggagctgactggcctcatccagaacacgattcgctccaaatggcacgaagttctggag

SEQ ID NO: 1364 - protein, 346 aa, synthetic construct
  REGION 1..346: note = variant of RNA ligase 2 from Klebsiella phage KP179
MHHHHHHGGSNTFAYYSSLENHYNNKFMEKIRGAGFLMHTVEWVAREKIHGTNFSVIITPTEIVPAKRTGPILEGESFFGHEIIMKKYKDSFVKVQNMLNAMDLVSVQIFGEFAGGGIQKGVDYGDKDFYVFDILSDSGNEKVYWDDYRVESFCTTLGLKLAPLLGRGSFAELSQYPNDFKSIVNRYNELVDTVGLEMANKHVFGPQASSETGVAEGYVLKPVYPIFFNTGTRVAIKCKNSKFSEKAKLDSPISAKVELTENDKRLLEIFSEYVTWNRVSNVLSHIGSVTAKDFGRVSGLTMKDIINEAAREGHDLLFADNPSAVLKELTGLIQNTIRSKWHEVLE

SEQ ID NO: 1365 - DNA, 1038 bp, synthetic construct
  misc_feature 1..1038: note = variant of RNA ligase 2 from Klebsiella phage KP179
  source 1..1038: mol_type = other DNA
atgcatcaccatcaccatcacggtggcagcaacacgtttgcgtattattcaagtctggaaaaccattacaataataagttcattgagaagatccgtggtgcaggcttcctgatgcacaccgtggaatgggtagctcgcgagaagattcatggaacgaactttagcgttatcattactccgaccgaaatcgtcccagccaaacgcacagggccgatcttggaaggcgagtcgttctttggtcacgaaattatcatgaaaaaatataaagactccttcgtgaaggtgcagaacatgctgaatgccatggatcttgttagcgtgcaaatctttggcgaatttgcgggtggtggcattcagaaaggcgtcgattacggagacaaagatttctatgtgtttgacatcctgtctgatagcgggaacgagaaagtttactgggatgactatcgcgtcgaatcgttttgcaccactctcggtctgaaattagcgcctctgctgggacgtggtagtttcgctgaactgtcccagtacccaaacgatttcaaaagcattgtgaaccgttataatgaaatggttgacacggtcggcctggagatggccaataaacacgtctttggtccgcaagcgtcttctgaaactggcgtagcagaaggctacgttcttaaacccgtctatccgatcttctttaataccggtacgcgcgtggcgattaaatgcaagaactccaaattttcggagaaagccaagctggactcgccaattagtgcgaaggtggaactgacggagaacgataaacgtctgctcgaaatctttagcgagtatgttacctggaatcgcgtcagtaacgtactgtcacatattggctcagtgaccgcaaaagattttgggcgtgtttcgggtctgacgatgaaagacatcattaatgaagcagcacgcgaaggccatgatctgttgttcgctgataacccgtcggcggtgctgaaggagctgactggcctcatccagaacacgattcgctccaaatggcacgaagttctggag

SEQ ID NO: 1366 - protein, 346 aa, synthetic construct
  REGION 1..346: note = variant of RNA ligase 2 from Klebsiella phage KP179
MHHHHHHGGSNTFAYYSSLENHYNNKFIEKIRGAGFLMHTVEWVAREKIHGTNFSVIITPTEIVPAKRTGPILEGESFFGHEIIMKKYKDSFVKVQNMLNAMDLVSVQIFGEFAGGGIQKGVDYGDKDFYVFDILSDSGNEKVYWDDYRVESFCTTLGLKLAPLLGRGSFAELSQYPNDFKSIVNRYNEMVDTVGLEMANKHVFGPQASSETGVAEGYVLKPVYPIFFNTGTRVAIKCKNSKFSEKAKLDSPISAKVELTENDKRLLEIFSEYVTWNRVSNVLSHIGSVTAKDFGRVSGLTMKDIINEAAREGHDLLFADNPSAVLKELTGLIQNTIRSKWHEVLE

SEQ ID NO: 1367 - DNA, 1038 bp, synthetic construct
  misc_feature 1..1038: note = variant of RNA ligase 2 from Klebsiella phage KP179
  source 1..1038: mol_type = other DNA
atgcatcaccatcaccatcacggtggcagcaacacgtttgcgtattattcaagtctggaaaaccattacaataataagttcattgagaagatccgtggtgcaggcttcctgatgcacaccgtggaatgggtagctcgcgagaagattcatggaacgaactttagcgttatcattactccgaccgaaatcgtcccagccaaacgcacagggccgatcttggaaggcgagtcgttctttggtcacgaaattatcatgaaaaaatataaagactccttcgtgaaggtgcagaacatgctgaatgccatggatcttgttagcgtgcaaatctttggcgaatttgcgggtggtggcattcagaaaggcgtcgattacggagacaaagatttctatgtgtttgacatcctgtctgatagcgggaacgagaaagtttactgggatgactatcgcgtcgaatcgttttgcaccactctcggtctgaaattagcgcctctgctgggacgtggtagtttcgctgaactgtcccagtacccaaacgatttcaaaagcattgtgaaccgttataatgaattggttgacacggtcggcctggagatggccaataaacacgtctttggtccgcaagcgtcttctgaaactggccttgcagaaggctacgttcttaaacccgtctatccgatcttctttaataccggtacgcgcgtggcgattaaatgcaagaactccaaattttcggagaaagccaagctggactcgccaattagtgcgaaggtggaactgacggagaacgataaacgtctgctcgaaatctttagcgagtatgttacctggaatcgcgtcagtaacgtactgtcacatattggctcagtgaccgcaaaagattttgggcgtgtttcgggtctgacgatgaaagacatcattaatgaagcagcacgcgaaggccatgatctgttgttcgctgataacccgtcggcggtgctgaaggagctgactggcctcatccagaacacgattcgctccaaatggcacgaagttctggag

SEQ ID NO: 1368 - protein, 346 aa, synthetic construct
  REGION 1..346: note = variant of RNA ligase 2 from Klebsiella phage KP179
MHHHHHHGGSNTFAYYSSLENHYNNKFIEKIRGAGFLMHTVEWVAREKIHGTNFSVIITPTEIVPAKRTGPILEGESFFGHEIIMKKYKDSFVKVQNMLNAMDLVSVQIFGEFAGGGIQKGVDYGDKDFYVFDILSDSGNEKVYWDDYRVESFCTTLGLKLAPLLGRGSFAELSQYPNDFKSIVNRYNELVDTVGLEMANKHVFGPQASSETGLAEGYVLKPVYPIFFNTGTRVAIKCKNSKFSEKAKLDSPISAKVELTENDKRLLEIFSEYVTWNRVSNVLSHIGSVTAKDFGRVSGLTMKDIINEAAREGHDLLFADNPSAVLKELTGLIQNTIRSKWHEVLE

SEQ ID NO: 1369 - DNA, 1038 bp, synthetic construct
  misc_feature 1..1038: note = variant of RNA ligase 2 from Klebsiella phage KP179
  source 1..1038: mol_type = other DNA
atgcatcaccatcaccatcacggtggcagcaacacgtttgcgtattattcaagtctggaaaaccattacaataataagttcattgagaagatccgtggtgcaggcttcctgatgcacaccgtggaatgggtagctcgcgagaagattcatggaacgaactttagcgttatcattactccgaccgaaatcgtcccagccaaacgcacagggccgatcttggaaggcgagtcgttctttggtcacgaaattatcatgaaaaaatataaagactccttcgtgaaggtgcagaacatgctgaatgccatggatcttgttagcgtgcaaatctttggcgaatttgcgggtggtggcattcagaaaggcgtcgattacggagacaaagatttctatgtgtttgacatcctgtctgatagcgggaacgagaaagcttactgggatgactatcgcgtcgaatcgttttgcaccactctcggtctgaaattagcgcctctgctgggacgtggtagtttcgctgaactgtcccagtacccaaacgatttcaaaagcattgtgaaccgttataatgaattggttgacacggtcggcctggagatggccaataaacacgtctttggtccgcaagcgtcttctgaaactggcgtagcagaaggctacgttcttaaacccgtctatccgatcttctttaataccggtacgcgcgtggcgattaaatgcaagaactccaaattttcggagaaagccaagctggactcgccaattagtgcgaaggtggaactgacggagaacgataaacgtctgctcgaaatctttagcgagtatgttacctggaatcgcgtcagtaacgtactgtcacatattggctcagtgaccgcaaaagattttgggcgtgtttcgggtctgacgatgaaagacatcattaatgaagcagcacgcgaaggccatgatctgttgttcgctgataacccgtcggcggtgctgaaggagctgactggcctcatccagaacacgattcgctccaaatggcacgaagttctggag

SEQ ID NO: 1370 - protein, 346 aa, synthetic construct
  REGION 1..346: note = variant of RNA ligase 2 from Klebsiella phage KP179
MHHHHHHGGSNTFAYYSSLENHYNNKFIEKIRGAGFLMHTVEWVAREKIHGTNFSVIITPTEIVPAKRTGPILEGESFFGHEIIMKKYKDSFVKVQNMLNAMDLVSVQIFGEFAGGGIQKGVDYGDKDFYVFDILSDSGNEKAYWDDYRVESFCTTLGLKLAPLLGRGSFAELSQYPNDFKSIVNRYNELVDTVGLEMANKHVFGPQASSETGVAEGYVLKPVYPIFFNTGTRVAIKCKNSKFSEKAKLDSPISAKVELTENDKRLLEIFSEYVTWNRVSNVLSHIGSVTAKDFGRVSGLTMKDIINEAAREGHDLLFADNPSAVLKELTGLIQNTIRSKWHEVLE

SEQ ID NO: 1371 - DNA, 1038 bp, synthetic construct
  misc_feature 1..1038: note = variant of RNA ligase 2 from Klebsiella phage KP179
  source 1..1038: mol_type = other DNA
atgcatcaccatcaccatcacggtggcagcaacacgtttgcgtattattcaagtctggaaaaccattacaataataagttcattgagaagatccgtggtgcaggcttcctgatgcacaccgtggaatgggtagctcgcgagaagattcatggaacgaactttagcgttatcattactccgaccgaaatcgtcccagccaaacgcacagggccgatcttggaaggcgagtcgttctttggtcacgaaattatcatgaaaaaatatcaggactccttcgtgaaggtgcagaacatgctgaatgccatggatcttgttagcgtgcaaatctttggcgaatttgcgggtggtggcattcagaaaggcgtcgattacggagacaaagatttctatgtgtttgacatcctgtctgatagcgggaacgagaaagtttactgggatgactatcgcgtcgaatcgttttgcaccactctcggtctgaaattagcgcctctgctgggacgtggtagtttcgctgaactgtcccagtacccaaacgatttcaaaagcattgtgaaccgttataatgaattggttgacacggtcggcctggagatggccaataaacacgtctttggtccgcaagcgtcttctgaaactggcgtagcagaaggctacgttcttaaacccgtctatccgatcttctttaataccggtacgcgcgtggcgattaaatgcaagaactccaaattttcggagaaagccaagctggactcgccaattagtgcgaaggtggaactgacggagaacgataaacgtctgctcgaaatctttagcgagtatgttacctggaatcgcgtcagtaacgtactgtcacatattggctcagtgaccgcaaaagattttgggcgtgtttcgggtctgacgatgaaagacatcattaatgaagcagcacgcgaaggccatgatctgttgttcgctgataacccgtcggcggtgctgaaggagctgactggcctcatccagaacacgattcgctccaaatggcacgaagttctggag

SEQ ID NO: 1372 - protein, 346 aa, synthetic construct
  REGION 1..346: note = variant of RNA ligase 2 from Klebsiella phage KP179
MHHHHHHGGSNTFAYYSSLENHYNNKFIEKIRGAGFLMHTVEWVAREKIHGTNFSVIITPTEIVPAKRTGPILEGESFFGHEIIMKKYQDSFVKVQNMLNAMDLVSVQIFGEFAGGGIQKGVDYGDKDFYVFDILSDSGNEKVYWDDYRVESFCTTLGLKLAPLLGRGSFAELSQYPNDFKSIVNRYNELVDTVGLEMANKHVFGPQASSETGVAEGYVLKPVYPIFFNTGTRVAIKCKNSKFSEKAKLDSPISAKVELTENDKRLLEIFSEYVTWNRVSNVLSHIGSVTAKDFGRVSGLTMKDIINEAAREGHDLLFADNPSAVLKELTGLIQNTIRSKWHEVLE

SEQ ID NO: 1373 - DNA, 1038 bp, synthetic construct
  misc_feature 1..1038: note = variant of RNA ligase 2 from Klebsiella phage KP179
  source 1..1038: mol_type = other DNA
atgcatcaccatcaccatcacggtggcagcaacacgtttgcgtattattcaagtctggaaaaccattacaataataagttcattgagaagatccgtggtgcaggcttcctgatgcacaccgtggaatgggtagctcgcgagaagattcatggaacgaactttagcgttatcattactccgaccgaaatcgtcccagccaaacgcacagggccgatcttggaaggcgagtcgttctttggtcacgaaattatcatgaaaaaatataaagactccttcgtgaaggggcagaacatgctgaatgccatggatcttgttagcgtgcaaatctttggcgaatttgcgggtggtggcattcagaaaggcgtcgattacggagacaaagatttctatgtgtttgacatcctgtctgatagcgggaacgagaaagtttactgggatgactatcgcgtcgaatcgttttgcaccactctcggtctgaaattagcgcctctgctgggacgtggtagtttcgctgaactgtcccagtacccaaacgatttcaaaagcattgtgaaccgttataatgaattggttgacacggtcggcctggagatggccaataaacacgtctttggtccgcaagcgtcttctgaaactggcgtagcagaaggctacgttcttaaacccgtctatccgatcttctttaataccggtacgcgcgtggcgattaaatgcaagaactccaaattttcggagaaagccaagctggactcgccaattagtgcgaaggtggaactgacggagaacgataaacgtctgctcgaaatctttagcgagtatgttacctggaatcgcgtcagtaacgtactgtcacatattggctcagtgaccgcaaaagattttgggcgtgtttcgggtctgacgatgaaagacatcattaatgaagcagcacgcgaaggccatgatctgttgttcgctgataacccgtcggcggtgctgaaggagctgactggcctcatccagaacacgattcgctccaaatggcacgaagttctggag

SEQ ID NO: 1374 - protein, 346 aa, synthetic construct
  REGION 1..346: note = variant of RNA ligase 2 from Klebsiella phage KP179
MHHHHHHGGSNTFAYYSSLENHYNNKFIEKIRGAGFLMHTVEWVAREKIHGTNFSVIITPTEIVPAKRTGPILEGESFFGHEIIMKKYKDSFVKGQNMLNAMDLVSVQIFGEFAGGGIQKGVDYGDKDFYVFDILSDSGNEKVYWDDYRVESFCTTLGLKLAPLLGRGSFAELSQYPNDFKSIVNRYNELVDTVGLEMANKHVFGPQASSETGVAEGYVLKPVYPIFFNTGTRVAIKCKNSKFSEKAKLDSPISAKVELTENDKRLLEIFSEYVTWNRVSNVLSHIGSVTAKDFGRVSGLTMKDIINEAAREGHDLLFADNPSAVLKELTGLIQNTIRSKWHEVLE

SEQ ID NO: 1375 - DNA, 1038 bp, synthetic construct
  misc_feature 1..1038: note = variant of RNA ligase 2 from Klebsiella phage KP179
  source 1..1038: mol_type = other DNA
atgcatcaccatcaccatcacggtggcagcaacatgtttgcgtattattcaagtctggaaaaccattacaatgctaagttcattgagaagatccgtggtgcaggcttcctgatgcacaccgtggaatgggtagctcgcgagaagattcatggaacgaactttagcgttatcattactccgaccgaaatcgtcccagccaaacgcacagggccgatcttggaaggcgagtcgttctttggtcacgaaattatcatgaaaaaatataaagactccttcgtgaaggctcagaacatgctgaatgccatggatcttgttagcgtgcaaatctttggcgaatttgcgggtggtggcattcagaaaggcgtcgattacggagacaaagatttctatgtgtttgacatcctgtctgatagcgggaacgagaaagtttactgggatgactatcgcgtcgaatcgttttgcaccactgtgggtctgaaattagcgcctctgctgggacgtggtagtttcgctgaactgtcccagtacccaaacgatttcaaaagcattgtgaaccgttataatgaattggttgacacggtcggcctggagatggccaataaacacgtctttggtccgcaagcgtcttctgaaactggcgtagcagaaggctacgttcttaaacccgtctatccgatcttctttaataccggtacgcgcgtggcgattaaatgcaagaactccaaattttcggagaaagccaagctggactcgccaattagtgcgaaggttgaactgacggagaacgataaacgtctgctcgaaatctttagcgagtatgttacctggaatcgcgtcagtaacgtactgtcacatattggctcagtgaccgcaaaagattttgggcgtgtttcgggtctgacgatgaaagacatcattaatgaagcagcacgcgaaggccatgatctgttgttcgctgataacccgtcggcggtgctgaaggagctgactggcctcatccagaacacgattcgctccaaatggcacgaagttctggag

SEQ ID NO: 1376 - protein, 346 aa, synthetic construct
  REGION 1..346: note = variant of RNA ligase 2 from Klebsiella phage KP179
MHHHHHHGGSNMFAYYSSLENHYNAKFIEKIRGAGFLMHTVEWVAREKIHGTNFSVIITPTEIVPAKRTGPILEGESFFGHEIIMKKYKDSFVKAQNMLNAMDLVSVQIFGEFAGGGIQKGVDYGDKDFYVFDILSDSGNEKVYWDDYRVESFCTTVGLKLAPLLGRGSFAELSQYPNDFKSIVNRYNELVDTVGLEMANKHVFGPQASSETGVAEGYVLKPVYPIFFNTGTRVAIKCKNSKFSEKAKLDSPISAKVELTENDKRLLEIFSEYVTWNRVSNVLSHIGSVTAKDFGRVSGLTMKDIINEAAREGHDLLFADNPSAVLKELTGLIQNTIRSKWHEVLE

SEQ ID NO: 1377 - DNA, 1038 bp, synthetic construct
  misc_feature 1..1038: note = variant of RNA ligase 2 from Klebsiella phage KP179
  source 1..1038: mol_type = other DNA
atgcatcaccatcaccatcacggtggcagcaacatgtttgcgtattattcaagtctggaaaaccattacaatgctaagttcattgagaagatccgtggtgcaggcttcctgatgcacaccgtggaatgggtagctcgcgagaagattcatggaacgaactttagcgttatcattactccgaccgaaatcgtcccagccaaacgcacagggccgatcttggaaggcgagtcgttctttggtcacgaaattatcatgaaaaaatataaagactccttcgtgaagggtcagaacatgctgaatgccatggatcttgttagcgtgcaaatctttggcgaatttgcgggtggtggcattcagaaaggcgtcgattacggagacaaagatttctatgtgtttgacatcctgtctgatagcgggaacgagaaagtttactgggatgactatcgcgtcgaatcgttttgcaccactctcggtctgaaattagcgcctctgctgggacgtggtagtttcgctgaactgtcccagtacccaaacgatttcaaaagcgttgtgcctcgttataatgaattggttgacacggtcggcctggagatggccaataaacacgtctttggtccgcaagcgtcttctgaaactggcctggcagaaggctacgttcttaaacccgtctatccgatcttctttaataccggtacgcgcgtggcgattaaatgcaagaactccaaattttcggagaaagccaagctggactcgccaattagtgcgaaggttgaactgacggagaacgataaacgtctgctcgaaatctttagcgagtatgttacctggaatcgcgtcagtaacgtactgtcacatattggctcagtgaccgcaaaagattttgggcgtgtttcgggtctgacgatgaaagacatcattaatgaagcagcacgcgaaggccatgatctgttgttcgctgataacccgtcggcggtgctgaaggagctgactggcctcatccagaacacgattcgctccaaatggcacgaagttctggag

SEQ ID NO: 1378 - protein, 346 aa, synthetic construct
  REGION 1..346: note = variant of RNA ligase 2 from Klebsiella phage KP179
MHHHHHHGGSNMFAYYSSLENHYNAKFIEKIRGAGFLMHTVEWVAREKIHGTNFSVIITPTEIVPAKRTGPILEGESFFGHEIIMKKYKDSFVKGQNMLNAMDLVSVQIFGEFAGGGIQKGVDYGDKDFYVFDILSDSGNEKVYWDDYRVESFCTTLGLKLAPLLGRGSFAELSQYPNDFKSVVPRYNELVDTVGLEMANKHVFGPQASSETGLAEGYVLKPVYPIFFNTGTRVAIKCKNSKFSEKAKLDSPISAKVELTENDKRLLEIFSEYVTWNRVSNVLSHIGSVTAKDFGRVSGLTMKDIINEAAREGHDLLFADNPSAVLKELTGLIQNTIRSKWHEVLE

SEQ ID NO: 1379 - DNA, 1038 bp, synthetic construct
  misc_feature 1..1038: note = variant of RNA ligase 2 from Klebsiella phage KP179
  source 1..1038: mol_type = other DNA
atgcatcaccatcaccatcacggtggcagcaacatgtttgcgtattattcaagtctggaaaaccattacaatgctaagttcattgagaagatccgtggtgcaggcttcctgatgcacaccgtggaatgggtagctcgcgagaagattcatggaacgaactttagcgttatcattactccgaccgaaatcgtcccagccaaacgcacagggccgatcttggaaggcgagtcgttctttggtcacgaaattatcatgaaaaaatatatggactccttcgtgaaggtgcagaacatgctgaatgccatggatcttgttagcgtgcaaatctttggcgaatttgcgggtggtggcattcagaaaggcgtcgattacggagacaaagatttctatgtgtttgacatcctgtctgatagcgggaacgagaaagtttactgggatgactatcgcgtcgaatcgttttgcaccactctcggtctgaaattagcgcctctgctgggacgtggtagtttcgctgaactgtcccagtacccaaacgatttcaaaagcgttgtgaaccgttataatgaattggttgacacggtcggcctggagatggccaataaacacgtctttggtccgcaagcgtcttctgaaactggcgtagcagaaggctacgttcttaaacccgtctatccgatcttctttaataccggtacgcgcgtggcgattaaatgcaagaactccaaattttcggagaaagccaagctggactcgccaattagtgcgaaggttgaactgacggagaacgataaacgtctgctcgaaatctttagcgagtatgttacctggaatcgcgtcagtaacgtactgtcacatattggctcagtgaccgcaaaagattttgggcgtgtttcgggtctgacgatgaaagacatcattaatgaagcagcacgcgaaggccatgatctgttgttcgctgataacccgtcggcggtgctgaaggagctgactggcctcatccagaacacgattcgctccaaatggcacgaagttctggag

SEQ ID NO: 1380 - protein, 346 aa, synthetic construct
  REGION 1..346: note = variant of RNA ligase 2 from Klebsiella phage KP179
MHHHHHHGGSNMFAYYSSLENHYNAKFIEKIRGAGFLMHTVEWVAREKIHGTNFSVIITPTEIVPAKRTGPILEGESFFGHEIIMKKYMDSFVKVQNMLNAMDLVSVQIFGEFAGGGIQKGVDYGDKDFYVFDILSDSGNEKVYWDDYRVESFCTTLGLKLAPLLGRGSFAELSQYPNDFKSVVNRYNELVDTVGLEMANKHVFGPQASSETGVAEGYVLKPVYPIFFNTGTRVAIKCKNSKFSEKAKLDSPISAKVELTENDKRLLEIFSEYVTWNRVSNVLSHIGSVTAKDFGRVSGLTMKDIINEAAREGHDLLFADNPSAVLKELTGLIQNTIRSKWHEVLE

SEQ ID NO: 1381 - DNA, 1038 bp, synthetic construct
  misc_feature 1..1038: note = variant of RNA ligase 2 from Klebsiella phage KP179
  source 1..1038: mol_type = other DNA
atgcatcaccatcaccatcacggtggcagcaacatgtttgcgtattattcaagtctggaaaaccattacaatgctaagttcatggagaagatccgtggtgcaggcttcctgatgcacaccgtggaatgggtagctcgcgagaagattcatggaacgaactttagcgttatcattactccgaccgaaatcgtcccagccaaacgcacagggccgatcttggaaggcgagtcgttctttggtcacgaaattatcatgaaaaaatatggcgactccttcgtgaaggtgcagaacatgctgaatgccatggatcttgttagcgtgcaaatctttggcgaatttgcgggtggtggcattcagaaaggcgtcgattacggagacaaagatttctatgtgtttgacatcctgtctgatagcgggaacgagaaaatgtactgggatgactatcgcgtcgaatcgttttgcaccactctcggtctgaaattagcgcctctgctgggacgtggtagtttcgctgaactgtcccagtacccaaacgatttcaaaagcctggtgaaccgttataatgaattggttgacacggtcggcctggagatggccaataaacacgtctttggtccgcaagcgtcttctgaaactggcgtagcagaaggctacgttcttaaacccgtctatccgatcttctttaataccggtacgcgcgtggcgattaaatgcaagaactccaaattttcggagaaagccaagctggactcgccaattagtgcgaaggttgaactgacggagaacgataaacgtctgctcgaaatctttagcgagtatgttacctggaatcgcgtcagtaacgtactgtcacatattggctcagtgaccgcaaaagattttgggcgtgtttcgggtctgacgatgaaagacatcattaatgaagcagcacgcgaaggccatgatctgttgttcgctgataacccgtcggcggtgctgaaggagctgactggcctcatccagaacacgattcgctccaaatggcacgaagttctggag

SEQ ID NO: 1382 - protein, 346 aa, synthetic construct
  REGION 1..346: note = variant of RNA ligase 2 from Klebsiella phage KP179
MHHHHHHGGSNMFAYYSSLENHYNAKFMEKIRGAGFLMHTVEWVAREKIHGTNFSVIITPTEIVPAKRTGPILEGESFFGHEIIMKKYGDSFVKVQNMLNAMDLVSVQIFGEFAGGGIQKGVDYGDKDFYVFDILSDSGNEKMYWDDYRVESFCTTLGLKLAPLLGRGSFAELSQYPNDFKSLVNRYNELVDTVGLEMANKHVFGPQASSETGVAEGYVLKPVYPIFFNTGTRVAIKCKNSKFSEKAKLDSPISAKVELTENDKRLLEIFSEYVTWNRVSNVLSHIGSVTAKDFGRVSGLTMKDIINEAAREGHDLLFADNPSAVLKELTGLIQNTIRSKWHEVLE

SEQ ID NO: 1383 - DNA, 1038 bp, synthetic construct
  misc_feature 1..1038: note = variant of RNA ligase 2 from Klebsiella phage KP179
  source 1..1038: mol_type = other DNA
atgcatcaccatcaccatcacggtggcagcaacatgtttgcgtattattcaagtctggaaaaccattacaatgctaagttcatggagaagatccgtggtgcaggcttcctgatgcacaccgtggaatgggtagctcgcgagaagattcatggaacgaactttagcgttatcattactccgaccgaaatcgtcccagccaaacgcacagggccgatcttggaaggcgagtcgttctttggtcacgaaattatcatgaaaaaatataaagactccttcgtgaaggtgcagaacatgctgaatgccatggatcttgttagcgtgcaaatctttggcgaatttgcgggtggtggcattcagaaaggcgtcgattacggagacaaagatttctatgtgtttgacatcctgtctgatagcgggaacgagaaaatgtactgggatgactatcgcgtcgaatcgttttgcaccactgtgggtctgaaattagcgcctctgctgggacgtggtagtttcgctgaactgtcccagtacccaaacgatttcaaaagcattgtgaaccgttataatgaattggttgacacggtcggcctggagatggccaataaacacgtctttggtccgcaagcgtcttctgaaactggcgtggcagaaggctacgttcttaaacccgtctatccgatcttctttaataccggtacgcgcgtggcgattaaatgcaagaactccaaattttcggagaaagccaagctggactcgccaattagtgcgaaggttgaactgacggagaacgataaacgtctgctcgaaatctttagcgagtatgttacctggaatcgcgtcagtaacgtactgtcacatattggctcagtgaccgcaaaagattttgggcgtgtttcgggtctgacgatgaaagacatcattaatgaagcagcacgcgaaggccatgatctgttgttcgctgataacccgtcggcggtgctgaaggagctgactggcctcatccagaacacgattcgctccaaatggcacgaagttctggag

SEQ ID NO: 1384 - protein, 346 aa, synthetic construct
  REGION 1..346: note = variant of RNA ligase 2 from Klebsiella phage KP179
MHHHHHHGGSNMFAYYSSLENHYNAKFMEKIRGAGFLMHTVEWVAREKIHGTNFSVIITPTEIVPAKRTGPILEGESFFGHEIIMKKYKDSFVKVQNMLNAMDLVSVQIFGEFAGGGIQKGVDYGDKDFYVFDILSDSGNEKMYWDDYRVESFCTTVGLKLAPLLGRGSFAELSQYPNDFKSIVNRYNELVDTVGLEMANKHVFGPQASSETGVAEGYVLKPVYPIFFNTGTRVAIKCKNSKFSEKAKLDSPISAKVELTENDKRLLEIFSEYVTWNRVSNVLSHIGSVTAKDFGRVSGLTMKDIINEAAREGHDLLFADNPSAVLKELTGLIQNTIRSKWHEVLE

SEQ ID NO: 1385 - DNA, 1038 bp, synthetic construct
  misc_feature 1..1038: note = variant of RNA ligase 2 from Klebsiella phage KP179
  source 1..1038: mol_type = other DNA
atgcatcaccatcaccatcacggtggcagcaacatgtttgcgtattattcaagtctggaaaaccattacaatgctaagttcattgagaagatccgtggtgcaggcttcctgatgcacaccgtggaatgggtagctcgcgagaagattcatggaacgaactttagcgttatcattactccgaccgaaatcgtcccagccaaacgcacagggccgatcttggaaggcgagtcgttctttggtcacgaaattatcatgaaaaaatataaagactccttcgtgaaggtgcagaacatgctgaatgccatggatcttgttagcgtgcaaatctttggcgaatttgcgggtggtggcattcagaaaggcgtcgattacggagacaaagatttctatgtgtttgacatcctgtctgatagcgggaacgagaaagtttactgggatgactatcgcgtcgaatcgttttgcaccactctcggtctgaaattagcgcctctgctgggacgtggtagtttcgctgaactgtcccagtacccaaacgatttcgaaagcgttgtgaaccgttataatgaattggttgacacggtcggcctggagatggccaataaacacgtctttggtccgcaagcgtcttctgaaactggcgtagcagaaggctacgttcttaaacccgtctatccgatcttctttaataccggtacgcgcgtggcgattaaatgcaagaactccaaattttcggagaaagccaagctggactcgccaattagtgcgaaggttgaactgacggagaacgataaacgtctgctcgaaatctttagcgagtatgttacctggaatcgcgtcagtaacgtactgtcacatattggctcagtgaccgcaaaagattttgggcgtgtttcgggtctgacgatgaaagacatcattaatgaagcagcacgcgaaggccatgatctgttgttcgctgataacccgtcggcggtgctgaaggagctgactggcctcatccagaacacgattcgctccaaatggcacgaagttctggag

SEQ ID NO: 1386 - protein, 346 aa, synthetic construct
  REGION 1..346: note = variant of RNA ligase 2 from Klebsiella phage KP179
MHHHHHHGGSNMFAYYSSLENHYNAKFIEKIRGAGFLMHTVEWVAREKIHGTNFSVIITPTEIVPAKRTGPILEGESFFGHEIIMKKYKDSFVKVQNMLNAMDLVSVQIFGEFAGGGIQKGVDYGDKDFYVFDILSDSGNEKVYWDDYRVESFCTTLGLKLAPLLGRGSFAELSQYPNDFESVVNRYNELVDTVGLEMANKHVFGPQASSETGVAEGYVLKPVYPIFFNTGTRVAIKCKNSKFSEKAKLDSPISAKVELTENDKRLLEIFSEYVTWNRVSNVLSHIGSVTAKDFGRVSGLTMKDIINEAAREGHDLLFADNPSAVLKELTGLIQNTIRSKWHEVLE

SEQ ID NO: 1387 - DNA, 1038 bp, synthetic construct
  misc_feature 1..1038: note = variant of RNA ligase 2 from Klebsiella phage KP179
  source 1..1038: mol_type = other DNA
atgcatcaccatcaccatcacggtggcagcaacatgtttgcgtattattcaagtctggaaaaccattacaatgctaagttcattgagaagatccgtggtgcaggcttcctgatgcacaccgtggaatgggtagctcgcgagaagattcatggaacgaactttagcgttatcattactccgaccgaaatcgtcccagccaaacgcacagggccgatcttggaaggcgagtcgttctttggtcacgaaattatcatgaaaaaatataaagactccttcgtgaaggtgcagaacatgctgaatgccatggatcttgttagcgtgcaaatctttggcgaatttgcgggtggtggcattcagaaaggcgtcgattacggagacaaagatttctatgtgtttgacatcctgtctgatagcgggaacgagaaagcttactgggatgactatcgcgtcgaatcgttttgcaccactctgggtctgaaattagcgcctctgctgggacgtggtagtttcgctgaactgtcccagtacccaaacgatttcgaaagcgttgtgaaccgttataatgaattggttgacacggtcggcctggagatggccaataaacacgtctttggtccgcaagcgtcttctgaaactggcctggcagaaggctacgttcttaaacccgtctatccgatcttctttaataccggtacgcgcgtggcgattaaatgcaagaactccaaattttcggagaaagccaagctggactcgccaattagtgcgaaggttgaactgacggagaacgataaacgtctgctcgaaatctttagcgagtatgttacctggaatcgcgtcagtaacgtactgtcacatattggctcagtgaccgcaaaagattttgggcgtgtttcgggtctgacgatgaaagacatcattaatgaagcagcacgcgaaggccatgatctgttgttcgctgataacccgtcggcggtgctgaaggagctgactggcctcatccagaacacgattcgctccaaatggcacgaagttctggag

SEQ ID NO: 1388 - protein, 346 aa, synthetic construct
  REGION 1..346: note = variant of RNA ligase 2 from Klebsiella phage KP179
MHHHHHHGGSNMFAYYSSLENHYNAKFIEKIRGAGFLMHTVEWVAREKIHGTNFSVIITPTEIVPAKRTGPILEGESFFGHEIIMKKYKDSFVKVQNMLNAMDLVSVQIFGEFAGGGIQKGVDYGDKDFYVFDILSDSGNEKAYWDDYRVESFCTTLGLKLAPLLGRGSFAELSQYPNDFESVVNRYNELVDTVGLEMANKHVFGPQASSETGLAEGYVLKPVYPIFFNTGTRVAIKCKNSKFSEKAKLDSPISAKVELTENDKRLLEIFSEYVTWNRVSNVLSHIGSVTAKDFGRVSGLTMKDIINEAAREGHDLLFADNPSAVLKELTGLIQNTIRSKWHEVLE

SEQ ID NO: 1389 - DNA, 1038 bp, synthetic construct
  misc_feature 1..1038: note = variant of RNA ligase 2 from Klebsiella phage KP179
  source 1..1038: mol_type = other DNA
atgcatcaccatcaccatcacggtggcagcaacatgtttgcgtattattcaagtctggaaaaccattacaatgctaagttcattgagaagatccgtggtgcaggcttcctgatgcacaccgtggaatgggtagctcgcgagaagattcatggaacgaactttagcgttatcattactccgaccgaaatcgtcccagccaaacgcacagggccgatcttggaaggcgagtcgttctttggtcacgaaattatcatgaaaaaatataaagactccttcgtgaaggtgcagaacatgctgaatgccatggatcttgttagcgtgcaaatctttggcgaatttgcgggtggtggcattcagaaaggcgtcgattacggagacaaagatttctatgtgtttgacatcctgtctgatagcgggaacgagaaagcttactgggatgactatcgcgtcgaatcgttttgcaccactctcggtctgaaattagcgcctctgctgggacgtggtagtttcgctgaactgtcccagtacccaaacgatttcgaaagcgttgtgaaccgttataatgaattggttgacacggtcggcctggagatggccaataaacacgtctttggtccgcaagcgtcttctgaaactggcgtagcagaaggctacgttcttaaacccgtctatccgatcttctttaataccggtacgcgcgtggcgattaaatgcaagaactccaaattttcggagaaagccaagctggactcgccaattagtgcgaaggttgaactgacggagaacgataaacgtctgctcgaaatctttagcgagtatgttacctggaatcgcgtcagtaacgtactgtcacatattggctcagtgaccgcaaaagattttgggcgtgtttcgggtctgacgatgaaagacatcattaatgaagcagcacgcgaaggccatgatctgttgttcgctgataacccgtcggcggtgctgaaggagctgactggcctcatccagaacacgattcgctccaaatggcacgaagttctggag

SEQ ID NO: 1390 - protein, 346 aa, synthetic construct
  REGION 1..346: note = variant of RNA ligase 2 from Klebsiella phage KP179
MHHHHHHGGSNMFAYYSSLENHYNAKFIEKIRGAGFLMHTVEWVAREKIHGTNFSVIITPTEIVPAKRTGPILEGESFFGHEIIMKKYKDSFVKVQNMLNAMDLVSVQIFGEFAGGGIQKGVDYGDKDFYVFDILSDSGNEKAYWDDYRVESFCTTLGLKLAPLLGRGSFAELSQYPNDFESVVNRYNELVDTVGLEMANKHVFGPQASSETGVAEGYVLKPVYPIFFNTGTRVAIKCKNSKFSEKAKLDSPISAKVELTENDKRLLEIFSEYVTWNRVSNVLSHIGSVTAKDFGRVSGLTMKDIINEAAREGHDLLFADNPSAVLKELTGLIQNTIRSKWHEVLE

SEQ ID NO: 1391 - DNA, 1038 bp, synthetic construct
  misc_feature 1..1038: note = variant of RNA ligase 2 from Klebsiella phage KP179
  source 1..1038: mol_type = other DNA
atgcatcaccatcaccatcacggtggcagcaacatgtttgcgtattattcaagtctggaaaaccattacaatgctaagttcattgagaagatccgtggtgcaggcttcctgatgcacaccgtggaatgggtagctcgcgagaagattcatggaacgaactttagcgttatcattactccgaccgaaatcgtcccagccaaacgcacagggccgatcttggaaggcgagtcgttctttggtcacgaaattatcatgaaaaaatatggcgactccttcgtgaaggtgcagaacatgctgaatgccatggatcttgttagcgtgcaaatctttggcgaatttgcgggtggtggcattcagaaaggcgtcgattacggagacaaagatttctatgtgtttgacatcctgtctgatagcgggaacgagaaaatgtactgggatgactatcgcgtcgaatcgttttgcaccactctgggtctgaaattagcgcctctgctgggacgtggtagtttcgctgaactgtcccagtacccaaacgatttcaaaagcctggtgaaccgttataatgaattggttgacacggtcggcctggagatggccaataaacacgtctttggtccgcaagcgtcttctgaaactggcgtagcagaaggctacgttcttaaacccgtctatccgatcttctttaataccggtacgcgcgtggcgattaaatgcaagaactccaaattttcggagaaagccaagctggactcgccaattagtgcgaaggttgaactgacggagaacgataaacgtctgctcgaaatctttagcgagtatgttacctggaatcgcgtcagtaacgtactgtcacatattggctcagtgaccgcaaaagattttgggcgtgtttcgggtctgacgatgaaagacatcattaatgaagcagcacgcgaaggccatgatctgttgttcgctgataacccgtcggcggtgctgaaggagctgactggcctcatccagaacacgattcgctccaaatggcacgaagttctggag

SEQ ID NO: 1392 - protein, 346 aa, synthetic construct
  REGION 1..346: note = variant of RNA ligase 2 from Klebsiella phage KP179
MHHHHHHGGSNMFAYYSSLENHYNAKFIEKIRGAGFLMHTVEWVAREKIHGTNFSVIITPTEIVPAKRTGPILEGESFFGHEIIMKKYGDSFVKVQNMLNAMDLVSVQIFGEFAGGGIQKGVDYGDKDFYVFDILSDSGNEKMYWDDYRVESFCTTLGLKLAPLLGRGSFAELSQYPNDFKSLVNRYNELVDTVGLEMANKHVFGPQASSETGVAEGYVLKPVYPIFFNTGTRVAIKCKNSKFSEKAKLDSPISAKVELTENDKRLLEIFSEYVTWNRVSNVLSHIGSVTAKDFGRVSGLTMKDIINEAAREGHDLLFADNPSAVLKELTGLIQNTIRSKWHEVLE

SEQ ID NO: 1393 - DNA, 1038 bp, synthetic construct
  misc_feature 1..1038: note = variant of RNA ligase 2 from Klebsiella phage KP179
  source 1..1038: mol_type = other DNA
atgcatcaccatcaccatcacggtggcagcaacatgtttgcgtattattcaagtctggaaaaccattacaatgctaagttcatggagaagatccgtggtgcaggcttcctgatgcacaccgtggaatgggtagctcgcgagaagattcatggaacgaactttagcgttatcattactccgaccgaaatcgtcccagccaaacgcacagggccgatcttggaaggcgagtcgttctttggtcacgaaattatcatgaaaaaatataaagactccttcgtgaaggttcagaacatgctgaatgccatggatcttgttagcgtgcaaatctttggcgaatttgcgggtggtggcattcagaaaggcgtcgattacggagacaaagatttctatgtgtttgacatcctgtctgatagcgggaacgagaaaatgtactgggatgactatcgcgtcgaatcgttttgcaccactctcggtctgaaattagcgcctctgctgggacgtggtagtttcgctgaactgtcccagtacccaaacgatttcgaaagcctggtgaaccgttataatgaattggttgacacggtcggcctggagatggccaataaacacgtctttggtccgcaagcgtcttctgaaactggcgtagcagaaggctacgttcttaaacccgtctatccgatcttctttaataccggtacgcgcgtggcgattaaatgcaagaactccaaattttcggagaaagccaagctggactcgccaattagtgcgaaggttgaactgacggagaacgataaacgtctgctcgaaatctttagcgagtatgttacctggaatcgcgtcagtaacgtactgtcacatattggctcagtgaccgcaaaagattttgggcgtgtttcgggtctgacgatgaaagacatcattaatgaagcagcacgcgaaggccatgatctgttgttcgctgataacccgtcggcggtgctgaaggagctgactggcctcatccagaacacgattcgctccaaatggcacgaagttctggag

SEQ ID NO: 1394 - protein, 346 aa, synthetic construct
  REGION 1..346: note = variant of RNA ligase 2 from Klebsiella phage KP179
MHHHHHHGGSNMFAYYSSLENHYNAKFMEKIRGAGFLMHTVEWVAREKIHGTNFSVIITPTEIVPAKRTGPILEGESFFGHEIIMKKYKDSFVKVQNMLNAMDLVSVQIFGEFAGGGIQKGVDYGDKDFYVFDILSDSGNEKMYWDDYRVESFCTTLGLKLAPLLGRGSFAELSQYPNDFESLVNRYNELVDTVGLEMANKHVFGPQASSETGVAEGYVLKPVYPIFFNTGTRVAIKCKNSKFSEKAKLDSPISAKVELTENDKRLLEIFSEYVTWNRVSNVLSHIGSVTAKDFGRVSGLTMKDIINEAAREGHDLLFADNPSAVLKELTGLIQNTIRSKWHEVLE

SEQ ID NO: 1395 - DNA, 1038 bp, synthetic construct
  misc_feature 1..1038: note = variant of RNA ligase 2 from Klebsiella phage KP179
  source 1..1038: mol_type = other DNA
atgcatcaccatcaccatcacggtggcagcaacatgtttgcgtattattcaagtctggaaaaccattacaatgctaagttcattgagaagatccgtggtgcaggcttcctgatgcacaccgtggaatgggtagctcgcgagaagattcatggaacgaactttagcgttatcattactccgaccgaaatcgtcccagccaaacgcacagggccgatcttggaaggcgagtcgttctttggtcacgaaattatcatgaaaaaatataaagactccttcgtgaaggttcagaacatgctgaatgccatggatcttgttagcgtgcaaatctttggcgaatttgcgggtggtggcattcagaaaggcgtcgattacggagacaaagatttctatgtgtttgacatcctgtctgatagcgggaacgagaaaatgtactgggatgactatcgcgtcgaatcgttttgcaccactgtgggtctgaaattagcgcctctgctgggacgtggtagtttcgctgaactgtcccagtacccaaacgatttcaaaagcattgtgaaccgttataatgaattggttgacacggtcggcctggagatggccaataaacacgtctttggtccgcaagcgtcttctgaaactggcgtagcagaaggctacgttcttaaacccgtctatccgatcttctttaataccggtacgcgcgtggcgattaaatgcaagaactccaaattttcggagaaagccaagctggactcgccaattagtgcgaaggttgaactgacggagaacgataaacgtctgctcgaaatctttagcgagtatgttacctggaatcgcgtcagtaacgtactgtcacatattggctcagtgaccgcaaaagattttgggcgtgtttcgggtctgacgatgaaagacatcattaatgaagcagcacgcgaaggccatgatctgttgttcgctgataacccgtcggcggtgctgaaggagctgactggcctcatccagaacacgattcgctccaaatggcacgaagttctggag

SEQ ID NO: 1396 - protein, 346 aa, synthetic construct
  REGION 1..346: note = variant of RNA ligase 2 from Klebsiella phage KP179
MHHHHHHGGSNMFAYYSSLENHYNAKFIEKIRGAGFLMHTVEWVAREKIHGTNFSVIITPTEIVPAKRTGPILEGESFFGHEIIMKKYKDSFVKVQNMLNAMDLVSVQIFGEFAGGGIQKGVDYGDKDFYVFDILSDSGNEKMYWDDYRVESFCTTVGLKLAPLLGRGSFAELSQYPNDFKSIVNRYNELVDTVGLEMANKHVFGPQASSETGVAEGYVLKPVYPIFFNTGTRVAIKCKNSKFSEKAKLDSPISAKVELTENDKRLLEIFSEYVTWNRVSNVLSHIGSVTAKDFGRVSGLTMKDIINEAAREGHDLLFADNPSAVLKELTGLIQNTIRSKWHEVLE

SEQ ID NO: 1397 - DNA, 1038 bp, synthetic construct
  misc_feature 1..1038: note = variant of RNA ligase 2 from Klebsiella phage KP179
  source 1..1038: mol_type = other DNA
atgcatcaccatcaccatcacggtggcagcaacatgtttgcgtattattcaagtctggaaaaccattacaatgctaagttcattgagaagatccgtggtgcaggcttcctgatgcacaccgtggaatgggtagctcgcgagaagattcatggaacgaactttagcgttatcattactccgaccgaaatcgtcccagccaaacgcacagggccgatcttggaaggcgagtcgttctttggtcacgaaattatcatgaaaaaatataaagactccttcgtgaaggctcagaacatgctgaatgccatggatcttgttagcgtgcaaatctttggcgaatttgcgggtggtggcattcagaaaggcgtcgattacggagacaaagatttctatgtgtttgacatcctgtctgatagcgggaacgagaaagtttactgggatgactatcgcgtcgaatcgttttgcaccactctcggtctgaaattagcgcctctgctgggacgtggtagtttcgctgaactgtcccagtacccaaacgatttcgaaagcctggtgaaccgttataatgaattggttgacacggtcggcctggagatggccaataaacacgtctttggtccgcaagcgtcttctgaaactggcgtagcagaaggctacgttcttaaacccgtctatccgatcttctttaataccggtacgcgcgtggcgattaaatgcaagaactccaaattttcggagaaagccaagctggactcgccaattagtgcgaaggttgaactgacggagaacgataaacgtctgctcgaaatctttagcgagtatgttacctggaatcgcgtcagtaacgtactgtcacatattggctcagtgaccgcaaaagattttgggcgtgtttcgggtctgacgatgaaagacatcattaatgaagcagcacgcgaaggccatgatctgttgttcgctgataacccgtcggcggtgctgaaggagctgactggcctcatccagaacacgattcgctccaaatggcacgaagttctggag

SEQ ID NO: 1398 - protein, 346 aa, synthetic construct
  REGION 1..346: note = variant of RNA ligase 2 from Klebsiella phage KP179
MHHHHHHGGSNMFAYYSSLENHYNAKFIEKIRGAGFLMHTVEWVAREKIHGTNFSVIITPTEIVPAKRTGPILEGESFFGHEIIMKKYKDSFVKAQNMLNAMDLVSVQIFGEFAGGGIQKGVDYGDKDFYVFDILSDSGNEKVYWDDYRVESFCTTLGLKLAPLLGRGSFAELSQYPNDFESLVNRYNELVDTVGLEMANKHVFGPQASSETGVAEGYVLKPVYPIFFNTGTRVAIKCKNSKFSEKAKLDSPISAKVELTENDKRLLEIFSEYVTWNRVSNVLSHIGSVTAKDFGRVSGLTMKDIINEAAREGHDLLFADNPSAVLKELTGLIQNTIRSKWHEVLE

SEQ ID NO: 1399 - DNA, 1038 bp, synthetic construct
  misc_feature 1..1038: note = variant of RNA ligase 2 from Klebsiella phage KP179
  source 1..1038: mol_type = other DNA
atgcatcaccatcaccatcacggtggcagcaacatgtttgcgtattattcaagtctggaaaaccattacaatgctaagttcattgagaagatccgtggtgcaggcttcctgatgcacaccgtggaatgggtagctcgcgagaagattcatggaacgaactttagcgttatcattactccgaccgaaatcgtcccagccaaacgcacagggccgatcttggaaggcgagtcgttctttggtcacgaaattatcatgaaaaaatataaagactccttcgtgaaggtgcagaacatgctgaatgccatggatcttgttagcgtgcaaatctttggcgaatttgcgggtggtggcattcagaaaggcgtcgattacggagacaaagatttctatgtgtttgacatcctgtctgatagcgggaacgagaaagtttactgggatgactatcgcgtcgaatcgttttgcaccactgtgggtctgaaattagcgcctctgctgggacgtggtagtttcgctgaactgtcccagtacccaaacgatttcaaaagcattgtgaaccgttataatgaattggttgacacggtcggcctggagatggccaataaacacgtctttggtccgcaagcgtcttctgaaactggcgtagcagaaggctacgttcttaaacccgtctatccgatcttctttaataccggtacgcgcgtggcgattaaatgcaagaactccaaattttcggagaaagccaagctggactcgccaattagtgcgaaggttgaactgacggagaacgataaacgtctgctcgaaatctttagcgagtatgttacctggaatcgcgtcagtaacgtactgtcacatattggctcagtgaccgcaaaagattttgggcgtgtttcgggtctgacgatgaaagacatcattaatgaagcagcacgcgaaggccatgatctgttgttcgctgataacccgtcggcggtgctgaaggagctgactggcctcatccagaacacgattcgctccaaatggcacgaagttctggag

SEQ ID NO: 1400 - protein, 346 aa, synthetic construct
  REGION 1..346: note = variant of RNA ligase 2 from Klebsiella phage KP179
MHHHHHHGGSNMFAYYSSLENHYNAKFIEKIRGAGFLMHTVEWVAREKIHGTNFSVIITPTEIVPAKRTGPILEGESFFGHEIIMKKYKDSFVKVQNMLNAMDLVSVQIFGEFAGGGIQKGVDYGDKDFYVFDILSDSGNEKVYWDDYRVESFCTTVGLKLAPLLGRGSFAELSQYPNDFKSIVNRYNELVDTVGLEMANKHVFGPQASSETGVAEGYVLKPVYPIFFNTGTRVAIKCKNSKFSEKAKLDSPISAKVELTENDKRLLEIFSEYVTWNRVSNVLSHIGSVTAKDFGRVSGLTMKDIINEAAREGHDLLFADNPSAVLKELTGLIQNTIRSKWHEVLE

SEQ ID NO: 1401 - DNA, 1038 bp, synthetic construct
  misc_feature 1..1038: note = variant of RNA ligase 2 from Klebsiella phage KP179
  source 1..1038: mol_type = other DNA
atgcatcaccatcaccatcacggtggcagcaacatgtttgcgtattattcaagtctggaaaaccattacaatgctaagttcattgagaagatccgtggtgcaggcttcctgatgcacaccgtggaatgggtagctcgcgagaagattcatggaacgaactttagcgttatcattactccgaccgaaatcgtcccagccaaacgcacagggccgatcttggaaggcgagtcgttctttggtcacgaaattatcatgaaaaaatataaagactccttcgtgaaggtgcagaacatgctgaatgccatggatcttgttagcgtgcaaatctttggcgaatttgcgggtggtggcattcagaaaggcgtcgattacggagacaaagatttctatgtgtttgacatcctgtctgatagcgggaacgagaaagcttactgggatgactatcgcgtcgaatcgttttgcaccactctcggtctgaaattagcgcctctgctgggacgtggtagtttcgctgaactgtcccagtacccaaacgatttcaaaagcctggtgaaccgttataatgaattggttgacacggtcggcctggagatggccaataaacacgtctttggtccgcaagcgtcttctgaaactggcgtagcagaaggctacgttcttaaacccgtctatccgatcttctttaataccggtacgcgcgtggcgattaaatgcaagaactccaaattttcggagaaagccaagctggactcgccaattagtgcgaaggttgaactgacggagaacgataaacgtctgctcgaaatctttagcgagtatgttacctggaatcgcgtcagtaacgtactgtcacatattggctcagtgaccgcaaaagattttgggcgtgtttcgggtctgacgatgaaagacatcattaatgaagcagcacgcgaaggccatgatctgttgttcgctgataacccgtcggcggtgctgaaggagctgactggcctcatccagaacacgattcgctccaaatggcacgaagttctggag

SEQ ID NO: 1402 - protein, 346 aa, synthetic construct
  REGION 1..346: note = variant of RNA ligase 2 from Klebsiella phage KP179
MHHHHHHGGSNMFAYYSSLENHYNAKFIEKIRGAGFLMHTVEWVAREKIHGTNFSVIITPTEIVPAKRTGPILEGESFFGHEIIMKKYKDSFVKVQNMLNAMDLVSVQIFGEFAGGGIQKGVDYGDKDFYVFDILSDSGNEKAYWDDYRVESFCTTLGLKLAPLLGRGSFAELSQYPNDFKSLVNRYNELVDTVGLEMANKHVFGPQASSETGVAEGYVLKPVYPIFFNTGTRVAIKCKNSKFSEKAKLDSPISAKVELTENDKRLLEIFSEYVTWNRVSNVLSHIGSVTAKDFGRVSGLTMKDIINEAAREGHDLLFADNPSAVLKELTGLIQNTIRSKWHEVLE

SEQ ID NO: 1403 - DNA, 1038 bp, synthetic construct
  misc_feature 1..1038: note = variant of RNA ligase 2 from Klebsiella phage KP179
  source 1..1038: mol_type = other DNA
atgcatcaccatcaccatcacggtggcagcaacatgtttgcgtattattcaagtctggaaaaccattacaatgctaagttcattgagaagatccgtggtgcaggcttcctgatgcacaccgtggaatgggtagctcgcgagaagattcatggaacgaactttagcgttatcattactccgaccgaaatcgtcccagccaaacgcacagggccgatcttggaaggcgagtcgttctttggtcacgaaattatcatgaaaaaatataaagactccttcgtgaaggtgcagaacatgctgaatgccatggatcttgttagcgtgcaaatctttggcgaatttgcgggtggtggcattcagaaaggcgtcgattacggagacaaagatttctatgtgtttgacatcctgtctgatagcgggaacgagaaagcttactgggatgactatcgcgtcgaatcgttttgcaccactgtgggtctgaaattagcgcctctgctgggacgtggtagtttcgctgaactgtcccagtacccaaacgatttcaaaagcattgtgaaccgttataatgaattggttgacacggtcggcctggagatggccaataaacacgtctttggtccgcaagcgtcttctgaaactggcgtagcagaaggctacgttcttaaacccgtctatccgatcttctttaataccggtacgcgcgtggcgattaaatgcaagaactccaaattttcggagaaagccaagctggactcgccaattagtgcgaaggttgaactgacggagaacgataaacgtctgctcgaaatctttagcgagtatgttacctggaatcgcgtcagtaacgtactgtcacatattggctcagtgaccgcaaaagattttgggcgtgtttcgggtctgacgatgaaagacatcattaatgaagcagcacgcgaaggccatgatctgttgttcgctgataacccgtcggcggtgctgaaggagctgactggcctcatccagaacacgattcgctccaaatggcacgaagttctggag

SEQ ID NO: 1404 - protein, 346 aa, synthetic construct
  REGION 1..346: note = variant of RNA ligase 2 from Klebsiella phage KP179
MHHHHHHGGSNMFAYYSSLENHYNAKFIEKIRGAGFLMHTVEWVAREKIHGTNFSVIITPTEIVPAKRTGPILEGESFFGHEIIMKKYKDSFVKVQNMLNAMDLVSVQIFGEFAGGGIQKGVDYGDKDFYVFDILSDSGNEKAYWDDYRVESFCTTVGLKLAPLLGRGSFAELSQYPNDFKSIVNRYNELVDTVGLEMANKHVFGPQASSETGVAEGYVLKPVYPIFFNTGTRVAIKCKNSKFSEKAKLDSPISAKVELTENDKRLLEIFSEYVTWNRVSNVLSHIGSVTAKDFGRVSGLTMKDIINEAAREGHDLLFADNPSAVLKELTGLIQNTIRSKWHEVLE

SEQ ID NO: 1405 - DNA, 1038 bp, synthetic construct
  misc_feature 1..1038: note = variant of RNA ligase 2 from Klebsiella phage KP179
  source 1..1038: mol_type = other DNA
atgcatcaccatcaccatcacggtggcagcaacatgtttgcgtattattcaagtctggaaaaccattacaatgctaagttcattgagaagatccgtggtgcaggcttcctgatgcacaccgtggaatgggtagctcgcgagaagattcatggaacgaactttagcgttatcattactccgaccgaaatcgtcccagccaaacgcacagggccgatcttggaaggcgagtcgttctttggtcacgaaattatcatgaaaaaatatggcgactccttcgtgaaggtgcagaacatgctgaatgccatggatcttgttagcgtgcaaatctttggcgaatttgcgggtggtggcattcagaaaggcgtcgattacggagacaaagatttctatgtgtttgacatcctgtctgatagcgggaacgagaaagcttactgggatgactatcgcgtcgaatcgttttgcaccactgtgggtctgaaattagcgcctctgctgggacgtggtagtttcgctgaactgtcccagtacccaaacgatttcaaaagcctggtgaaccgttataatgaattggttgacacggtcggcctggagatggccaataaacacgtctttggtccgcaagcgtcttctgaaactggcgtagcagaaggctacgttcttaaacccgtctatccgatcttctttaataccggtacgcgcgtggcgattaaatgcaagaactccaaattttcggagaaagccaagctggactcgccaattagtgcgaaggttgaactgacggagaacgataaacgtctgctcgaaatctttagcgagtatgttacctggaatcgcgtcagtaacgtactgtcacatattggctcagtgaccgcaaaagattttgggcgtgtttcgggtctgacgatgaaagacatcattaatgaagcagcacgcgaaggccatgatctgttgttcgctgataacccgtcggcggtgctgaaggagctgactggcctcatccagaacacgattcgctccaaatggcacgaagttctggag

SEQ ID NO: 1406 - protein, 346 aa, synthetic construct
  REGION 1..346: note = variant of RNA ligase 2 from Klebsiella phage KP179
MHHHHHHGGSNMFAYYSSLENHYNAKFIEKIRGAGFLMHTVEWVAREKIHGTNFSVIITPTEIVPAKRTGPILEGESFFGHEIIMKKYGDSFVKVQNMLNAMDLVSVQIFGEFAGGGIQKGVDYGDKDFYVFDILSDSGNEKAYWDDYRVESFCTTVGLKLAPLLGRGSFAELSQYPNDFKSLVNRYNELVDTVGLEMANKHVFGPQASSETGVAEGYVLKPVYPIFFNTGTRVAIKCKNSKFSEKAKLDSPISAKVELTENDKRLLEIFSEYVTWNRVSNVLSHIGSVTAKDFGRVSGLTMKDIINEAAREGHDLLFADNPSAVLKELTGLIQNTIRSKWHEVLE

SEQ ID NO: 1407 - DNA, 1038 bp, synthetic construct
  misc_feature 1..1038: note = variant of RNA ligase 2 from Klebsiella phage KP179
  source 1..1038: mol_type = other DNA
atgcatcaccatcaccatcacggtggcagcaacatgtttgcgtattattcaagtctggaaaaccattacaatgctaagttcattgagaagatccgtggtgcaggcttcctgatgcacaccgtggaatgggtagctcgcgagaagattcatggaacgaactttagcgttatcattactccgaccgaaatcgtcccagccaaacgcacagggccgatcttggaaggcgagtcgttctttggtcacgaaattatcatgaaaaaatatatggactccttcgtgaaggctcagaacatgctgaatgccatggatcttgttagcgtgcaaatctttggcgaatttgcgggtggtggcattcagaaaggcgtcgattacggagacaaagatttctatgtgtttgacatcctgtctgatagcgggaacgagaaagtttactgggatgactatcgcgtcgaatcgttttgcaccactgtgggtctgaaattagcgcctctgctgggacgtggtagtttcgctgaactgtcccagtacccaaacgatttcaaaagcattgtgaaccgttataatgaattggttgacacggtcggcctggagatggccaataaacacgtctttggtccgcaagcgtcttctgaaactggcgtagcagaaggctacgttcttaaacccgtctatccgatcttctttaataccggtacgcgcgtggcgattaaatgcaagaactccaaattttcggagaaagccaagctggactcgccaattagtgcgaaggttgaactgacggagaacgataaacgtctgctcgaaatctttagcgagtatgttacctggaatcgcgtcagtaacgtactgtcacatattggctcagtgaccgcaaaagattttgggcgtgtttcgggtctgacgatgaaagacatcattaatgaagcagcacgcgaaggccatgatctgttgttcgctgataacccgtcggcggtgctgaaggagctgactggcctcatccagaacacgattcgctccaaatggcacgaagttctggag

SEQ ID NO: 1408 - protein, 346 aa, synthetic construct
  REGION 1..346: note = variant of RNA ligase 2 from Klebsiella phage KP179
MHHHHHHGGSNMFAYYSSLENHYNAKFIEKIRGAGFLMHTVEWVAREKIHGTNFSVIITPTEIVPAKRTGPILEGESFFGHEIIMKKYMDSFVKAQNMLNAMDLVSVQIFGEFAGGGIQKGVDYGDKDFYVFDILSDSGNEKVYWDDYRVESFCTTVGLKLAPLLGRGSFAELSQYPNDFKSIVNRYNELVDTVGLEMANKHVFGPQASSETGVAEGYVLKPVYPIFFNTGTRVAIKCKNSKFSEKAKLDSPISAKVELTENDKRLLEIFSEYVTWNRVSNVLSHIGSVTAKDFGRVSGLTMKDIINEAAREGHDLLFADNPSAVLKELTGLIQNTIRSKWHEVLE

SEQ ID NO: 1409 - DNA, 1038 bp, synthetic construct
  misc_feature 1..1038: note = variant of RNA ligase 2 from Klebsiella phage KP179
  source 1..1038: mol_type = other DNA
atgcatcaccatcaccatcacggtggcagcaacatgtttgcgtattattcaagtctggaaaaccattacaatgctaagttcattgagaagatccgtggtgcaggcttcctgatgcacaccgtggaatgggtagctcgcgagaagattcatggaacgaactttagcgttatcattactccgaccgaaatcgtcccagccaaacgcacagggccgatcttggaaggcgagtcgttctttggtcacgaaattatcatgaaaaaatatatggactccttcgtgaaggtgcagaacatgctgaatgccatggatcttgttagcgtgcaaatctttggcgaatttgcgggtggtggcattcagaaaggcgtcgattacggagacaaagatttctatgtgtttgacatcctgtctgatagcgggaacgagaaagtttactgggatgactatcgcgtcgaatcgttttgcaccactgtgggtctgaaattagcgcctctgctgggacgtggtagtttcgctgaactgtcccagtacccaaacgatttcaaaagcattgtgaaccgttataatgaattggttgacacggtcggcctggagatggccaataaacacgtctttggtccgcaagcgtcttctgaaactggcgtagcagaaggctacgttcttaaacccgtctatccgatcttctttaataccggtacgcgcgtggcgattaaatgcaagaactccaaattttcggagaaagccaagctggactcgccaattagtgcgaaggttgaactgacggagaacgataaacgtctgctcgaaatctttagcgagtatgttacctggaatcgcgtcagtaacgtactgtcacatattggctcagtgaccgcaaaagattttgggcgtgtttcgggtctgacgatgaaagacatcattaatgaagcagcacgcgaaggccatgatctgttgttcgctgataacccgtcggcggtgctgaaggagctgactggcctcatccagaacacgattcgctccaaatggcacgaagttctggag

SEQ ID NO: 1410 - protein, 346 aa, synthetic construct
  REGION 1..346: note = variant of RNA ligase 2 from Klebsiella phage KP179
MHHHHHHGGSNMFAYYSSLENHYNAKFIEKIRGAGFLMHTVEWVAREKIHGTNFSVIITPTEIVPAKRTGPILEGESFFGHEIIMKKYMDSFVKVQNMLNAMDLVSVQIFGEFAGGGIQKGVDYGDKDFYVFDILSDSGNEKVYWDDYRVESFCTTVGLKLAPLLGRGSFAELSQYPNDFKSIVNRYNELVDTVGLEMANKHVFGPQASSETGVAEGYVLKPVYPIFFNTGTRVAIKCKNSKFSEKAKLDSPISAKVELTENDKRLLEIFSEYVTWNRVSNVLSHIGSVTAKDFGRVSGLTMKDIINEAAREGHDLLFADNPSAVLKELTGLIQNTIRSKWHEVLE

SEQ ID NO: 1411 - DNA, 1038 bp, synthetic construct
  misc_feature 1..1038: note = variant of RNA ligase 2 from Klebsiella phage KP179
  source 1..1038: mol_type = other DNA
atgcatcaccatcaccatcacggtggcagcaacatgtttgcgtattattcaagtctggaaaaccattacaatgctaagttcattgagaagatccgtggtgcaggcttcctgatgcacaccgtggaatgggtagctcgcgagaagattcatggaacgaactttagcgttatcattactccgaccgaaatcgtcccagccaaacgcacagggccgatcttggaaggcgagtcgttctttggtcacgaaattatcatgaaaaaatatggcgactccttcgtgaaggctcagaacatgctgaatgccatggatcttgttagcgtgcaaatctttggcgaatttgcgggtggtggcattcagaaaggcgtcgattacggagacaaagatttctatgtgtttgacatcctgtctgatagcgggaacgagaaagcttactgggatgactatcgcgtcgaatcgttttgcaccactctcggtctgaaattagcgcctctgctgggacgtggtagtttcgctgaactgtcccagtacccaaacgatttcgaaagcattgtgaaccgttataatgaattggttgacacggtcggcctggagatggccaataaacacgtctttggtccgcaagcgtcttctgaaactggcgtggcagaaggctacgttcttaaacccgtctatccgatcttctttaataccggtacgcgcgtggcgattaaatgcaagaactccaaattttcggagaaagccaagctggactcgccaattagtgcgaaggttgaactgacggagaacgataaacgtctgctcgaaatctttagcgagtatgttacctggaatcgcgtcagtaacgtactgtcacatattggctcagtgaccgcaaaagattttgggcgtgtttcgggtctgacgatgaaagacatcattaatgaagcagcacgcgaaggccatgatctgttgttcgctgataacccgtcggcggtgctgaaggagctgactggcctcatccagaacacgattcgctccaaatggcacgaagttctggag

SEQ ID NO: 1412 - protein, 346 aa, synthetic construct
  REGION 1..346: note = variant of RNA ligase 2 from Klebsiella phage KP179
MHHHHHHGGSNMFAYYSSLENHYNAKFIEKIRGAGFLMHTVEWVAREKIHGTNFSVIITPTEIVPAKRTGPILEGESFFGHEIIMKKYGDSFVKAQNMLNAMDLVSVQIFGEFAGGGIQKGVDYGDKDFYVFDILSDSGNEKAYWDDYRVESFCTTLGLKLAPLLGRGSFAELSQYPNDFESIVNRYNELVDTVGLEMANKHVFGPQASSETGVAEGYVLKPVYPIFFNTGTRVAIKCKNSKFSEKAKLDSPISAKVELTENDKRLLEIFSEYVTWNRVSNVLSHIGSVTAKDFGRVSGLTMKDIINEAAREGHDLLFADNPSAVLKELTGLIQNTIRSKWHEVLE

SEQ ID NO: 1413 - DNA, 1038 bp, synthetic construct
  misc_feature 1..1038: note = variant of RNA ligase 2 from Klebsiella phage KP179
  source 1..1038: mol_type = other DNA
atgcatcaccatcaccatcacggtggcagcaacatgtttgcgtattattcaagtctggaaaaccattacaatgctaagttcattgagaagatccgtggtgcaggcttcctgatgcacaccgtggaatgggtagctcgcgagaagattcatggaacgaactttagcgttatcattactccgaccgaaatcgtcccagccaaacgcacagggccgatcttggaaggcgagtcgttctttggtcacgaaattatcatgaaaaaatataaagactccttcgtgaaggctcagaacatgctgaatgccatggatcttgttagcgtgcaaatctttggcgaatttgcgggtggtggcattcagaaaggcgtcgattacggagacaaagatttctatgtgtttgacatcctgtctgatagcgggaacgagaaagcttactgggatgactatcgcgtcgaatcgttttgcaccactctcggtctgaaattagcgcctctgctgggacgtggtagtttcgctgaactgtcccagtacccaaacgatttcaaaagcattgtgaaccgttataatgaattggttgacacggtcggcctggagatggccaataaacacgtctttggtccgcaagcgtcttctgaaactggcgtagcagaaggctacgttcttaaacccgtctatccgatcttctttaataccggtacgcgcgtggcgattaaatgcaagaactccaaattttcggagaaagccaagctggactcgccaattagtgcgaaggttgaactgacggagaacgataaacgtctgctcgaaatctttagcgagtatgttacctggaatcgcgtcagtaacgtactgtcacatattggctcagtgaccgcaaaagattttgggcgtgtttcgggtctgacgatgaaagacatcattaatgaagcagcacgcgaaggccatgatctgttgttcgctgataacccgtcggcggtgctgaaggagctgactggcctcatccagaacacgattcgctccaaatggcacgaagttctggag

SEQ ID NO: 1414 - protein, 346 aa, synthetic construct
  REGION 1..346: note = variant of RNA ligase 2 from Klebsiella phage KP179
MHHHHHHGGSNMFAYYSSLENHYNAKFIEKIRGAGFLMHTVEWVAREKIHGTNFSVIITPTEIVPAKRTGPILEGESFFGHEIIMKKYKDSFVKAQNMLNAMDLVSVQIFGEFAGGGIQKGVDYGDKDFYVFDILSDSGNEKAYWDDYRVESFCTTLGLKLAPLLGRGSFAELSQYPNDFKSIVNRYNELVDTVGLEMANKHVFGPQASSETGVAEGYVLKPVYPIFFNTGTRVAIKCKNSKFSEKAKLDSPISAKVELTENDKRLLEIFSEYVTWNRVSNVLSHIGSVTAKDFGRVSGLTMKDIINEAAREGHDLLFADNPSAVLKELTGLIQNTIRSKWHEVLE

SEQ ID NO: 1415 - DNA, 1038 bp, synthetic construct
  misc_feature 1..1038: note = variant of RNA ligase 2 from Klebsiella phage KP179
  source 1..1038: mol_type = other DNA
atgcatcaccatcaccatcacggtggcagcaacatgtttgcgtattattcaagtctggaaaaccattacaatgctaagttcattgagaagatccgtggtgcaggcttcctgatgcacaccgtggaatgggtagctcgcgagaagattcatggaacgaactttagcgttatcattactccgaccgaaatcgtcccagccaaacgcacagggccgatcttggaaggcgagtcgttctttggtcacgaaattatcatgaaaaaatatatggactccttcgtgaaggtgcagaacatgctgaatgccatggatcttgttagcgtgcaaatctttggcgaatttgcgggtggtggcattcagaaaggcgtcgattacggagacaaagatttctatgtgtttgacatcctgtctgatagcgggaacgagaaagtttactgggatgactatcgcgtcgaatcgttttgcaccactgtgggtctgaaattagcgcctctgctgggacgtggtagtttcgctgaactgtcccagtacccaaacgatttcaaaagcctggtgaaccgttataatgaattggttgacacggtcggcctggagatggccaataaacacgtctttggtccgcaagcgtcttctgaaactggcctggcagaaggctacgttcttaaacccgtctatccgatcttctttaataccggtacgcgcgtggcgattaaatgcaagaactccaaattttcggagaaagccaagctggactcgccaattagtgcgaaggttgaactgacggagaacgataaacgtctgctcgaaatctttagcgagtatgttacctggaatcgcgtcagtaacgtactgtcacatattggctcagtgaccgcaaaagattttgggcgtgtttcgggtctgacgatgaaagacatcattaatgaagcagcacgcgaaggccatgatctgttgttcgctgataacccgtcggcggtgctgaaggagctgactggcctcatccagaacacgattcgctccaaatggcacgaagttctggag

SEQ ID NO: 1416 - protein, 346 aa, synthetic construct
  REGION 1..346: note = variant of RNA ligase 2 from Klebsiella phage KP179
MHHHHHHGGSNMFAYYSSLENHYNAKFIEKIRGAGFLMHTVEWVAREKIHGTNFSVIITPTEIVPAKRTGPILEGESFFGHEIIMKKYMDSFVKVQNMLNAMDLVSVQIFGEFAGGGIQKGVDYGDKDFYVFDILSDSGNEKVYWDDYRVESFCTTVGLKLAPLLGRGSFAELSQYPNDFKSLVNRYNELVDTVGLEMANKHVFGPQASSETGLAEGYVLKPVYPIFFNTGTRVAIKCKNSKFSEKAKLDSPISAKVELTENDKRLLEIFSEYVTWNRVSNVLSHIGSVTAKDFGRVSGLTMKDIINEAAREGHDLLFADNPSAVLKELTGLIQNTIRSKWHEVLE

SEQ ID NO: 1417 - DNA, 1038 bp, synthetic construct
  misc_feature 1..1038: note = variant of RNA ligase 2 from Klebsiella phage KP179
  source 1..1038: mol_type = other DNA
atgcatcaccatcaccatcacggtggcagcaacatgtttgcgtattattcaagtctggaaaaccattacaatgctaagttcattgagaagatccgtggtgcaggcttcctgatgcacaccgtggaatgggtagctcgcgagaagattcatggaacgaactttagcgttatcattactccgaccgaaatcgtcccagccaaacgcacagggccgatcttggaaggcgagtcgttctttggtcacgaaattatcatgaaaaaatataaagactccttcgtgaaggtgcagaacatgctgaatgccatggatcttgttagcgtgcaaatctttggcgaatttgcgggtggtggcattcagaaaggcgtcgattacggagacaaagatttctatgtgtttgacatcctgtctgatagcgggaacgagaaaatgtactgggatgactatcgcgtcgaatcgttttgcaccactctcggtctgaaattagcgcctctgctgggacgtggtagtttcgctgaactgtcccagtacccaaacgatttcaaaagcattgtgaaccgttataatgaattggttgacacggtcggcctggagatggccaataaacacgtctttggtccgcaagcgtcttctgaaactggcctggcagaaggctacgttcttaaacccgtctatccgatcttctttaataccggtacgcgcgtggcgattaaatgcaagaactccaaattttcggagaaagccaagctggactcgccaattagtgcgaaggttgaactgacggagaacgataaacgtctgctcgaaatctttagcgagtatgttacctggaatcgcgtcagtaacgtactgtcacatattggctcagtgaccgcaaaagattttgggcgtgtttcgggtctgacgatgaaagacatcattaatgaagcagcacgcgaaggccatgatctgttgttcgctgataacccgtcggcggtgctgaaggagctgactggcctcatccagaacacgattcgctccaaatggcacgaagttctggag

SEQ ID NO: 1418 - protein, 346 aa, synthetic construct
  REGION 1..346: note = variant of RNA ligase 2 from Klebsiella phage KP179
MHHHHHHGGSNMFAYYSSLENHYNAKFIEKIRGAGFLMHTVEWVAREKIHGTNFSVIITPTEIVPAKRTGPILEGESFFGHEIIMKKYKDSFVKVQNMLNAMDLVSVQIFGEFAGGGIQKGVDYGDKDFYVFDILSDSGNEKMYWDDYRVESFCTTLGLKLAPLLGRGSFAELSQYPNDFKSIVNRYNELVDTVGLEMANKHVFGPQASSETGLAEGYVLKPVYPIFFNTGTRVAIKCKNSKFSEKAKLDSPISAKVELTENDKRLLEIFSEYVTWNRVSNVLSHIGSVTAKDFGRVSGLTMKDIINEAAREGHDLLFADNPSAVLKELTGLIQNTIRSKWHEVLE

SEQ ID NO: 1419 - DNA, 1038 bp, synthetic construct
  misc_feature 1..1038: note = variant of RNA ligase 2 from Klebsiella phage KP179
  source 1..1038: mol_type = other DNA
atgcatcaccatcaccatcacggtggcagcaacatgtttgcgtattattcaagtctggaaaaccattacaatgctaagttcattgagaagatccgtggtgcaggcttcctgatgcacaccgtggaatgggtagctcgcgagaagattcatggaacgaactttagcgttatcattactccgaccgaaatcgtcccagccaaacgcacagggccgatcttggaaggcgagtcgttctttggtcacgaaattatcatgaaaaaatataaggactccttcgtgaaggtgcagaacatgctgaatgccatggatcttgttagcgtgcaaatctttggcgaatttgcgggtggtggcattcagaaaggcgtcgattacggagacaaagatttctatgtgtttgacatcctgtctgatagcgggaacgagaaaatgtactgggatgactatcgcgtcgaatcgttttgcaccactctcggtctgaaattagcgcctctgctgggacgtggtagtttcgctgaactgtcccagtacccaaacgatttcgaaagcgttgtgcctcgttataatgaattggttgacacggtcggcctggagatggccaataaacacgtctttggtccgcaagcgtcttctgaaactggcgtggcagaaggctacgttcttaaacccgtctatccgatcttctttaataccggtacgcgcgtggcgattaaatgcaagaactccaaattttcggagaaagccaagctggactcgccaattagtgcgaaggttgaactgacggagaacgataaacgtctgctcgaaatctttagcgagtatgttacctggaatcgcgtcagtaacgtactgtcacatattggctcagtgaccgcaaaagattttgggcgtgtttcgggtctgacgatgaaagacatcattaatgaagcagcacgcgaaggccatgatctgttgttcgctgataacccgtcggcggtgctgaaggagctgactggcctcatccagaacacgattcgctccaaatggcacgaagttctggag

SEQ ID NO: 1420 - protein, 346 aa, synthetic construct
  REGION 1..346: note = variant of RNA ligase 2 from Klebsiella phage KP179
MHHHHHHGGSNMFAYYSSLENHYNAKFIEKIRGAGFLMHTVEWVAREKIHGTNFSVIITPTEIVPAKRTGPILEGESFFGHEIIMKKYKDSFVKVQNMLNAMDLVSVQIFGEFAGGGIQKGVDYGDKDFYVFDILSDSGNEKMYWDDYRVESFCTTLGLKLAPLLGRGSFAELSQYPNDFESVVPRYNELVDTVGLEMANKHVFGPQASSETGVAEGYVLKPVYPIFFNTGTRVAIKCKNSKFSEKAKLDSPISAKVELTENDKRLLEIFSEYVTWNRVSNVLSHIGSVTAKDFGRVSGLTMKDIINEAAREGHDLLFADNPSAVLKELTGLIQNTIRSKWHEVLE

SEQ ID NO: 1421 - DNA, 1038 bp, synthetic construct
  misc_feature 1..1038: note = variant of RNA ligase 2 from Klebsiella phage KP179
  source 1..1038: mol_type = other DNA
atgcatcaccatcaccatcacggtggcagcaacatgtttgcgtattattcaagtctggaaaaccattacaatgctaagttcatggagaagatccgtggtgcaggcttcctgatgcacaccgtggaatgggtagctcgcgagaagattcatggaacgaactttagcgttatcattactccgaccgaaatcgtcccagccaaacgcacagggccgatcttggaaggcgagtcgttctttggtcacgaaattatcatgaaaaaatataaagactccttcgtgaaggctcagaacatgctgaatgccatggatcttgttagcgtgcaaatctttggcgaatttgcgggtggtggcattcagaaaggcgtcgattacggagacaaagatttctatgtgtttgacatcctgtctgatagcgggaacgagaaagcttactgggatgactatcgcgtcgaatcgttttgcaccactctcggtctgaaattagcgcctctgctgggacgtggtagtttcgctgaactgtcccagtacccaaacgatttcaaaagcattgtgaaccgttataatgaattggttgacacggtcggcctggagatggccaataaacacgtctttggtccgcaagcgtcttctgaaactggcgtagcagaaggctacgttcttaaacccgtctatccgatcttctttaataccggtacgcgcgtggcgattaaatgcaagaactccaaattttcggagaaagccaagctggactcgccaattagtgcgaaggttgaactgacggagaacgataaacgtctgctcgaaatctttagcgagtatgttacctggaatcgcgtcagtaacgtactgtcacatattggctcagtgaccgcaaaagattttgggcgtgtttcgggtctgacgatgaaagacatcattaatgaagcagcacgcgaaggccatgatctgttgttcgctgataacccgtcggcggtgctgaaggagctgactggcctcatccagaacacgattcgctccaaatggcacgaagttctggag

SEQ ID NO: 1422 - protein, 346 aa, synthetic construct
  REGION 1..346: note = variant of RNA ligase 2 from Klebsiella phage KP179
MHHHHHHGGSNMFAYYSSLENHYNAKFMEKIRGAGFLMHTVEWVAREKIHGTNFSVIITPTEIVPAKRTGPILEGESFFGHEIIMKKYKDSFVKAQNMLNAMDLVSVQIFGEFAGGGIQKGVDYGDKDFYVFDILSDSGNEKAYWDDYRVESFCTTLGLKLAPLLGRGSFAELSQYPNDFKSIVNRYNELVDTVGLEMANKHVFGPQASSETGVAEGYVLKPVYPIFFNTGTRVAIKCKNSKFSEKAKLDSPISAKVELTENDKRLLEIFSEYVTWNRVSNVLSHIGSVTAKDFGRVSGLTMKDIINEAAREGHDLLFADNPSAVLKELTGLIQNTIRSKWHEVLE

SEQ ID NO: 1423 - DNA, 1038 bp, synthetic construct
  misc_feature 1..1038: note = variant of RNA ligase 2 from Klebsiella phage KP179
  source 1..1038: mol_type = other DNA
atgcatcaccatcaccatcacggtggcagcaacatgtttgcgtattattcaagtctggaaaaccattacaatgctaagttcattgagaagatccgtggtgcaggcttcctgatgcacaccgtggaatgggtagctcgcgagaagattcatggaacgaactttagcgttatcattactccgaccgaaatcgtcccagccaaacgcacagggccgatcttggaaggcgagtcgttctttggtcacgaaattatcatgaaaaaatataaagactccttcgtgaaggtgcagaacatgctgaatgccatggatcttgttagcgtgcaaatctttggcgaatttgcgggtggtggcattcagaaaggcgtcgattacggagacaaagatttctatgtgtttgacatcctgtctgatagcgggaacgagaaaatgtactgggatgactatcgcgtcgaatcgttttgcaccactctcggtctgaaattagcgcctctgctgggacgtggtagtttcgctgaactgtcccagtacccaaacgatttcaaaagcctggtgaaccgttataatgaattggttgacacggtcggcctggagatggccaataaacacgtctttggtccgcaagcgtcttctgaaactggcctggcagaaggctacgttcttaaacccgtctatccgatcttctttaataccggtacgcgcgtggcgattaaatgcaagaactccaaattttcggagaaagccaagctggactcgccaattagtgcgaaggttgaactgacggagaacgataaacgtctgctcgaaatctttagcgagtatgttacctggaatcgcgtcagtaacgtactgtcacatattggctcagtgaccgcaaaagattttgggcgtgtttcgggtctgacgatgaaagacatcattaatgaagcagcacgcgaaggccatgatctgttgttcgctgataacccgtcggcggtgctgaaggagctgactggcctcatccagaacacgattcgctccaaatggcacgaagttctggag

SEQ ID NO: 1424 - protein, 346 aa, synthetic construct
  REGION 1..346: note = variant of RNA ligase 2 from Klebsiella phage KP179
MHHHHHHGGSNMFAYYSSLENHYNAKFIEKIRGAGFLMHTVEWVAREKIHGTNFSVIITPTEIVPAKRTGPILEGESFFGHEIIMKKYKDSFVKVQNMLNAMDLVSVQIFGEFAGGGIQKGVDYGDKDFYVFDILSDSGNEKMYWDDYRVESFCTTLGLKLAPLLGRGSFAELSQYPNDFKSLVNRYNELVDTVGLEMANKHVFGPQASSETGLAEGYVLKPVYPIFFNTGTRVAIKCKNSKFSEKAKLDSPISAKVELTENDKRLLEIFSEYVTWNRVSNVLSHIGSVTAKDFGRVSGLTMKDIINEAAREGHDLLFADNPSAVLKELTGLIQNTIRSKWHEVLE

SEQ ID NO: 1425 - DNA, 1038 bp, synthetic construct
  misc_feature 1..1038: note = variant of RNA ligase 2 from Klebsiella phage KP179
  source 1..1038: mol_type = other DNA
atgcatcaccatcaccatcacggtggcagcaacatgtttgcgtattattcaagtctggaaaaccattacaatgctaagttcatggagaagatccgtggtgcaggcttcctgatgcacaccgtggaatgggtagctcgcgagaagattcatggaacgaactttagcgttatcattactccgaccgaaatcgtcccagccaaacgcacagggccgatcttggaaggcgagtcgttctttggtcacgaaattatcatgaaaaaatataaagactccttcgtgaaggctcagaacatgctgaatgccatggatcttgttagcgtgcaaatctttggcgaatttgcgggtggtggcattcagaaaggcgtcgattacggagacaaagatttctatgtgtttgacatcctgtctgatagcgggaacgagaaagtttactgggatgactatcgcgtcgaatcgttttgcaccactctgggtctgaaattagcgcctctgctgggacgtggtagtttcgctgaactgtcccagtacccaaacgatttcaaaagcgttgtgaaccgttataatgaattggttgacacggtcggcctggagatggccaataaacacgtctttggtccgcaagcgtcttctgaaactggcctggcagaaggctacgttcttaaacccgtctatccgatcttctttaataccggtacgcgcgtggcgattaaatgcaagaactccaaattttcggagaaagccaagctggactcgccaattagtgcgaaggttgaactgacggagaacgataaacgtctgctcgaaatctttagcgagtatgttacctggaatcgcgtcagtaacgtactgtcacatattggctcagtgaccgcaaaagattttgggcgtgtttcgggtctgacgatgaaagacatcattaatgaagcagcacgcgaaggccatgatctgttgttcgctgataacccgtcggcggtgctgaaggagctgactggcctcatccagaacacgattcgctccaaatggcacgaagttctggag

SEQ ID NO: 1426 - protein, 346 aa, synthetic construct
  REGION 1..346: note = variant of RNA ligase 2 from Klebsiella phage KP179
MHHHHHHGGSNMFAYYSSLENHYNAKFMEKIRGAGFLMHTVEWVAREKIHGTNFSVIITPTEIVPAKRTGPILEGESFFGHEIIMKKYKDSFVKAQNMLNAMDLVSVQIFGEFAGGGIQKGVDYGDKDFYVFDILSDSGNEKVYWDDYRVESFCTTLGLKLAPLLGRGSFAELSQYPNDFKSVVNRYNELVDTVGLEMANKHVFGPQASSETGLAEGYVLKPVYPIFFNTGTRVAIKCKNSKFSEKAKLDSPISAKVELTENDKRLLEIFSEYVTWNRVSNVLSHIGSVTAKDFGRVSGLTMKDIINEAAREGHDLLFADNPSAVLKELTGLIQNTIRSKWHEVLE

SEQ ID NO: 1427 - DNA, 1038 bp, synthetic construct
  misc_feature 1..1038: note = variant of RNA ligase 2 from Klebsiella phage KP179
  source 1..1038: mol_type = other DNA
atgcatcaccatcaccatcacggtggcagcaacatgtttgcgtattattcaagtctggaaaaccattacaatgctaagttcattgagaagatccgtggtgcaggcttcctgatgcacaccgtggaatgggtagctcgcgagaagattcatggaacgaactttagcgttatcattactccgaccgaaatcgtcccagccaaacgcacagggccgatcttggaaggcgagtcgttctttggtcacgaaattatcatgaaaaaatatatggactccttcgtgaaggtgcagaacatgctgaatgccatggatcttgttagcgtgcaaatctttggcgaatttgcgggtggtggcattcagaaaggcgtcgattacggagacaaagatttctatgtgtttgacatcctgtctgatagcgggaacgagaaagcttactgggatgactatcgcgtcgaatcgttttgcaccactgtgggtctgaaattagcgcctctgctgggacgtggtagtttcgctgaactgtcccagtacccaaacgatttcaaaagcattgtgaaccgttataatgaattggttgacacggtcggcctggagatggccaataaacacgtctttggtccgcaagcgtcttctgaaactggcgtggcagaaggctacgttcttaaacccgtctatccgatcttctttaataccggtacgcgcgtggcgattaaatgcaagaactccaaattttcggagaaagccaagctggactcgccaattagtgcgaaggttgaactgacggagaacgataaacgtctgctcgaaatctttagcgagtatgttacctggaatcgcgtcagtaacgtactgtcacatattggctcagtgaccgcaaaagattttgggcgtgtttcgggtctgacgatgaaagacatcattaatgaagcagcacgcgaaggccatgatctgttgttcgctgataacccgtcggcggtgctgaaggagctgactggcctcatccagaacacgattcgctccaaatggcacgaagttctggag

SEQ ID NO: 1428 - protein, 346 aa, synthetic construct
  REGION 1..346: note = variant of RNA ligase 2 from Klebsiella phage KP179
MHHHHHHGGSNMFAYYSSLENHYNAKFIEKIRGAGFLMHTVEWVAREKIHGTNFSVIITPTEIVPAKRTGPILEGESFFGHEIIMKKYMDSFVKVQNMLNAMDLVSVQIFGEFAGGGIQKGVDYGDKDFYVFDILSDSGNEKAYWDDYRVESFCTTVGLKLAPLLGRGSFAELSQYPNDFKSIVNRYNELVDTVGLEMANKHVFGPQASSETGVAEGYVLKPVYPIFFNTGTRVAIKCKNSKFSEKAKLDSPISAKVELTENDKRLLEIFSEYVTWNRVSNVLSHIGSVTAKDFGRVSGLTMKDIINEAAREGHDLLFADNPSAVLKELTGLIQNTIRSKWHEVLE

SEQ ID NO: 1429 - DNA, 1038 bp, synthetic construct
  misc_feature 1..1038: note = variant of RNA ligase 2 from Klebsiella phage KP179
  source 1..1038: mol_type = other DNA
atgcatcaccatcaccatcacggtggcagcaacatgtttgcgtattattcaagtctggaaaaccattacaatgctaagttcatggagaagatccgtggtgcaggcttcctgatgcacaccgtggaatgggtagctcgcgagaagattcatggaacgaactttagcgttatcattactccgaccgaaatcgtcccagccaaacgcacagggccgatcttggaaggcgagtcgttctttggtcacgaaattatcatgaaaaaatataaagactccttcgtgaaggctcagaacatgctgaatgccatggatcttgttagcgtgcaaatctttggcgaatttgcgggtggtggcattcagaaaggcgtcgattacggagacaaagatttctatgtgtttgacatcctgtctgatagcgggaacgagaaagtttactgggatgactatcgcgtcgaatcgttttgcaccactctcggtctgaaattagcgcctctgctgggacgtggtagtttcgctgaactgtcccagtacccaaacgatttcaaaagcattgtgaaccgttataatgaattggttgacacggtcggcctggagatggccaataaacacgtctttggtccgcaagcgtcttctgaaactggcgtagcagaaggctacgttcttaaacccgtctatccgatcttctttaataccggtacgcgcgtggcgattaaatgcaagaactccaaattttcggagaaagccaagctggactcgccaattagtgcgaaggttgaactgacggagaacgataaacgtctgctcgaaatctttagcgagtatgttacctggaatcgcgtcagtaacgtactgtcacatattggctcagtgaccgcaaaagattttgggcgtgtttcgggtctgacgatgaaagacatcattaatgaagcagcacgcgaaggccatgatctgttgttcgctgataacccgtcggcggtgctgaaggagctgactggcctcatccagaacacgattcgctccaaatggcacgaagttctggag

SEQ ID NO: 1430 - protein, 346 aa, synthetic construct
  REGION 1..346: note = variant of RNA ligase 2 from Klebsiella phage KP179
MHHHHHHGGSNMFAYYSSLENHYNAKFMEKIRGAGFLMHTVEWVAREKIHGTNFSVIITPTEIVPAKRTGPILEGESFFGHEIIMKKYKDSFVKAQNMLNAMDLVSVQIFGEFAGGGIQKGVDYGDKDFYVFDILSDSGNEKVYWDDYRVESFCTTLGLKLAPLLGRGSFAELSQYPNDFKSIVNRYNELVDTVGLEMANKHVFGPQASSETGVAEGYVLKPVYPIFFNTGTRVAIKCKNSKFSEKAKLDSPISAKVELTENDKRLLEIFSEYVTWNRVSNVLSHIGSVTAKDFGRVSGLTMKDIINEAAREGHDLLFADNPSAVLKELTGLIQNTIRSKWHEVLE

SEQ ID NO: 1431 - DNA, 1038 bp, synthetic construct
  misc_feature 1..1038: note = variant of RNA ligase 2 from Klebsiella phage KP179
  source 1..1038: mol_type = other DNA
atgcatcaccatcaccatcacggtggcagcaacatgtttgcgtattattcaagtctggaaaaccattacaatgctaagttcattgagaagatccgtggtgcaggcttcctgatgcacaccgtggaatgggtagctcgcgagaagattcatggaacgaactttagcgttatcattactccgaccgaaatcgtcccagccaaacgcacagggccgatcttggaaggcgagtcgttctttggtcacgaaattatcatgaaaaaatataaagactccttcgtgaaggctcagaacatgctgaatgccatggatcttgttagcgtgcaaatctttggcgaatttgcgggtggtggcattcagaaaggcgtcgattacggagacaaagatttctatgtgtttgacatcctgtctgatagcgggaacgagaaaatgtactgggatgactatcgcgtcgaatcgttttgcaccactctcggtctgaaattagcgcctctgctgggacgtggtagtttcgctgaactgtcccagtacccaaacgatttcaaaagcgttgtgcctcgttataatgaattggttgacacggtcggcctggagatggccaataaacacgtctttggtccgcaagcgtcttctgaaactggcgtagcagaaggctacgttcttaaacccgtctatccgatcttctttaataccggtacgcgcgtggcgattaaatgcaagaactccaaattttcggagaaagccaagctggactcgccaattagtgcgaaggttgaactgacggagaacgataaacgtctgctcgaaatctttagcgagtatgttacctggaatcgcgtcagtaacgtactgtcacatattggctcagtgaccgcaaaagattttgggcgtgtttcgggtctgacgatgaaagacatcattaatgaagcagcacgcgaaggccatgatctgttgttcgctgataacccgtcggcggtgctgaaggagctgactggcctcatccagaacacgattcgctccaaatggcacgaagttctggag

SEQ ID NO: 1432 - protein, 346 aa, synthetic construct
  REGION 1..346: note = variant of RNA ligase 2 from Klebsiella phage KP179
MHHHHHHGGSNMFAYYSSLENHYNAKFIEKIRGAGFLMHTVEWVAREKIHGTNFSVIITPTEIVPAKRTGPILEGESFFGHEIIMKKYKDSFVKAQNMLNAMDLVSVQIFGEFAGGGIQKGVDYGDKDFYVFDILSDSGNEKMYWDDYRVESFCTTLGLKLAPLLGRGSFAELSQYPNDFKSVVPRYNELVDTVGLEMANKHVFGPQASSETGVAEGYVLKPVYPIFFNTGTRVAIKCKNSKFSEKAKLDSPISAKVELTENDKRLLEIFSEYVTWNRVSNVLSHIGSVTAKDFGRVSGLTMKDIINEAAREGHDLLFADNPSAVLKELTGLIQNTIRSKWHEVLE

SEQ ID NO: 1433 - DNA, 1038 bp, synthetic construct
  misc_feature 1..1038: note = variant of RNA ligase 2 from Klebsiella phage KP179
  source 1..1038: mol_type = other DNA
atgcatcaccatcaccatcacggtggcagcaacatgtttgcgtattattcaagtctggaaaaccattacaatgctaagttcattgagaagatccgtggtgcaggcttcctgatgcacaccgtggaatgggtagctcgcgagaagattcatggaacgaactttagcgttatcattactccgaccgaaatcgtcccagccaaacgcacagggccgatcttggaaggcgagtcgttctttggtcacgaaattatcatgaaaaaatataaggactccttcgtgaaggctcagaacatgctgaatgccatggatcttgttagcgtgcaaatctttggcgaatttgcgggtggtggcattcagaaaggcgtcgattacggagacaaagatttctatgtgtttgacatcctgtctgatagcgggaacgagaaagcttactgggatgactatcgcgtcgaatcgttttgcaccactgtgggtctgaaattagcgcctctgctgggacgtggtagtttcgctgaactgtcccagtacccaaacgatttcaaaagcctggtgaaccgttataatgaattggttgacacggtcggcctggagatggccaataaacacgtctttggtccgcaagcgtcttctgaaactggcgtggcagaaggctacgttcttaaacccgtctatccgatcttctttaataccggtacgcgcgtggcgattaaatgcaagaactccaaattttcggagaaagccaagctggactcgccaattagtgcgaaggttgaactgacggagaacgataaacgtctgctcgaaatctttagcgagtatgttacctggaatcgcgtcagtaacgtactgtcacatattggctcagtgaccgcaaaagattttgggcgtgtttcgggtctgacgatgaaagacatcattaatgaagcagcacgcgaaggccatgatctgttgttcgctgataacccgtcggcggtgctgaaggagctgactggcctcatccagaacacgattcgctccaaatggcacgaagttctggag

SEQ ID NO: 1434 - protein, 346 aa, synthetic construct
  REGION 1..346: note = variant of RNA ligase 2 from Klebsiella phage KP179
MHHHHHHGGSNMFAYYSSLENHYNAKFIEKIRGAGFLMHTVEWVAREKIHGTNFSVIITPTEIVPAKRTGPILEGESFFGHEIIMKKYKDSFVKAQNMLNAMDLVSVQIFGEFAGGGIQKGVDYGDKDFYVFDILSDSGNEKAYWDDYRVESFCTTVGLKLAPLLGRGSFAELSQYPNDFKSLVNRYNELVDTVGLEMANKHVFGPQASSETGVAEGYVLKPVYPIFFNTGTRVAIKCKNSKFSEKAKLDSPISAKVELTENDKRLLEIFSEYVTWNRVSNVLSHIGSVTAKDFGRVSGLTMKDIINEAAREGHDLLFADNPSAVLKELTGLIQNTIRSKWHEVLE

SEQ ID NO: 1435 - DNA, 1038 bp, synthetic construct
  misc_feature 1..1038: note = variant of RNA ligase 2 from Klebsiella phage KP179
  source 1..1038: mol_type = other DNA
atgcatcaccatcaccatcacggtggcagcaacatgtttgcgtattattcaagtctggaaaaccattacaatgctaagttcattgagaagatccgtggtgcaggcttcctgatgcacaccgtggaatgggtagctcgcgagaagattcatggaacgaactttagcgttatcattactccgaccgaaatcgtcccagccaaacgcacagggccgatcttggaaggcgagtcgttctttggtcacgaacttatcatgaaaaaatatatggactccttcgtgaaggtgcagaacatgctgaatgccatggatctggttagcgtgcaaatctttggcgaatttgcgggtggtggcattcagaaaggcgtcgattacggagacaaagatttctatgtgtttgacatcctgtctcgcagcgggaacgagaaagtttactgggatgactatcgcgatgaatcgttttgcaccactgtgggtctgaaattagcgcctctgctgggacgtggtagtttcgctgaactgtcccagtacccaaacgatttcaaaagcctggtgaaccgttataatgaattggttgacacggtcggcctggagatggccaataaacacgtctttggtccgcaagcgtcttctgaaactggcctggcagaaggctacgttcttaaacccgtctatccgatcttctttaataccggtacgcgcgtggcgattaaatgcaagaactccaaattttcggagaaagccaagctggactcgccaattagtgcgaaggttgaactgacggagaacgataaacgtctgctcgaaatctttagcgagtatgttacctggaatcgcgtcagtaacgtactgtcacatattggctcagtgaccgcaaaagattttgggcgtgtttcgggtctgacgatgaaagacatcattaatgaagcagcacgcgaaggccatgatctgttgttcgctgataacccgtcggcggtgctgaaggagctgactggcctcatccagaacacgattcgctccaaatggcacgaagttctggag

SEQ ID NO: 1436 - protein, 346 aa, synthetic construct
  REGION 1..346: note = variant of RNA ligase 2 from Klebsiella phage KP179
MHHHHHHGGSNMFAYYSSLENHYNAKFIEKIRGAGFLMHTVEWVAREKIHGTNFSVIITPTEIVPAKRTGPILEGESFFGHELIMKKYMDSFVKVQNMLNAMDLVSVQIFGEFAGGGIQKGVDYGDKDFYVFDILSRSGNEKVYWDDYRDESFCTTVGLKLAPLLGRGSFAELSQYPNDFKSLVNRYNELVDTVGLEMANKHVFGPQASSETGLAEGYVLKPVYPIFFNTGTRVAIKCKNSKFSEKAKLDSPISAKVELTENDKRLLEIFSEYVTWNRVSNVLSHIGSVTAKDFGRVSGLTMKDIINEAAREGHDLLFADNPSAVLKELTGLIQNTIRSKWHEVLE

SEQ ID NO: 1437 - DNA, 1038 bp, synthetic construct
  misc_feature 1..1038: note = variant of RNA ligase 2 from Klebsiella phage KP179
  source 1..1038: mol_type = other DNA
atgcatcaccatcaccatcacggtggcagcaacatgtttgcgtattattcaagtctggaaaaccattacaatgctaagttcattgagaagatccgtggtgcaggcttcctgatgcacaccgtggaatgggtagctcgcgagaagattcatggaacgaactttagcgttatcattactccgaccgaaatcgtcccagccaaacgcacagggccgatcttggaaggcgagtcgttctttggtcacgaaattatcatgaaaaaatatatggactccttcgtgaaggtgcagaacatgctgaatgccatggatctggttagcgtgcaaatctttggcgaatttgcgggtggtggcattcagaaaggcgtcgattacggagacaaagatttctatgtgtttgacatcctgtctcgcagcgggaacgagaaagtttactgggatgactatcgcgttgaatcgttttgcaccactgtgggtctgaaattagcgcctctgctgggacgtggtagtttcgctgaactgtcccagtacccaaacgatttcaaaagcctggtgaaccgttataatgaactggttgacacggtcggcctggagatggccaataaacacgtctttggtccgcaagcgtcttctgaaactcgcctggcagaaggctacgttcttaaacccgtctatccgatcttctttaataccggtacgcgcgtggcgattaaatgcaagaactccaaattttcggagaaagccaagctggactcgccaattagtgcgaaggttgaactgacggagaacgataaacgtctgctcgaaatctttagcgagtatgttacctggaatcgcgtcagtaacgtactgtcacatattggctcagtgaccgcaaaagattttgggcgtgtttcgggtctgacgatgaaagacatcattaatgaagcagcacgcgaaggccatgatctgttgttcgctgataacccgtcggcggtgctgaaggagctgactggcctcatccagaacacgattcgctccaaatggcacgaagttctggag

SEQ ID NO: 1438 - protein, 346 aa, synthetic construct
  REGION 1..346: note = variant of RNA ligase 2 from Klebsiella phage KP179
MHHHHHHGGSNMFAYYSSLENHYNAKFIEKIRGAGFLMHTVEWVAREKIHGTNFSVIITPTEIVPAKRTGPILEGESFFGHEIIMKKYMDSFVKVQNMLNAMDLVSVQIFGEFAGGGIQKGVDYGDKDFYVFDILSRSGNEKVYWDDYRVESFCTTVGLKLAPLLGRGSFAELSQYPNDFKSLVNRYNELVDTVGLEMANKHVFGPQASSETRLAEGYVLKPVYPIFFNTGTRVAIKCKNSKFSEKAKLDSPISAKVELTENDKRLLEIFSEYVTWNRVSNVLSHIGSVTAKDFGRVSGLTMKDIINEAAREGHDLLFADNPSAVLKELTGLIQNTIRSKWHEVLE

SEQ ID NO: 1439 - DNA, 1038 bp, synthetic construct
  misc_feature 1..1038: note = variant of RNA ligase 2 from Klebsiella phage KP179
  source 1..1038: mol_type = other DNA
atgcatcaccatcaccatcacggtggcagcaacatgtttgcgtattattcaagtctggaaaaccattacaatgctaagttcattgagaagatccgtggtgcaggcttcctgatgcacaccgtggaatgggtagctcgcgagaagattcatggaacgaactttagcgttatcattactccgaccgaaatcgtcccagccaaacgcacagggccgatcttggaaggcgagtcgttctttggtcacgaaattatcatgaaaaaatatatggactccttcgtgaaggtgcagaacatgctgaatgccatggatctggttagcgtgcaaatctttggcgaatttgcgggtggtggcattcagaaaggcgtcgattacggagacaaagatttctatgtgtttgacatcctgtctcgcagcgggaacgagaaagtttactgggatgactatcgcgttgaatcgttttgcaccactgtgggtctgaaattagcgcctctgctgggacgtggtagtttcgctgaactgtcccagtacccaaacgatttcaaaagcctggtgaaccgttataatgaattggttgacacggtcggcctggagatggccaataaacacgtctttggtccgcaagcgtcttctgaaactggcctggcagaaggctacgttcttaaacccgtctatccgatcttctttaataccggtacgcgcgtggcgattaaatgcaagaactccaaattttcggagaaagccaagctggactcgccaattagtgcgaaggttgaactgacggagaacgataaacgtctgctcgaaatctttagcgagtatgttacctggaatcgcgtcagtaacgtactgtcacatattggctcagtgaccgcaaaagattttgggcgtgtttcgggtctgacgatgaaagacatcattaatgaagcagcacgcgaaggccatgatctgttgttcgctgataacccgtcggcggtgctgaaggagctgactggcctcatccagaacacgattcgctccaaatggcacgaagttctggag

SEQ ID NO: 1440 - protein, 346 aa, synthetic construct
  REGION 1..346: note = variant of RNA ligase 2 from Klebsiella phage KP179
MHHHHHHGGSNMFAYYSSLENHYNAKFIEKIRGAGFLMHTVEWVAREKIHGTNFSVIITPTEIVPAKRTGPILEGESFFGHEIIMKKYMDSFVKVQNMLNAMDLVSVQIFGEFAGGGIQKGVDYGDKDFYVFDILSRSGNEKVYWDDYRVESFCTTVGLKLAPLLGRGSFAELSQYPNDFKSLVNRYNELVDTVGLEMANKHVFGPQASSETGLAEGYVLKPVYPIFFNTGTRVAIKCKNSKFSEKAKLDSPISAKVELTENDKRLLEIFSEYVTWNRVSNVLSHIGSVTAKDFGRVSGLTMKDIINEAAREGHDLLFADNPSAVLKELTGLIQNTIRSKWHEVLE

SEQ ID NO: 1441 - DNA, 1038 bp, synthetic construct
  misc_feature 1..1038: note = variant of RNA ligase 2 from Klebsiella phage KP179
  source 1..1038: mol_type = other DNA
atgcatcaccatcaccatcacggtggcagcaacatgtttgcgtattattcaagtctggaaaaccattacaatgctaagttcattgagaagatccgtggtgcaggcttcctgatgcacaccgtggaatgggtagctcgcgagaagattcatggaacgaactttagcgttatcattactccgaccgaaatcgtcccagccaaacgcacagggccgatcttggaaggcgagtcgttctttggtcacgaaattatcatgaaaaaatatatggactccttcgtgaaggtgcagaacatgctgaatgccatggatcttgttagcgtgcaaatctttggcgaatttgcgggtggtggcattcagaaaggcgtcgattacggagacaaagatttctatgtgtttgacatcctgtctgatagcgggaacgagaaagtttactgggatgactatcgcgatgaatcgttttgcaccactgtgggtctgaaattagcgcctctgctgggacgtggtagtttcgctgaactgtcccagtacccaaacgatttcaaaagcctggtgaaccgttataatgaaatggttgacacggtcggcctggagatggccaataaacacgtctttggtccgcaagcgtcttctgaaactggcctggcagaaggctacgttcttaaacccgtctatccgatcttctttaataccggtacgcgcgtggcgattaaatgcaagaactccaaattttcggagaaagccaagctggactcgccaattagtgcgaaggttgaactgacggagaacgataaacgtctgctcgaaatctttagcgagtatgttacctggaatcgcgtcagtaacgtactgtcacatattggctcagtgaccgcaaaagattttgggcgtgtttcgggtctgacgatgaaagacatcattaatgaagcagcacgcgaaggccatgatctgttgttcgctgataacccgtcggcggtgctgaaggagctgactggcctcatccagaacacgattcgctccaaatggcacgaagttctggag

SEQ ID NO: 1442 - protein, 346 aa, synthetic construct
  REGION 1..346: note = variant of RNA ligase 2 from Klebsiella phage KP179
MHHHHHHGGSNMFAYYSSLENHYNAKFIEKIRGAGFLMHTVEWVAREKIHGTNFSVIITPTEIVPAKRTGPILEGESFFGHEIIMKKYMDSFVKVQNMLNAMDLVSVQIFGEFAGGGIQKGVDYGDKDFYVFDILSDSGNEKVYWDDYRDESFCTTVGLKLAPLLGRGSFAELSQYPNDFKSLVNRYNEMVDTVGLEMANKHVFGPQASSETGLAEGYVLKPVYPIFFNTGTRVAIKCKNSKFSEKAKLDSPISAKVELTENDKRLLEIFSEYVTWNRVSNVLSHIGSVTAKDFGRVSGLTMKDIINEAAREGHDLLFADNPSAVLKELTGLIQNTIRSKWHEVLE

SEQ ID NO: 1443 - DNA, 1038 bp, synthetic construct
  misc_feature 1..1038: note = variant of RNA ligase 2 from Klebsiella phage KP179
  source 1..1038: mol_type = other DNA
atgcatcaccatcaccatcacggtggcagcaacatgtttgcgtattattcaagtctggaaaaccattacaatgctaagttcattgagaagatccgtggtgcaggcttcctgatgcacaccgtggaatgggtagctcgcgagaagattcatggaacgaactttagcgttatcattactccgaccgaaatcgtcccagccaaacgcacagggccgatcttggaaggcgagtcgttctttggtcacgaaattatcatgaaaaaatatatggactccttcgtgaaggtgcagaacatgctgaatgccatggatctggttagcgtgcaaatctttggcgaatttgcgggtggtggcattcagaaaggcgtcgattacggagacaaagatttctatgtgtttgacatcctgtctgatagcgggaacgagaaagcgtactgggatgactatcgcgatgaatcgttttgcaccactgtgggtctgaaattagcgcctctgctgggacgtggtagtttcgctgaactgtcccagtacccaaacgatttcaaaagcctggtgaaccgttataatgaattggttgacacggtcggcctggagatggccaataaacacgtctttggtccgcaagcgtcttctgaaactggcctggcagaaggctacgttcttaaacccgtctatccgatcttctttaataccggtacgcgcgtggcgattaaatgcaagaactccaaattttcggagaaagccaagctggactcgccaattagtgcgaaggttgaactgacggagaacgataaacgtctgctcgaaatctttagcgagtatgttacctggaatcgcgtcagtaacgtactgtcacatattggctcagtgaccgcaaaagattttgggcgtgtttcgggtctgacgatgaaagacatcattaatgaagcagcacgcgaaggccatgatctgttgttcgctgataacccgtcggcggtgctgaaggagctgactggcctcatccagaacacgattcgctccaaatggcacgaagttctggag

SEQ ID NO: 1444 - protein, 346 aa, synthetic construct
  REGION 1..346: note = variant of RNA ligase 2 from Klebsiella phage KP179
MHHHHHHGGSNMFAYYSSLENHYNAKFIEKIRGAGFLMHTVEWVAREKIHGTNFSVIITPTEIVPAKRTGPILEGESFFGHEIIMKKYMDSFVKVQNMLNAMDLVSVQIFGEFAGGGIQKGVDYGDKDFYVFDILSDSGNEKAYWDDYRDESFCTTVGLKLAPLLGRGSFAELSQYPNDFKSLVNRYNELVDTVGLEMANKHVFGPQASSETGLAEGYVLKPVYPIFFNTGTRVAIKCKNSKFSEKAKLDSPISAKVELTENDKRLLEIFSEYVTWNRVSNVLSHIGSVTAKDFGRVSGLTMKDIINEAAREGHDLLFADNPSAVLKELTGLIQNTIRSKWHEVLE

SEQ ID NO: 1445 - DNA, 1038 bp, synthetic construct
  misc_feature 1..1038: note = variant of RNA ligase 2 from Klebsiella phage KP179
  source 1..1038: mol_type = other DNA
atgcatcaccatcaccatcacggtggcagcaacatgtttgcgtattattcaagtctggaaaaccattacaatgctaagttcattgagaagatccgtggtgcaggcttcctgatgcacaccgtggaatgggtagctcgcgagaagattcatggaacgaactttagcgttatcattactccgaccgaaatcgtcccagccaaacgcacagggccgatcttggaaggcgagtcgttctttggtcacgaaattatcatgaaaaaatatatggactccttcgtgaaggtccagaacatgctgaatgccatggataccgttagcgtgcaaatctttggcgaatttgcgggtggtggcattcagaaaggcgtcgattacggagacaaagatttctatgtgtttgacatcctgtctgatagcgggaacgagaaagtgtactgggatgactatcgcgatgaatcgttttgcaccactgtgggtctgaaattagcgcctctgctgggacgtggtagtttcgctgaactgtcccagtacccaaacgatttcaaaagcctggtgaaccgttataatgaactggttgacacggtcggcctggagatggccaataaacacgtctttggtccgcaagcgtcttctgaaactggcctggcagaaggctacgttcttaaacccgtctatccgatcttctttaataccggtacgcgcgtggcgattaaatgcaagaactccaaattttcggagaaagccaagctggactcgccaattagtgcgaaggttgaactgacggagaacgataaacgtctgctcgaaatctttagcgagtatgttacctggaatcgcgtcagtaacgtactgtcacatattggctcagtgaccgcaaaagattttgggcgtgtttcgggtctgacgatgaaagacatcattaatgaagcagcacgcgaaggccatgatctgttgttcgctgataacccgtcggcggtgctgaaggagctgactggcctcatccagaacacgattcgctccaaatggcacgaagttctggag

SEQ ID NO: 1446 - protein, 346 aa, synthetic construct
  REGION 1..346: note = variant of RNA ligase 2 from Klebsiella phage KP179
MHHHHHHGGSNMFAYYSSLENHYNAKFIEKIRGAGFLMHTVEWVAREKIHGTNFSVIITPTEIVPAKRTGPILEGESFFGHEIIMKKYMDSFVKVQNMLNAMDTVSVQIFGEFAGGGIQKGVDYGDKDFYVFDILSDSGNEKVYWDDYRDESFCTTVGLKLAPLLGRGSFAELSQYPNDFKSLVNRYNELVDTVGLEMANKHVFGPQASSETGLAEGYVLKPVYPIFFNTGTRVAIKCKNSKFSEKAKLDSPISAKVELTENDKRLLEIFSEYVTWNRVSNVLSHIGSVTAKDFGRVSGLTMKDIINEAAREGHDLLFADNPSAVLKELTGLIQNTIRSKWHEVLE

SEQ ID NO: 1447 - DNA, 1038 bp, synthetic construct
  misc_feature 1..1038: note = variant of RNA ligase 2 from Klebsiella phage KP179
  source 1..1038: mol_type = other DNA
atgcatcaccatcaccatcacggtggcagcaacatgtttgcgtattattcaagtctggaaaaccattacaatgctaagttcattgagaagatccgtggtgcaggcttcctgatgcacaccgtggaatgggtagctcgcgagaagattcatggaacgaactttagcgttatcattactgcgaccgaaatcgtcccagccaaacgcacagggccgatcttggaaggcgagtcgttctttggtcacgaaattatcatgaaaaaatatatggactccttcgtgaaggtgcagaacatgctgaatgccatggatcttgttagcgtgcaaatctttggcgaatttgcgggtggtggcattcagaaaggcgtcgattacggagacaaagatttctatgtgtttgacatcctgtctgatagcgggaacgagaaagcgtactgggatgactatcgcgatgaatcgttttgcaccactgtgggtctgaaattagcgcctctgctgggacgtggtagtttcgctgaactgtcccagtacccaaacgatttcaaaagcctggtgaaccgttataatgaaatggttgacacggtcggcctggagatggccaataaacacgtctttggtccgcaagcgtcttctgaaactggcctggcagaaggctacgttcttaaacccgtctatccgatcttctttaataccggtacgcgcgtggcgattaaatgcaagaactccaaattttcggagaaagccaagctggactcgccaattagtgcgaaggttgaactgacggagaacgataaacgtctgctcgaaatctttagcgagtatgttacctggaatcgcgtcagtaacgtactgtcacatattggctcagtgaccgcaaaagattttgggcgtgtttcgggtctgacgatgaaagacatcattaatgaagcagcacgcgaaggccatgatctgttgttcgctgataacccgtcggcggtgctgaaggagctgactggcctcatccagaacacgattcgctccaaatggcacgaagttctggag

SEQ ID NO: 1448 - protein, 346 aa, synthetic construct
  REGION 1..346: note = variant of RNA ligase 2 from Klebsiella phage KP179
MHHHHHHGGSNMFAYYSSLENHYNAKFIEKIRGAGFLMHTVEWVAREKIHGTNFSVIITATEIVPAKRTGPILEGESFFGHEIIMKKYMDSFVKVQNMLNAMDLVSVQIFGEFAGGGIQKGVDYGDKDFYVFDILSDSGNEKAYWDDYRDESFCTTVGLKLAPLLGRGSFAELSQYPNDFKSLVNRYNEMVDTVGLEMANKHVFGPQASSETGLAEGYVLKPVYPIFFNTGTRVAIKCKNSKFSEKAKLDSPISAKVELTENDKRLLEIFSEYVTWNRVSNVLSHIGSVTAKDFGRVSGLTMKDIINEAAREGHDLLFADNPSAVLKELTGLIQNTIRSKWHEVLE

SEQ ID NO: 1449 - DNA, 1038 bp, synthetic construct
  misc_feature 1..1038: note = variant of RNA ligase 2 from Klebsiella phage KP179
  source 1..1038: mol_type = other DNA
atgcatcaccatcaccatcacggtggcagcaacatgtttgcgtattattcaagtctggaaaaccattacaatgctaagttcattgagaagatccgtggtgcaggcttcctgatgcacaccgtggaatgggtagctcgcgagaagattcatggaacgaactttagcgttatcattactgcgaccgaaatcgtcccagccaaacgcacagggccgatcttggaaggcgagtcgttctttggtcacgaaattatcatgaaaaaatatatggactccttcgtgaaggtccagaacatgctgaatgccatggatctggttagcgtgcaaatctttggcgaatttgcgggtggtggcattcagaaaggcgtcgattacggagacaaagatttctatgtgtttgacatcctgtctgatagcgggaacgagaaagtttactgggatgactatcgcgatgaatcgttttgcaccactgtgggtctgaaattagcgcctctgctgggacgtggtagtttcgctgaactgtcccagtacccaaacgatttcaaaagcctggtgaaccgttataatgaaatggttgacacggtcggcctggagatggccaataaacacgtctttggtccgcaagcgtcttctgaaactcgcctggcagaaggctacgttcttaaacccgtctatccgatcttctttaataccggtacgcgcgtggcgattaaatgcaagaactccaaattttcggagaaagccaagctggactcgccaattagtgcgaaggttgaactgacggagaacgataaacgtctgctcgaaatctttagcgagtatgttacctggaatcgcgtcagtaacgtactgtcacatattggctcagtgaccgcaaaagattttgggcgtgtttcgggtctgacgatgaaagacatcattaatgaagcagcacgcgaaggccatgatctgttgttcgctgataacccgtcggcggtgctgaaggagctgactggcctcatccagaacacgattcgctccaaatggcacgaagttctggag

SEQ ID NO: 1450 - protein, 346 aa, synthetic construct
  REGION 1..346: note = variant of RNA ligase 2 from Klebsiella phage KP179
MHHHHHHGGSNMFAYYSSLENHYNAKFIEKIRGAGFLMHTVEWVAREKIHGTNFSVIITATEIVPAKRTGPILEGESFFGHEIIMKKYMDSFVKVQNMLNAMDLVSVQIFGEFAGGGIQKGVDYGDKDFYVFDILSDSGNEKVYWDDYRDESFCTTVGLKLAPLLGRGSFAELSQYPNDFKSLVNRYNEMVDTVGLEMANKHVFGPQASSETRLAEGYVLKPVYPIFFNTGTRVAIKCKNSKFSEKAKLDSPISAKVELTENDKRLLEIFSEYVTWNRVSNVLSHIGSVTAKDFGRVSGLTMKDIINEAAREGHDLLFADNPSAVLKELTGLIQNTIRSKWHEVLE

SEQ ID NO: 1451 - DNA, 1038 bp, synthetic construct
  misc_feature 1..1038: note = variant of RNA ligase 2 from Klebsiella phage KP179
  source 1..1038: mol_type = other DNA
atgcatcaccatcaccatcacggtggcagcaacatgtttgcgtattattcaagtctggaaaaccattacaatgctaagttcattgagaagatccgtggtgcaggcttcctgatgcacaccgtggaatgggtagctcgcgagaagattcatggaacgaactttagcgttatcattactccgaccgaaatcgtcccagccaaacgcacagggccgatcttggaaggcgagtcgttctttggtcacgaaattatcatgaaaaaatatatggactccttcgtgaaggtgcagaacatgctgaatgccatggataccgttagcgtgcaaatctttggcgaatttgcgggtggtggcattcagaaaggcgtcgattacggagacaaagatttctatgtgtttgacatcctgtctcgcagcgggaacgagaaagtttactgggatgactatcgcgttgaatcgtttgtgaccactgtgggtctgaaattagcgcctctgctgggacgtggtagtttcgctgaactgtcccagtacccaaacgatttcaaaagcctggtgaaccgttataatgaactggttgacacggtcggcctggagatggccaataaacacgtctttggtccgcaagcgtcttctgaaactggcctggcagaaggctacgttcttaaacccgtctatccgatcttctttaataccggtacgcgcgtggcgattaaatgcaagaactccaaattttcggagaaagccaagctggactcgccaattagtgcgaaggttgaactgacggagaacgataaacgtctgctcgaaatctttagcgagtatgttacctggaatcgcgtcagtaacgtactgtcacatattggctcagtgaccgcaaaagattttgggcgtgtttcgggtctgacgatgaaagacatcattaatgaagcagcacgcgaaggccatgatctgttgttcgctgataacccgtcggcggtgctgaaggagctgactggcctcatccagaacacgattcgctccaaatggcacgaagttctggag

SEQ ID NO: 1452 - protein, 346 aa, synthetic construct
  REGION 1..346: note = variant of RNA ligase 2 from Klebsiella phage KP179
MHHHHHHGGSNMFAYYSSLENHYNAKFIEKIRGAGFLMHTVEWVAREKIHGTNFSVIITPTEIVPAKRTGPILEGESFFGHEIIMKKYMDSFVKVQNMLNAMDTVSVQIFGEFAGGGIQKGVDYGDKDFYVFDILSRSGNEKVYWDDYRVESFVTTVGLKLAPLLGRGSFAELSQYPNDFKSLVNRYNELVDTVGLEMANKHVFGPQASSETGLAEGYVLKPVYPIFFNTGTRVAIKCKNSKFSEKAKLDSPISAKVELTENDKRLLEIFSEYVTWNRVSNVLSHIGSVTAKDFGRVSGLTMKDIINEAAREGHDLLFADNPSAVLKELTGLIQNTIRSKWHEVLE

SEQ ID NO: 1453 - DNA, 1038 bp, synthetic construct
  misc_feature 1..1038: note = variant of RNA ligase 2 from Klebsiella phage KP179
  source 1..1038: mol_type = other DNA
atgcatcaccatcaccatcacggtggcagcaacatgtttgcgtattattcaagtctggaaaaccattacaatgctaagttcattgagaagatccgtggtgcaggcttcctgatgcacaccgtggaatgggtagctcgcgagaagattcatggaacgaactttagcgttatcattactccgaccgaaatcgtcccagccaaacgcacagggccgatcttggaaggcgagtcgttctttggtcacgaaattatcatgaaaaaatatatggactccttcgtgaaggtgcagaacatgctgaatgccatggatcttgttagcgtgcaaatctttggcgaatttgcgggtggtggcattcagaaaggcgtcaaatacggagacaaagatttctatgtgtttgacatcctgtctcgcagcgggaacgagaaagtttactgggatgactatcgcgttgaatcgttttgcaccactgtgggtctgaaattagcgcctctgctgggacgtggtagtttcgctgaactgtcccagtacccaaacgatttcaaaagcctggtgaaccgttataatgaattggttgacacggtcggcctggagatggccaataaacacgtctttggtccgcaagcgtcttctgaaactggcctggcagaaggctacgttcttaaacccgtctatccgatcttctttaataccggtacgcgcgtggcgattaaatgcaagaactccaaattttcggagaaagccaagctggactcgccaattagtgcgaaggttgaactgacggagaacgataaacgtctgctcgaaatctttagcgagtatgttacctggaatcgcgtcagtaacgtactgtcacatattggctcagtgaccgcaaaagattttgggcgtgtttcgggtctgacgatgaaagacatcattaatgaagcagcacgcgaaggccatgatctgttgttcgctgataacccgtcggcggtgctgaaggagctgactggcctcatccagaacacgattcgctccaaatggcacgaagttctggag

SEQ ID NO: 1454 - protein, 346 aa, synthetic construct
  REGION 1..346: note = variant of RNA ligase 2 from Klebsiella phage KP179
MHHHHHHGGSNMFAYYSSLENHYNAKFIEKIRGAGFLMHTVEWVAREKIHGTNFSVIITPTEIVPAKRTGPILEGESFFGHEIIMKKYMDSFVKVQNMLNAMDLVSVQIFGEFAGGGIQKGVKYGDKDFYVFDILSRSGNEKVYWDDYRVESFCTTVGLKLAPLLGRGSFAELSQYPNDFKSLVNRYNELVDTVGLEMANKHVFGPQASSETGLAEGYVLKPVYPIFFNTGTRVAIKCKNSKFSEKAKLDSPISAKVELTENDKRLLEIFSEYVTWNRVSNVLSHIGSVTAKDFGRVSGLTMKDIINEAAREGHDLLFADNPSAVLKELTGLIQNTIRSKWHEVLE

SEQ ID NO: 1455 - DNA, 1038 bp, synthetic construct
  misc_feature 1..1038: note = variant of RNA ligase 2 from Klebsiella phage KP179
  source 1..1038: mol_type = other DNA
atgcatcaccatcaccatcacggtggcagcaacatgtttgcgtattattcaagtctggaaaaccattacaatgctaagttcattgagaagatccgtggtgcaggcttcctgatgcacaccgtggaatgggtagctcgcgagaagattcatggaacgaactttagcgttatcattactccgaccgaaatcgtcccagccaaacgcacagggccgatcttggaaggcgagtcgttctttggtcacgaaattatcatgaaaaaatatatggactccttcgtgaaggtgcagaacatgctgaatgccatggatcttgttagcgtgcaaatctttggcgaatttgcgggtggtggcattcagaaaggcgtcgattacggagacaaagatttctatgtgtttgacatcctgtctcgcagcgggaacgagaaagtttactgggatgactatcgcgatgaatcgtttgtgaccactgtgggtctgaaattagcgcctctgctgggacgtggtagtttcgctgaactgtcccagtacccaaacgatttcaaaagcctggtgaaccgttataatgaaatggttgacacggtcggcctggagatggccaataaacacgtctttggtccgcaagcgtcttctgaaactggcctggcagaaggctacgttcttaaacccgtctatccgatcttctttaataccggtacgcgcgtggcgattaaatgcaagaactccaaattttcggagaaagccaagctggactcgccaattagtgcgaaggttgaactgacggagaacgataaacgtctgctcgaaatctttagcgagtatgttacctggaatcgcgtcagtaacgtactgtcacatattggctcagtgaccgcaaaagattttgggcgtgtttcgggtctgacgatgaaagacatcattaatgaagcagcacgcgaaggccatgatctgttgttcgctgataacccgtcggcggtgctgaaggagctgactggcctcatccagaacacgattcgctccaaatggcacgaagttctggag

SEQ ID NO: 1456 - protein, 346 aa, synthetic construct
  REGION 1..346: note = variant of RNA ligase 2 from Klebsiella phage KP179
MHHHHHHGGSNMFAYYSSLENHYNAKFIEKIRGAGFLMHTVEWVAREKIHGTNFSVIITPTEIVPAKRTGPILEGESFFGHEIIMKKYMDSFVKVQNMLNAMDLVSVQIFGEFAGGGIQKGVDYGDKDFYVFDILSRSGNEKVYWDDYRDESFVTTVGLKLAPLLGRGSFAELSQYPNDFKSLVNRYNEMVDTVGLEMANKHVFGPQASSETGLAEGYVLKPVYPIFFNTGTRVAIKCKNSKFSEKAKLDSPISAKVELTENDKRLLEIFSEYVTWNRVSNVLSHIGSVTAKDFGRVSGLTMKDIINEAAREGHDLLFADNPSAVLKELTGLIQNTIRSKWHEVLE

SEQ ID NO: 1457 - DNA, 1038 bp, synthetic construct
  misc_feature 1..1038: note = variant of RNA ligase 2 from Klebsiella phage KP179
  source 1..1038: mol_type = other DNA
atgcatcaccatcaccatcacggtggcagcaacatgtttgcgtattattcaagtctggaaaaccattacaatgctaagttcattgagaagatccgtggtgcaggcttcctgatgcacaccgtggaatgggtagctcgcgagaagattcatggaacgaactttagcgttatcattactccgaccgaaatcgtcccagccaaacgcacagggccgatcttggaaggcgagtcgttctttggtcacgaaattatcatgaaaaaatatatggactccttcgtgaaggtccagaacatgctgaatgccatggatcttgttagcgtgcaaatctttggcgaatttgcgggtggtggcattcagaaaggcgtcaaatacggagacaaagatttctatgtgtttgacatcctgtctgatagcgggaacgagaaaacctactgggatgactatcgcgatgaatcgttttgcaccactgtgggtctgaaattagcgcctctgctgggacgtggtagtttcgctgaactgtcccagtacccaaacgatttcaaaagcctggtgaaccgttataatgaattggttgacacggtcggcctggagatggccaataaacacgtctttggtccgcaagcgtcttctgaaactggcctggcagaaggctacgttcttaaacccgtctatccgatcttctttaataccggtacgcgcgtggcgattaaatgcaagaactccaaattttcggagaaagccaagctggactcgccaattagtgcgaaggttgaactgacggagaacgataaacgtctgctcgaaatctttagcgagtatgttacctggaatcgcgtcagtaacgtactgtcacatattggctcagtgaccgcaaaagattttgggcgtgtttcgggtctgacgatgaaagacatcattaatgaagcagcacgcgaaggccatgatctgttgttcgctgataacccgtcggcggtgctgaaggagctgactggcctcatccagaacacgattcgctccaaatggcacgaagttctggag

SEQ ID NO: 1458 - protein, 346 aa, synthetic construct
  REGION 1..346: note = variant of RNA ligase 2 from Klebsiella phage KP179
MHHHHHHGGSNMFAYYSSLENHYNAKFIEKIRGAGFLMHTVEWVAREKIHGTNFSVIITPTEIVPAKRTGPILEGESFFGHEIIMKKYMDSFVKVQNMLNAMDLVSVQIFGEFAGGGIQKGVKYGDKDFYVFDILSDSGNEKTYWDDYRDESFCTTVGLKLAPLLGRGSFAELSQYPNDFKSLVNRYNELVDTVGLEMANKHVFGPQASSETGLAEGYVLKPVYPIFFNTGTRVAIKCKNSKFSEKAKLDSPISAKVELTENDKRLLEIFSEYVTWNRVSNVLSHIGSVTAKDFGRVSGLTMKDIINEAAREGHDLLFADNPSAVLKELTGLIQNTIRSKWHEVLE

SEQ ID NO: 1459 - DNA, 1038 bp, synthetic construct
  misc_feature 1..1038: note = variant of RNA ligase 2 from Klebsiella phage KP179
  source 1..1038: mol_type = other DNA
atgcatcaccatcaccatcacggtggcagcaacatgtttgcgtattattcaagtctggaaaaccattacaatgctaagttcattgagaagatccgtggtgcaggcttcctgatgcacaccgtggaatgggtagctcgcgagaagattcatggaacgaactttagcgttatcattactgcgaccgaaatcgtcccagccaaacgcacagggccgatcttggaaggcgagtcgttctttggtcacgaaattatcatgaaaaaatatatggactccttcgtgaaggtgcagaacatgctgaatgccatggataccgttagcgtgcaaatctttggcgaatttgcgggtggtggcattcagaaaggcgtcgattacggagacaaagatttctatgtgtttgacatcctgtctgatagcgggaacgagaaagcgtactgggatgactatcgcgatgaatcgttttgcaccactgtgggtctgaaattagcgcctctgctgggacgtggtagtttcgctgaactgtcccagtacccaaacgatttcaaaagcctggtgaaccgttataatgaattggttgacacggtcggcctggagatggccaataaacacgtctttggtccgcaagcgtcttctgaaactcgcctggcagaaggctacgttcttaaacccgtctatccgatcttctttaataccggtacgcgcgtggcgattaaatgcaagaactccaaattttcggagaaagccaagctggactcgccaattagtgcgaaggttgaactgacggagaacgataaacgtctgctcgaaatctttagcgagtatgttacctggaatcgcgtcagtaacgtactgtcacatattggctcagtgaccgcaaaagattttgggcgtgtttcgggtctgacgatgaaagacatcattaatgaagcagcacgcgaaggccatgatctgttgttcgctgataacccgtcggcggtgctgaaggagctgactggcctcatccagaacacgattcgctccaaatggcacgaagttctggag

SEQ ID NO: 1460 - protein, 346 aa, synthetic construct
  REGION 1..346: note = variant of RNA ligase 2 from Klebsiella phage KP179
MHHHHHHGGSNMFAYYSSLENHYNAKFIEKIRGAGFLMHTVEWVAREKIHGTNFSVIITATEIVPAKRTGPILEGESFFGHEIIMKKYMDSFVKVQNMLNAMDTVSVQIFGEFAGGGIQKGVDYGDKDFYVFDILSDSGNEKAYWDDYRDESFCTTVGLKLAPLLGRGSFAELSQYPNDFKSLVNRYNELVDTVGLEMANKHVFGPQASSETRLAEGYVLKPVYPIFFNTGTRVAIKCKNSKFSEKAKLDSPISAKVELTENDKRLLEIFSEYVTWNRVSNVLSHIGSVTAKDFGRVSGLTMKDIINEAAREGHDLLFADNPSAVLKELTGLIQNTIRSKWHEVLE

SEQ ID NO: 1461 - DNA, 1038 bp, synthetic construct
  misc_feature 1..1038: note = variant of RNA ligase 2 from Klebsiella phage KP179
  source 1..1038: mol_type = other DNA
atgcatcaccatcaccatcacggtggcagcaacatgtttgcgtattattcaagtctggaaaaccattacaatgctaagttcattgagaagatccgtggtgcaggcttcctgatgcacaccgtggaatgggtagctcgcgagaagattcatggaacgaactttagcgttatcattactgcgaccgaaatcgtcccagccaaacgcacagggccgatcttggaaggcgagtcgttctttggtcacgaaattatcatgaaaaaatatatggactccttcgtgaagggccagaacatgctgaatgccatggatcttgttagcgtgcaaatctttggcgaatttgcgggtggtggcattcagaaaggcgtcgattacggagacaaagatttctatgtgtttgacatcctgtctgatagcgggaacgagaaaacctactgggatgactatcgcgtcgaatcgttttgcaccactgtgggtctgaaattagcgcctctgctgggacgtggtagtttcgctgaactgtcccagtacccaaacgatttcaaaagcctggtgaaccgttataatgaaatggttgacacggtcggcctggagatggccaataaacacgtctttggtccgcaagcgtcttctgaaactggcctggcagaaggctacgttcttaaacccgtctatccgatcttctttaataccggtacgcgcgtggcgattaaatgcaagaactccaaattttcggagaaagccaagctggactcgccaattagtgcgaaggttgaactgacggagaacgataaacgtctgctcgaaatctttagcgagtatgttacctggaatcgcgtcagtaacgtactgtcacatattggctcagtgaccgcaaaagattttgggcgtgtttcgggtctgacgatgaaagacatcattaatgaagcagcacgcgaaggccatgatctgttgttcgctgataacccgtcggcggtgctgaaggagctgactggcctcatccagaacacgattcgctccaaatggcacgaagttctggag

SEQ ID NO: 1462 - protein, 346 aa, synthetic construct
  REGION 1..346: note = variant of RNA ligase 2 from Klebsiella phage KP179
MHHHHHHGGSNMFAYYSSLENHYNAKFIEKIRGAGFLMHTVEWVAREKIHGTNFSVIITATEIVPAKRTGPILEGESFFGHEIIMKKYMDSFVKGQNMLNAMDLVSVQIFGEFAGGGIQKGVDYGDKDFYVFDILSDSGNEKTYWDDYRVESFCTTVGLKLAPLLGRGSFAELSQYPNDFKSLVNRYNEMVDTVGLEMANKHVFGPQASSETGLAEGYVLKPVYPIFFNTGTRVAIKCKNSKFSEKAKLDSPISAKVELTENDKRLLEIFSEYVTWNRVSNVLSHIGSVTAKDFGRVSGLTMKDIINEAAREGHDLLFADNPSAVLKELTGLIQNTIRSKWHEVLE

SEQ ID NO: 1463 - DNA, 1038 bp, synthetic construct
  misc_feature 1..1038: note = variant of RNA ligase 2 from Klebsiella phage KP179
  source 1..1038: mol_type = other DNA
atgcatcaccatcaccatcacggtggcagcaacatgtttgcgtattattcaagtctggaaaaccattacaatgctaagttcattgagaagatccgtggtgcaggcttcctgatgcacaccgtggaatgggtagctcgcgagaagattcatggaacgaactttagcgttatcattactccgaccgaaatcgtcccagccaaacgcacagggccgatcttggaaggcgagtcgttctttggtcacgaaattatcatgaaaaaatatatggactccttcgtgaaggtgcagaacatgctgaatgccatggatcttgttagcgtgcaaatctttggcgaatttgcgggtggtggcattcagaaaggcgtccgctacggagacaaagatttctatgtgtttgacatcctgtctcgcagcgggaacgagaaagtttactgggatgactatcgcgttgaatcgttttgcaccactgtgggtctgaaattagcgcctctgctgggacgtggtagtttcgctgaactgtcccagtacccaaacgatttcaaaagcctggtgaaccgttataatgaaatggttgacacggtcggcctggagatggccaataaacacgtctttggtccgcaagcgtcttctgaaactggcctggcagaaggctacgttcttaaacccgtctatccgatcttctttaataccggtacgcgcgtggcgattaaatgcaagaactccaaattttcggagaaagccaagctggactcgccaattagtgcgaaggttgaactgacggagaacgataaacgtctgctcgaaatctttagcgagtatgttacctggaatcgcgtcagtaacgtactgtcacatattggctcagtgaccgcaaaagattttgggcgtgtttcgggtctgacgatgaaagacatcattaatgaagcagcacgcgaaggccatgatctgttgttcgctgataacccgtcggcggtgctgaaggagctgactggcctcatccagaacacgattcgctccaaatggcacgaagttctggag

SEQ ID NO: 1464 - protein, 346 aa, synthetic construct
  REGION 1..346: note = variant of RNA ligase 2 from Klebsiella phage KP179
MHHHHHHGGSNMFAYYSSLENHYNAKFIEKIRGAGFLMHTVEWVAREKIHGTNFSVIITPTEIVPAKRTGPILEGESFFGHEIIMKKYMDSFVKVQNMLNAMDLVSVQIFGEFAGGGIQKGVRYGDKDFYVFDILSRSGNEKVYWDDYRVESFCTTVGLKLAPLLGRGSFAELSQYPNDFKSLVNRYNEMVDTVGLEMANKHVFGPQASSETGLAEGYVLKPVYPIFFNTGTRVAIKCKNSKFSEKAKLDSPISAKVELTENDKRLLEIFSEYVTWNRVSNVLSHIGSVTAKDFGRVSGLTMKDIINEAAREGHDLLFADNPSAVLKELTGLIQNTIRSKWHEVLE

SEQ ID NO: 1465 - DNA, 1038 bp, synthetic construct
  misc_feature 1..1038: note = variant of RNA ligase 2 from Klebsiella phage KP179
  source 1..1038: mol_type = other DNA
atgcatcaccatcaccatcacggtggcagcaacatgtttgcgtattattcaagtctggaaaaccattacaatgctaagttcattgagaagatccgtggtgcaggcttcctgatgcacaccgtggaatgggtagctcgcgagaagattcatggaacgaactttagcgttatcattactgcgaccgaaatcgtcccagccaaacgcacagggccgatcttggaaggcgagtcgttctttggtcacgaaattatcatgaaaaaatatatggactccttcgtgaaggtgcagaacatgctgaatgccatggatcttgttagcgtgcaaatctttggcgaatttgcgggtggtggcattcagaaaggcgtccgctacggagacaaagatttctatgtgtttgacatcctgtctgatagcgggaacgagaaagtttactgggatgactatcgcgttgaatcgttttgcaccactgtgggtctgaaattagcgcctctgctgggacgtggtagtttcgctgaactgtcccagtacccaaacgatttcaaaagcctggtgaaccgttataatgaactggttgacacggtcggcctggagatggccaataaacacgtctttggtccgcaagcgtcttctgaaactggcctggcagaaggctacgttcttaaacccgtctatccgatcttctttaataccggtacgcgcgtggcgattaaatgcaagaactccaaattttcggagaaagccaagctggactcgccaattagtgcgaaggttgaactgacggagaacgataaacgtctgctcgaaatctttagcgagtatgttacctggaatcgcgtcagtaacgtactgtcacatattggctcagtgaccgcaaaagattttgggcgtgtttcgggtctgacgatgaaagacatcattaatgaagcagcacgcgaaggccatgatctgttgttcgctgataacccgtcggcggtgctgaaggagctgactggcctcatccagaacacgattcgctccaaatggcacgaagttctggag

SEQ ID NO: 1466 - protein, 346 aa, synthetic construct
  REGION 1..346: note = variant of RNA ligase 2 from Klebsiella phage KP179
MHHHHHHGGSNMFAYYSSLENHYNAKFIEKIRGAGFLMHTVEWVAREKIHGTNFSVIITATEIVPAKRTGPILEGESFFGHEIIMKKYMDSFVKVQNMLNAMDLVSVQIFGEFAGGGIQKGVRYGDKDFYVFDILSDSGNEKVYWDDYRVESFCTTVGLKLAPLLGRGSFAELSQYPNDFKSLVNRYNELVDTVGLEMANKHVFGPQASSETGLAEGYVLKPVYPIFFNTGTRVAIKCKNSKFSEKAKLDSPISAKVELTENDKRLLEIFSEYVTWNRVSNVLSHIGSVTAKDFGRVSGLTMKDIINEAAREGHDLLFADNPSAVLKELTGLIQNTIRSKWHEVLE

SEQ ID NO: 1467 - DNA, 1038 bp, synthetic construct
  misc_feature 1..1038: note = variant of RNA ligase 2 from Klebsiella phage KP179
  source 1..1038: mol_type = other DNA
atgcatcaccatcaccatcacggtggcagcaacatgtttgcgtattattcaagtctggaaaaccattacaatgctaagttcattgagaagatccgtggtgcaggcttcctgatgcacaccgtggaatgggtagctcgcgagaagattcatggaacgaactttagcgttatcattactccgaccgaaatcgtcccagccaaacgcacagggccgatcttggaaggcgagtcgttctttggtcacgaaattatcatgaaaaaatatatggactccttcgtgaaggtgcagaacatgctgaatgccatggataccgttagcgtgcaaatctttggcgaatttgcgggtggtggcattcagaaaggcgtccgctacggagacaaagatttctatgtgtttgacatcctgtctgatagcgggaacgagaaagtttactgggatgactatcgcgtcgaatcgttttgcaccactgtgggtctgaaattagcgcctctgctgggacgtggtagtttcgctgaactgtcccagtacccaaacgatttcaaaagcctggtgaaccgttataatgaactggttgacacggtcggcctggagatggccaataaacacgtctttggtccgcaagcgtcttctgaaactggcctggcagaaggctacgttcttaaacccgtctatccgatcttctttaataccggtacgcgcgtggcgattaaatgcaagaactccaaattttcggagaaagccaagctggactcgccaattagtgcgaaggttgaactgacggagaacgataaacgtctgctcgaaatctttagcgagtatgttacctggaatcgcgtcagtaacgtactgtcacatattggctcagtgaccgcaaaagattttgggcgtgtttcgggtctgacgatgaaagacatcattaatgaagcagcacgcgaaggccatgatctgttgttcgctgataacccgtcggcggtgctgaaggagctgactggcctcatccagaacacgattcgctccaaatggcacgaagttctggag

SEQ ID NO: 1468 - protein, 346 aa, synthetic construct
  REGION 1..346: note = variant of RNA ligase 2 from Klebsiella phage KP179
MHHHHHHGGSNMFAYYSSLENHYNAKFIEKIRGAGFLMHTVEWVAREKIHGTNFSVIITPTEIVPAKRTGPILEGESFFGHEIIMKKYMDSFVKVQNMLNAMDTVSVQIFGEFAGGGIQKGVRYGDKDFYVFDILSDSGNEKVYWDDYRVESFCTTVGLKLAPLLGRGSFAELSQYPNDFKSLVNRYNELVDTVGLEMANKHVFGPQASSETGLAEGYVLKPVYPIFFNTGTRVAIKCKNSKFSEKAKLDSPISAKVELTENDKRLLEIFSEYVTWNRVSNVLSHIGSVTAKDFGRVSGLTMKDIINEAAREGHDLLFADNPSAVLKELTGLIQNTIRSKWHEVLE

SEQ ID NO: 1469 - DNA, 1038 bp, synthetic construct
  misc_feature 1..1038: note = variant of RNA ligase 2 from Klebsiella phage KP179
  source 1..1038: mol_type = other DNA
atgcatcaccatcaccatcacggtggcagcaacatgtttgcgtattattcaagtctggaaaaccattacaatgctaagttcattgagaagatccgtggtgcaggcttcctgatgcacaccgtggaatgggtagctcgcgagaagattcatggaacgaactttagcgttatcattactgcgaccgaaatcgtcccagccaaacgcacagggccgatcttggaaggcgagtcgttctttggtcacgaaattatcatgaaaaaatatatggactccttcgtgaaggtgcagaacatgctgaatgccatggatcttgttagcgtgcaaatctttggcgaatttgcgggtggtggcattcagaaaggcgtccgctacggagacaaagatttctatgtgtttgacatcctgtctgatagcgggaacgagaaagcgtactgggatgactatcgcgtcgaatcgttttgcaccactgtgggtctgaaattagcgcctctgctgggacgtggtagtttcgctgaactgtcccagtacccaaacgatttcaaaagcctggtgaaccgttataatgaattggttgacacggtcggcctggagatggccaataaacacgtctttggtccgcaagcgtcttctgaaactggcctggcagaaggctacgttcttaaacccgtctatccgatcttctttaataccggtacgcgcgtggcgattaaatgcaagaactccaaattttcggagaaagccaagctggactcgccaattagtgcgaaggttgaactgacggagaacgataaacgtctgctcgaaatctttagcgagtatgttacctggaatcgcgtcagtaacgtactgtcacatattggctcagtgaccgcaaaagattttgggcgtgtttcgggtctgacgatgaaagacatcattaatgaagcagcacgcgaaggccatgatctgttgttcgctgataacccgtcggcggtgctgaaggagctgactggcctcatccagaacacgattcgctccaaatggcacgaagttctggag

SEQ ID NO: 1470 - protein, 346 aa, synthetic construct
  REGION 1..346: note = variant of RNA ligase 2 from Klebsiella phage KP179
MHHHHHHGGSNMFAYYSSLENHYNAKFIEKIRGAGFLMHTVEWVAREKIHGTNFSVIITATEIVPAKRTGPILEGESFFGHEIIMKKYMDSFVKVQNMLNAMDLVSVQIFGEFAGGGIQKGVRYGDKDFYVFDILSDSGNEKAYWDDYRVESFCTTVGLKLAPLLGRGSFAELSQYPNDFKSLVNRYNELVDTVGLEMANKHVFGPQASSETGLAEGYVLKPVYPIFFNTGTRVAIKCKNSKFSEKAKLDSPISAKVELTENDKRLLEIFSEYVTWNRVSNVLSHIGSVTAKDFGRVSGLTMKDIINEAAREGHDLLFADNPSAVLKELTGLIQNTIRSKWHEVLE

SEQ ID NO: 1471-1476 - skipped (6 entries)

SEQ ID NO: 1477 - DNA, 1038 bp, synthetic construct
  misc_feature 1..1038: note = variant of RNA ligase 2 from Klebsiella phage KP179
  source 1..1038: mol_type = other DNA
atgcatcaccatcaccatcacggtggcagcaacatgtttgcgtattattcaagtctggaaaaccattacaatgctaagttcattgagaagatccgtggtgcaggcttcctggtgcacaccgtggaatgggtagctcgcgagaagattcatggaacgaactttagcgttatcattactccgaccgaaatcgtcccagccaaacgcacagggccgatcttggaaggcgagtcgttctttggtcacgaaattatcatgaaaaaatatatggactccttcgtgaaggtgcagaacatgctgaatgccatggatcttgttagcgtgcaaatctttggcgaatttgcgggtggtggcattcagaaaggcgtcgattacggagacaaagatttctatgtgtttgacatcctgtctgatagcgggaacgagaaagtttactgggatgactatcgcgtcgaatcgttttgcaccactgtgggtctgaaattagcgcctctgctgggacgtggtagtttcgctgaactgtcccagtacccaaacgatttcaaaagcctggtgaaccgttataatgaattggttgacacggtcggcctggagatggccaataaacacgtctttggtccgcaagcgtcttctgaaactggcctggcagaaggctacgttcttaaacccgtctatccgatcttctttaataccggtacgcgcgtggcgattaaatgcaagaactccaaattttcggagaaagccaagctggactcgccaattagtgcgaaggttgaactgacggagaacgataaacgtctgctcgaaatctttagcgagtatgttacctggaatcgcgtcagtaacgtactgtcacatattggctcagtgaccgcaaaagattttgggcgtgtttcgggtctgacgatgaaagacatcattaatgaagcagcacgcgaaggccatgatctgttgttcgctgataacccgtcggcggtgctgaaggagctgactggcctcatccagaacacgattcgctccaaatggcacgaagttctggag

SEQ ID NO: 1478 - protein, 346 aa, synthetic construct
  REGION 1..346: note = variant of RNA ligase 2 from Klebsiella phage KP179
MHHHHHHGGSNMFAYYSSLENHYNAKFIEKIRGAGFLVHTVEWVAREKIHGTNFSVIITPTEIVPAKRTGPILEGESFFGHEIIMKKYMDSFVKVQNMLNAMDLVSVQIFGEFAGGGIQKGVDYGDKDFYVFDILSDSGNEKVYWDDYRVESFCTTVGLKLAPLLGRGSFAELSQYPNDFKSLVNRYNELVDTVGLEMANKHVFGPQASSETGLAEGYVLKPVYPIFFNTGTRVAIKCKNSKFSEKAKLDSPISAKVELTENDKRLLEIFSEYVTWNRVSNVLSHIGSVTAKDFGRVSGLTMKDIINEAAREGHDLLFADNPSAVLKELTGLIQNTIRSKWHEVLE

SEQ ID NO: 1479 - DNA, 1038 bp, synthetic construct
  misc_feature 1..1038: note = variant of RNA ligase 2 from Klebsiella phage KP179
  source 1..1038: mol_type = other DNA
atgcatcaccatcaccatcacggtggcagcaacatgtttgcgtattattcaagtctggaaaaccattacaatgctaagttcattgagaagatccgtggtgcaggcttcctgatgcacaccgtggaatgggtagctcgcgagaagattcatggaacgaactttagcgttatcattactccgaccgaaatcgtcccagccaaacgcacagggccgatcttggaaggcgagtcgttctttggtcacgaaattatcatgaaaaaatatatggactccttcgtgaaggtgcagaacatgctgaatgccatggatcttgttagcgtgcaaatctttggcgaatttgcgggtggtggcattcagaaaggcgtcgattacggagacaaagatttctatgtgtttgacatcctgtctgatagcgggaacgagaaagtttactgggatgactatcgcgtcgaatcgttttgcaccactgtgggtctgaaattagcgcctctgctgggacgtggtagtttcgctgaactgtcccagtacccaaacgatttcaaaagcctggtgaaccgttataatgaattggttgacacggtcggcctggagatggccaataaacacgtctttggtccgcaagcgtcttctgaaactggcctggcagaaggctacgttcttaaacccgtctatccgatcttctttaataccggtacgcgcgtggcgattaaatgcaagaactccaaattttcggagaaagccaagaaggactcgccaattagtgcgaaggttgaactgacggagaacgataaacgtctgctcgaaatctttagcgagtatgttacctggaatcgcgtcagtaacgtactgtcacatattggctcagtgaccgcaaaagattttgggcgtgtttcgggtctgacgatgaaagacatcattaatgaagcagcacgcgaaggccatgatctgttgttcgctgataacccgtcggcggtgctgaaggagctgactggcctcatccagaacacgattcgctccaaatggcacgaagttctggag

SEQ ID NO: 1480 - protein, 346 aa, synthetic construct
  REGION 1..346: note = variant of RNA ligase 2 from Klebsiella phage KP179
MHHHHHHGGSNMFAYYSSLENHYNAKFIEKIRGAGFLMHTVEWVAREKIHGTNFSVIITPTEIVPAKRTGPILEGESFFGHEIIMKKYMDSFVKVQNMLNAMDLVSVQIFGEFAGGGIQKGVDYGDKDFYVFDILSDSGNEKVYWDDYRVESFCTTVGLKLAPLLGRGSFAELSQYPNDFKSLVNRYNELVDTVGLEMANKHVFGPQASSETGLAEGYVLKPVYPIFFNTGTRVAIKCKNSKFSEKAKKDSPISAKVELTENDKRLLEIFSEYVTWNRVSNVLSHIGSVTAKDFGRVSGLTMKDIINEAAREGHDLLFADNPSAVLKELTGLIQNTIRSKWHEVLE

SEQ ID NO: 1481 - DNA, 1038 bp, synthetic construct
  misc_feature 1..1038: note = variant of RNA ligase 2 from Klebsiella phage KP179
  source 1..1038: mol_type = other DNA
atgcatcaccatcaccatcacggtggcagcaacatgtttgcgtattattcaagtctggaaaaccattacaatgctaagttcattgagaagatccgtggtgcaggcttcctgatgcacaccgtggaatgggtagctcgcgagaagattcatggaacgaactttagcgttatcattactccgaccgaaatcgtcccagccaaacgcacagggccgatcttggaaggcgagtcgttctttggtcacgaaattatcatgaaaaaatatatggactccttcgtgaaggtgcagaacatgctgaatgccatggatcttgttagcgtgcaaatctttggcgaatttgcgggtggtggcattcagaaaggcgtcgattacggagacaaagatttctatgtgtttgacatcctgtctgatagcgggaacgagaaagtttactgggatgactatcgcgtcgaatcgttttgcaccactgtgggtctgaaattagcgcctctgctgggacgtggtagtttcgctgaactgtcccagtacccaaacgatttcaaaagcctggtgaaccgttataatgaattggttgacacggtcggcctggagatggccaataaacacgtctttggtccgcaagcgtcttctgaaactggcctggcagaaggctacgttcttaaacccgtctatccgatcttctttaataccggtacgcgcgtggcgattaaatgcaagaactccaaattttcggagaaagccaagctggactcgccaattagtagtaaggttgaactgacggagaacgataaacgtctgctcgaaatctttagcgagtatgttacctggaatcgcgtcagtaacgtactgtcacatattggctcagtgaccgcaaaagattttgggcgtgtttcgggtctgacgatgaaagacatcattaatgaagcagcacgcgaaggccatgatctgttgttcgctgataacccgtcggcggtgctgaaggagctgactggcctcatccagaacacgattcgctccaaatggcacgaagttctggag

SEQ ID NO: 1482 - protein, 346 aa, synthetic construct
  REGION 1..346: note = variant of RNA ligase 2 from Klebsiella phage KP179
MHHHHHHGGSNMFAYYSSLENHYNAKFIEKIRGAGFLMHTVEWVAREKIHGTNFSVIITPTEIVPAKRTGPILEGESFFGHEIIMKKYMDSFVKVQNMLNAMDLVSVQIFGEFAGGGIQKGVDYGDKDFYVFDILSDSGNEKVYWDDYRVESFCTTVGLKLAPLLGRGSFAELSQYPNDFKSLVNRYNELVDTVGLEMANKHVFGPQASSETGLAEGYVLKPVYPIFFNTGTRVAIKCKNSKFSEKAKLDSPISSKVELTENDKRLLEIFSEYVTWNRVSNVLSHIGSVTAKDFGRVSGLTMKDIINEAAREGHDLLFADNPSAVLKELTGLIQNTIRSKWHEVLE

SEQ ID NO: 1483 - DNA, 1038 bp, synthetic construct
  misc_feature 1..1038: note = variant of RNA ligase 2 from Klebsiella phage KP179
  source 1..1038: mol_type = other DNA
atgcatcaccatcaccatcacggtggcagcaacatgtttgcgtattattcaagtctggaaaaccataagaatgctaagttcattgagaagatccgtggtgcaggcttcctgatgcacaccgtggaatgggtagctcgcgagaagattcatggaacgaactttagcgttatcattactccgaccgaaatcgtcccagccaaacgcacagggccgatcttggaaggcgagtcgttctttggtcacgaaattatcatgaaaaaatatatggactccttcgtgaaggtgcagaacatgctgaatgccatggatcttgttagcgtgcaaatctttggcgaatttgcgggtggtggcattcagaaaggcgtcgattacggagacaaagatttctatgtgtttgacatcctgtctgatagcgggaacgagaaagtttactgggatgactatcgcgtcgaatcgttttgcaccactgtgggtctgaaattagcgcctctgctgggacgtggtagtttcgctgaactgtcccagtacccaaacgatttcaaaagcctggtgaaccgttataatgaattggttgacacggtcggcctggagatggccaataaacacgtctttggtccgcaagcgtcttctgaaactggcctggcagaaggctacgttcttaaacccgtctatccgatcttctttaataccggtacgcgcgtggcgattaaatgcaagaactccaaattttcggagaaagccaagctggactcgccaattagtgcgaaggttgaactgacggagaacgataaacgtctgctcgaaatctttagcgagtatgttacctggaatcgcgtcagtaacgtactgtcacatattggctcagtgaccgcaaaagattttgggcgtgtttcgggtctgacgatgaaagacatcattaatgaagcagcacgcgaaggccatgatctgttgttcgctgataacccgtcggcggtgctgaaggagctgactggcctcatccagaacacgattcgctccaaatggcacgaagttctggag

SEQ ID NO: 1484 - protein, 346 aa, synthetic construct
  REGION 1..346: note = variant of RNA ligase 2 from Klebsiella phage KP179
MHHHHHHGGSNMFAYYSSLENHKNAKFIEKIRGAGFLMHTVEWVAREKIHGTNFSVIITPTEIVPAKRTGPILEGESFFGHEIIMKKYMDSFVKVQNMLNAMDLVSVQIFGEFAGGGIQKGVDYGDKDFYVFDILSDSGNEKVYWDDYRVESFCTTVGLKLAPLLGRGSFAELSQYPNDFKSLVNRYNELVDTVGLEMANKHVFGPQASSETGLAEGYVLKPVYPIFFNTGTRVAIKCKNSKFSEKAKLDSPISAKVELTENDKRLLEIFSEYVTWNRVSNVLSHIGSVTAKDFGRVSGLTMKDIINEAAREGHDLLFADNPSAVLKELTGLIQNTIRSKWHEVLE

SEQ ID NO: 1485 - DNA, 1038 bp, synthetic construct
  misc_feature 1..1038: note = variant of RNA ligase 2 from Klebsiella phage KP179
  source 1..1038: mol_type = other DNA
atgcatcaccatcaccatcacggtggcagcaacatgtttgcgtattattcaagtctggaaaaccattacaatgctaagttcattgagaagatccgtctggcaggcttcctgatgcacaccgtggaatgggtagctcgcgagaagattcatggaacgaactttagcgttatcattactccgaccgaaatcgtcccagccaaacgcacagggccgatcttggaaggcgagtcgttctttggtcacgaaattatcatgaaaaaatatatggactccttcgtgaaggtgcagaacatgctgaatgccatggatcttgttagcgtgcaaatctttggcgaatttgcgggtggtggcattcagaaaggcgtcgattacggagacaaagatttctatgtgtttgacatcctgtctgatagcgggaacgagaaagtttactgggatgactatcgcgtcgaatcgttttgcaccactgtgggtctgaaattagcgcctctgctgggacgtggtagtttcgctgaactgtcccagtacccaaacgatttcaaaagcctggtgaaccgttataatgaattggttgacacggtcggcctggagatggccaataaacacgtctttggtccgcaagcgtcttctgaaactggcctggcagaaggctacgttcttaaacccgtctatccgatcttctttaataccggtacgcgcgtggcgattaaatgcaagaactccaaattttcggagaaagccaagctggactcgccaattagtgcgaaggttgaactgacggagaacgataaacgtctgctcgaaatctttagcgagtatgttacctggaatcgcgtcagtaacgtactgtcacatattggctcagtgaccgcaaaagattttgggcgtgtttcgggtctgacgatgaaagacatcattaatgaagcagcacgcgaaggccatgatctgttgttcgctgataacccgtcggcggtgctgaaggagctgactggcctcatccagaacacgattcgctccaaatggcacgaagttctggag

SEQ ID NO: 1486 - protein, 346 aa, synthetic construct
  REGION 1..346: note = variant of RNA ligase 2 from Klebsiella phage KP179
MHHHHHHGGSNMFAYYSSLENHYNAKFIEKIRLAGFLMHTVEWVAREKIHGTNFSVIITPTEIVPAKRTGPILEGESFFGHEIIMKKYMDSFVKVQNMLNAMDLVSVQIFGEFAGGGIQKGVDYGDKDFYVFDILSDSGNEKVYWDDYRVESFCTTVGLKLAPLLGRGSFAELSQYPNDFKSLVNRYNELVDTVGLEMANKHVFGPQASSETGLAEGYVLKPVYPIFFNTGTRVAIKCKNSKFSEKAKLDSPISAKVELTENDKRLLEIFSEYVTWNRVSNVLSHIGSVTAKDFGRVSGLTMKDIINEAAREGHDLLFADNPSAVLKELTGLIQNTIRSKWHEVLE

SEQ ID NO: 1487 - DNA, 1038 bp, synthetic construct
  misc_feature 1..1038: note = variant of RNA ligase 2 from Klebsiella phage KP179
  source 1..1038: mol_type = other DNA
atgcatcaccatcaccatcacggtggcagcaacatgtttgcgtattattcaagtctggaaaaccattacaatgggaagttcattgagaagatccgtggtgcaggcttcctgatgcacaccgtggaatgggtagctcgcgagaagattcatggaacgaactttagcgttatcattactccgaccgaaatcgtcccagccaaacgcacagggccgatcttggaaggcgagtcgttctttggtcacgaaattatcatgaaaaaatatatggactccttcgtgaaggtgcagaacatgctgaatgccatggatcttgttagcgtgcaaatctttggcgaatttgcgggtggtggcattcagaaaggcgtcgattacggagacaaagatttctatgtgtttgacatcctgtctgatagcgggaacgagaaagtttactgggatgactatcgcgtcgaatcgttttgcaccactgtgggtctgaaattagcgcctctgctgggacgtggtagtttcgctgaactgtcccagtacccaaacgatttcaaaagcctggtgaaccgttataatgaattggttgacacggtcggcctggagatggccaataaacacgtctttggtccgcaagcgtcttctgaaactggcctggcagaaggctacgttcttaaacccgtctatccgatcttctttaataccggtacgcgcgtggcgattaaatgcaagaactccaaattttcggagaaagccaagctggactcgccaattagtgcgaaggttgaactgacggagaacgataaacgtctgctcgaaatctttagcgagtatgttacctggaatcgcgtcagtaacgtactgtcacatattggctcagtgaccgcaaaagattttgggcgtgtttcgggtctgacgatgaaagacatcattaatgaagcagcacgcgaaggccatgatctgttgttcgctgataacccgtcggcggtgctgaaggagctgactggcctcatccagaacacgattcgctccaaatggcacgaagttctggag

SEQ ID NO: 1488 - protein, 346 aa, synthetic construct
  REGION 1..346: note = variant of RNA ligase 2 from Klebsiella phage KP179
MHHHHHHGGSNMFAYYSSLENHYNGKFIEKIRGAGFLMHTVEWVAREKIHGTNFSVIITPTEIVPAKRTGPILEGESFFGHEIIMKKYMDSFVKVQNMLNAMDLVSVQIFGEFAGGGIQKGVDYGDKDFYVFDILSDSGNEKVYWDDYRVESFCTTVGLKLAPLLGRGSFAELSQYPNDFKSLVNRYNELVDTVGLEMANKHVFGPQASSETGLAEGYVLKPVYPIFFNTGTRVAIKCKNSKFSEKAKLDSPISAKVELTENDKRLLEIFSEYVTWNRVSNVLSHIGSVTAKDFGRVSGLTMKDIINEAAREGHDLLFADNPSAVLKELTGLIQNTIRSKWHEVLE

SEQ ID NO: 1489 - DNA, 1038 bp, synthetic construct
  misc_feature 1..1038: note = variant of RNA ligase 2 from Klebsiella phage KP179
  source 1..1038: mol_type = other DNA
atgcatcaccatcaccatcacggtggcagcaacatgtttgcgtattattcaagtctggaaaaccattacaatgctaagttcattgagaagatccgtggtgcaggcttcctgatgcacaccgtggaatgggtagctcgcgagaagattcatggaacgaactttagcgttatcattactccgaccgaaatcgtcccagccaaacgcacagggccgatcttggaaggcgagtcgttctttggtcacgaaattatcatgaaaaaatatatggactccttcgtgaaggtgcagaacatgctgaatgccatggatcttgttagcgtgcaaatctttggcgaatttgcgggtggtggcattcagaaaggcgtcgattacggagacaaagatttctatgtgtttgacatcctgtctgatagcgggaacgagaaagtttactgggatgactatcgcgtcgaatcgttttgcaccactgtgggtctgaaattagcgcctctgctgggacgtggtagtttcgctgaactgtcccagtacccaaacgatttcaaaagcctggtgaaccgttataatgaattggttgacacggtcggcctggagatggccaataaacacgtctttggtccgcaagcgtcttctgaaactggcctggcagaaggctacgttcttaaacccgtctatccgcgtttctttaataccggtacgcgcgtggcgattaaatgcaagaactccaaattttcggagaaagccaagctggactcgccaattagtgcgaaggttgaactgacggagaacgataaacgtctgctcgaaatctttagcgagtatgttacctggaatcgcgtcagtaacgtactgtcacatattggctcagtgaccgcaaaagattttgggcgtgtttcgggtctgacgatgaaagacatcattaatgaagcagcacgcgaaggccatgatctgttgttcgctgataacccgtcggcggtgctgaaggagctgactggcctcatccagaacacgattcgctccaaatggcacgaagttctggag

SEQ ID NO: 1490 - protein, 346 aa, synthetic construct
  REGION 1..346: note = variant of RNA ligase 2 from Klebsiella phage KP179
MHHHHHHGGSNMFAYYSSLENHYNAKFIEKIRGAGFLMHTVEWVAREKIHGTNFSVIITPTEIVPAKRTGPILEGESFFGHEIIMKKYMDSFVKVQNMLNAMDLVSVQIFGEFAGGGIQKGVDYGDKDFYVFDILSDSGNEKVYWDDYRVESFCTTVGLKLAPLLGRGSFAELSQYPNDFKSLVNRYNELVDTVGLEMANKHVFGPQASSETGLAEGYVLKPVYPRFFNTGTRVAIKCKNSKFSEKAKLDSPISAKVELTENDKRLLEIFSEYVTWNRVSNVLSHIGSVTAKDFGRVSGLTMKDIINEAAREGHDLLFADNPSAVLKELTGLIQNTIRSKWHEVLE

SEQ ID NO: 1491 - DNA, 1038 bp, synthetic construct
  misc_feature 1..1038: note = variant of RNA ligase 2 from Klebsiella phage KP179
  source 1..1038: mol_type = other DNA
atgcatcaccatcaccatcacggtggcagcaacatgtttgcgtattattcaagtctggaaaaccattacaatgctaagttcattgagaagatccgtggtgcaggcttcctgatgcacaccgtggaatgggtagctcgcgagaagattcatggaacgaactttagcgttatcattactccgaccgaaatcgtcccagccaaacgcacagggccgatcttggaaggcgagtcgttctttggtcacgaaattatcatgaaaaaatatatggactccttcgtgaaggtgcagaacatgctgaatgccatggatcttgttagcgtgcaaatctttggcgaatttgcgggtggtggcattcagaaaggcgtcgattacggagacaaagatttctatgtgtttgacatcctgtctgatagcgggaacgagaaagtttactgggatgactatcgcgtcgaatcgttttgcaccactgtgggtctgaaattagcgcctctgctgggacgtggtagtttcgctgaactgtcccagtacccaaacgatttcaaaagcctggtgaaccgttataatgaattggttgacacggtcggcctggagatggccaataaacacgtctttggtccgcaagcgtcttctgaaactggcctggcagaaggctacgttcttaaacccgtctatccgatcttctttaataccggtacgcgcgtggcgattaaatgcaagaactccaaattttcggagaaagccaagagtgactcgccaattagtgcgaaggttgaactgacggagaacgataaacgtctgctcgaaatctttagcgagtatgttacctggaatcgcgtcagtaacgtactgtcacatattggctcagtgaccgcaaaagattttgggcgtgtttcgggtctgacgatgaaagacatcattaatgaagcagcacgcgaaggccatgatctgttgttcgctgataacccgtcggcggtgctgaaggagctgactggcctcatccagaacacgattcgctccaaatggcacgaagttctggag

SEQ ID NO: 1492 - protein, 346 aa, synthetic construct
  REGION 1..346: note = variant of RNA ligase 2 from Klebsiella phage KP179
MHHHHHHGGSNMFAYYSSLENHYNAKFIEKIRGAGFLMHTVEWVAREKIHGTNFSVIITPTEIVPAKRTGPILEGESFFGHEIIMKKYMDSFVKVQNMLNAMDLVSVQIFGEFAGGGIQKGVDYGDKDFYVFDILSDSGNEKVYWDDYRVESFCTTVGLKLAPLLGRGSFAELSQYPNDFKSLVNRYNELVDTVGLEMANKHVFGPQASSETGLAEGYVLKPVYPIFFNTGTRVAIKCKNSKFSEKAKSDSPISAKVELTENDKRLLEIFSEYVTWNRVSNVLSHIGSVTAKDFGRVSGLTMKDIINEAAREGHDLLFADNPSAVLKELTGLIQNTIRSKWHEVLE

SEQ ID NO: 1493 - DNA, 1038 bp, synthetic construct
  misc_feature 1..1038: note = variant of RNA ligase 2 from Klebsiella phage KP179
  source 1..1038: mol_type = other DNA
atgcatcaccatcaccatcacggtggcagcaacatgtttgcgtattattcaagtctggaaaaccattacaatgctaagttcatttcgaagatccgtggtgcaggcttcctgatgcacaccgtggaatgggtagctcgcgagaagattcatggaacgaactttagcgttatcattactccgaccgaaatcgtcccagccaaacgcacagggccgatcttggaaggcgagtcgttctttggtcacgaaattatcatgaaaaaatatatggactccttcgtgaaggtgcagaacatgctgaatgccatggatcttgttagcgtgcaaatctttggcgaatttgcgggtggtggcattcagaaaggcgtcgattacggagacaaagatttctatgtgtttgacatcctgtctgatagcgggaacgagaaagtttactgggatgactatcgcgtcgaatcgttttgcaccactgtgggtctgaaattagcgcctctgctgggacgtggtagtttcgctgaactgtcccagtacccaaacgatttcaaaagcctggtgaaccgttataatgaattggttgacacggtcggcctggagatggccaataaacacgtctttggtccgcaagcgtcttctgaaactggcctggcagaaggctacgttcttaaacccgtctatccgatcttctttaataccggtacgcgcgtggcgattaaatgcaagaactccaaattttcggagaaagccaagctggactcgccaattagtgcgaaggttgaactgacggagaacgataaacgtctgctcgaaatctttagcgagtatgttacctggaatcgcgtcagtaacgtactgtcacatattggctcagtgaccgcaaaagattttgggcgtgtttcgggtctgacgatgaaagacatcattaatgaagcagcacgcgaaggccatgatctgttgttcgctgataacccgtcggcggtgctgaaggagctgactggcctcatccagaacacgattcgctccaaatggcacgaagttctggag

SEQ ID NO: 1494 - protein, 346 aa, synthetic construct
  REGION 1..346: note = variant of RNA ligase 2 from Klebsiella phage KP179
MHHHHHHGGSNMFAYYSSLENHYNAKFISKIRGAGFLMHTVEWVAREKIHGTNFSVIITPTEIVPAKRTGPILEGESFFGHEIIMKKYMDSFVKVQNMLNAMDLVSVQIFGEFAGGGIQKGVDYGDKDFYVFDILSDSGNEKVYWDDYRVESFCTTVGLKLAPLLGRGSFAELSQYPNDFKSLVNRYNELVDTVGLEMANKHVFGPQASSETGLAEGYVLKPVYPIFFNTGTRVAIKCKNSKFSEKAKLDSPISAKVELTENDKRLLEIFSEYVTWNRVSNVLSHIGSVTAKDFGRVSGLTMKDIINEAAREGHDLLFADNPSAVLKELTGLIQNTIRSKWHEVLE

SEQ ID NO: 1495 - DNA, 1038 bp, synthetic construct
  misc_feature 1..1038: note = variant of RNA ligase 2 from Klebsiella phage KP179
  source 1..1038: mol_type = other DNA
atgcatcaccatcaccatcacggtggcagcaacatgtttgcgtattattcaagtctggaaaaccattacaatgctaagttcattgagaagatccgtggtgcaggcttcatgatgcacaccgtggaatgggtagctcgcgagaagattcatggaacgaactttagcgttatcattactccgaccgaaatcgtcccagccaaacgcacagggccgatcttggaaggcgagtcgttctttggtcacgaaattatcatgaaaaaatatatggactccttcgtgaaggtgcagaacatgctgaatgccatggatcttgttagcgtgcaaatctttggcgaatttgcgggtggtggcattcagaaaggcgtcgattacggagacaaagatttctatgtgtttgacatcctgtctgatagcgggaacgagaaagtttactgggatgactatcgcgtcgaatcgttttgcaccactgtgggtctgaaattagcgcctctgctgggacgtggtagtttcgctgaactgtcccagtacccaaacgatttcaaaagcctggtgaaccgttataatgaattggttgacacggtcggcctggagatggccaataaacacgtctttggtccgcaagcgtcttctgaaactggcctggcagaaggctacgttcttaaacccgtctatccgatcttctttaataccggtacgcgcgtggcgattaaatgcaagaactccaaattttcggagaaagccaagctggactcgccaattagtgcgaaggttgaactgacggagaacgataaacgtctgctcgaaatctttagcgagtatgttacctggaatcgcgtcagtaacgtactgtcacatattggctcagtgaccgcaaaagattttgggcgtgtttcgggtctgacgatgaaagacatcattaatgaagcagcacgcgaaggccatgatctgttgttcgctgataacccgtcggcggtgctgaaggagctgactggcctcatccagaacacgattcgctccaaatggcacgaagttctggag

SEQ ID NO: 1496 - protein, 346 aa, synthetic construct
  REGION 1..346: note = variant of RNA ligase 2 from Klebsiella phage KP179
MHHHHHHGGSNMFAYYSSLENHYNAKFIEKIRGAGFMMHTVEWVAREKIHGTNFSVIITPTEIVPAKRTGPILEGESFFGHEIIMKKYMDSFVKVQNMLNAMDLVSVQIFGEFAGGGIQKGVDYGDKDFYVFDILSDSGNEKVYWDDYRVESFCTTVGLKLAPLLGRGSFAELSQYPNDFKSLVNRYNELVDTVGLEMANKHVFGPQASSETGLAEGYVLKPVYPIFFNTGTRVAIKCKNSKFSEKAKLDSPISAKVELTENDKRLLEIFSEYVTWNRVSNVLSHIGSVTAKDFGRVSGLTMKDIINEAAREGHDLLFADNPSAVLKELTGLIQNTIRSKWHEVLE

SEQ ID NO: 1497 - DNA, 1038 bp, synthetic construct
  misc_feature 1..1038: note = variant of RNA ligase 2 from Klebsiella phage KP179
  source 1..1038: mol_type = other DNA
atgcatcaccatcaccatcacggtggcagcaacatgtttgcgtattattcaagtctggaaaaccattacaatgctaagttcattgagaagatccgtggtgcaggcttcctggctcacaccgtggaatgggtagctcgcgagaagattcatggaacgaactttagcgttatcattactccgaccgaaatcgtcccagccaaacgcacagggccgatcttggaaggcgagtcgttctttggtcacgaaattatcatgaaaaaatatatggactccttcgtgaaggtgcagaacatgctgaatgccatggatcttgttagcgtgcaaatctttggcgaatttgcgggtggtggcattcagaaaggcgtcgattacggagacaaagatttctatgtgtttgacatcctgtctgatagcgggaacgagaaagtttactgggatgactatcgcgtcgaatcgttttgcaccactgtgggtctgaaattagcgcctctgctgggacgtggtagtttcgctgaactgtcccagtacccaaacgatttcaaaagcctggtgaaccgttataatgaattggttgacacggtcggcctggagatggccaataaacacgtctttggtccgcaagcgtcttctgaaactggcctggcagaaggctacgttcttaaacccgtctatccgatcttctttaataccggtacgcgcgtggcgattaaatgcaagaactccaaattttcggagaaagccaagctggactcgccaattagtgcgaaggttgaactgacggagaacgataaacgtctgctcgaaatctttagcgagtatgttacctggaatcgcgtcagtaacgtactgtcacatattggctcagtgaccgcaaaagattttgggcgtgtttcgggtctgacgatgaaagacatcattaatgaagcagcacgcgaaggccatgatctgttgttcgctgataacccgtcggcggtgctgaaggagctgactggcctcatccagaacacgattcgctccaaatggcacgaagttctggag

SEQ ID NO: 1498 - protein, 346 aa, synthetic construct
  REGION 1..346: note = variant of RNA ligase 2 from Klebsiella phage KP179
MHHHHHHGGSNMFAYYSSLENHYNAKFIEKIRGAGFLAHTVEWVAREKIHGTNFSVIITPTEIVPAKRTGPILEGESFFGHEIIMKKYMDSFVKVQNMLNAMDLVSVQIFGEFAGGGIQKGVDYGDKDFYVFDILSDSGNEKVYWDDYRVESFCTTVGLKLAPLLGRGSFAELSQYPNDFKSLVNRYNELVDTVGLEMANKHVFGPQASSETGLAEGYVLKPVYPIFFNTGTRVAIKCKNSKFSEKAKLDSPISAKVELTENDKRLLEIFSEYVTWNRVSNVLSHIGSVTAKDFGRVSGLTMKDIINEAAREGHDLLFADNPSAVLKELTGLIQNTIRSKWHEVLE

SEQ ID NO: 1499 - DNA, 1038 bp, synthetic construct
  misc_feature 1..1038: note = variant of RNA ligase 2 from Klebsiella phage KP179
  source 1..1038: mol_type = other DNA
atgcatcaccatcaccatcacggtggctttaacatgtttgcgtattattcaagtctggaaaaccattacaatgctaagttcattgagaagatccgtggtgcaggcttcctgatgcacaccgtggaatgggtagctcgcgagaagattcatggaacgaactttagcgttatcattactccgaccgaaatcgtcccagccaaacgcacagggccgatcttggaaggcgagtcgttctttggtcacgaaattatcatgaaaaaatatatggactccttcgtgaaggtgcagaacatgctgaatgccatggatcttgttagcgtgcaaatctttggcgaatttgcgggtggtggcattcagaaaggcgtcgattacggagacaaagatttctatgtgtttgacatcctgtctgatagcgggaacgagaaagtttactgggatgactatcgcgtcgaatcgttttgcaccactgtgggtctgaaattagcgcctctgctgggacgtggtagtttcgctgaactgtcccagtacccaaacgatttcaaaagcctggtgaaccgttataatgaattggttgacacggtcggcctggagatggccaataaacacgtctttggtccgcaagcgtcttctgaaactggcctggcagaaggctacgttcttaaacccgtctatccgatcttctttaataccggtacgcgcgtggcgattaaatgcaagaactccaaattttcggagaaagccaagctggactcgccaattagtgcgaaggttgaactgacggagaacgataaacgtctgctcgaaatctttagcgagtatgttacctggaatcgcgtcagtaacgtactgtcacatattggctcagtgaccgcaaaagattttgggcgtgtttcgggtctgacgatgaaagacatcattaatgaagcagcacgcgaaggccatgatctgttgttcgctgataacccgtcggcggtgctgaaggagctgactggcctcatccagaacacgattcgctccaaatggcacgaagttctggag

SEQ ID NO: 1500 - protein, 346 aa, synthetic construct
  REGION 1..346: note = variant of RNA ligase 2 from Klebsiella phage KP179
MHHHHHHGGFNMFAYYSSLENHYNAKFIEKIRGAGFLMHTVEWVAREKIHGTNFSVIITPTEIVPAKRTGPILEGESFFGHEIIMKKYMDSFVKVQNMLNAMDLVSVQIFGEFAGGGIQKGVDYGDKDFYVFDILSDSGNEKVYWDDYRVESFCTTVGLKLAPLLGRGSFAELSQYPNDFKSLVNRYNELVDTVGLEMANKHVFGPQASSETGLAEGYVLKPVYPIFFNTGTRVAIKCKNSKFSEKAKLDSPISAKVELTENDKRLLEIFSEYVTWNRVSNVLSHIGSVTAKDFGRVSGLTMKDIINEAAREGHDLLFADNPSAVLKELTGLIQNTIRSKWHEVLE

SEQ ID NO: 1501 - DNA, 1038 bp, synthetic construct
  misc_feature 1..1038: note = variant of RNA ligase 2 from Klebsiella phage KP179
  source 1..1038: mol_type = other DNA
atgcatcaccatcaccatcacggtggcagcaacatgtttgcgtattattcaagtctggaaaaccattacaatgctaagttcattgagaagatccgtggtgcaggcttcctgatgcacaccgtggaatgggtagctcgcgagaagattcatggaacgaactttagcgttatcattactccgaccgaaatcgtcccagccaaacgcacagggccgatcttggaaggcgagtcgttctttggtcacgaaattatcatgaaaaaatatatggactccttcgtgaaggtgcagaacatgctgaatgccatggatcttgttagcgtgcaaatctttggcgaatttgcgggtggtggcattcagaaaggcgtcgattacggagacaaagatttctatgtgtttgacatcctgtctgatagcgggaacgagaaagtttactgggatgactatcgcgtcgaatcgttttgcaccactgtgggtctgaaattagcgcctctgctgggacgtggtagtttcgctgaactgtcccagtacccaaacgatttcaaaagcctggtgaaccgttataatgaattggttgacacggtcggcctggagatggccaataaacacgtctttggtccgcaagcgtcttctgaaactggcctggcagaaggctacgttcttaaacccgtctatccgatcttctttaataccggtacgcgcgtggcgattaaatgcaagaactccaaattttcggagaaagccaagctgagttcgccaattagtgcgaaggttgaactgacggagaacgataaacgtctgctcgaaatctttagcgagtatgttacctggaatcgcgtcagtaacgtactgtcacatattggctcagtgaccgcaaaagattttgggcgtgtttcgggtctgacgatgaaagacatcattaatgaagcagcacgcgaaggccatgatctgttgttcgctgataacccgtcggcggtgctgaaggagctgactggcctcatccagaacacgattcgctccaaatggcacgaagttctggag

SEQ ID NO: 1502 - protein, 346 aa, synthetic construct
  REGION 1..346: note = variant of RNA ligase 2 from Klebsiella phage KP179
MHHHHHHGGSNMFAYYSSLENHYNAKFIEKIRGAGFLMHTVEWVAREKIHGTNFSVIITPTEIVPAKRTGPILEGESFFGHEIIMKKYMDSFVKVQNMLNAMDLVSVQIFGEFAGGGIQKGVDYGDKDFYVFDILSDSGNEKVYWDDYRVESFCTTVGLKLAPLLGRGSFAELSQYPNDFKSLVNRYNELVDTVGLEMANKHVFGPQASSETGLAEGYVLKPVYPIFFNTGTRVAIKCKNSKFSEKAKLSSPISAKVELTENDKRLLEIFSEYVTWNRVSNVLSHIGSVTAKDFGRVSGLTMKDIINEAAREGHDLLFADNPSAVLKELTGLIQNTIRSKWHEVLE

SEQ ID NO: 1503 - DNA, 1038 bp, synthetic construct
  misc_feature 1..1038: note = variant of RNA ligase 2 from Klebsiella phage KP179
  source 1..1038: mol_type = other DNA
atgcatcaccatcaccatcacggtggcagcaacatgtttgcgtattattcaagtctggaaaaccattacaatgctaagttcattgagaagatccgtggtgcaggcttcctgatgcacaccgtggaatgggtagctcgcgagaagattcatggaacgaactttagcgttatcattactccgaccgaaatcgtcccagccaaacgcacagggccgatcttggaagatgagtcgttctttggtcacgaaattatcatgaaaaaatatatggactccttcgtgaaggtgcagaacatgctgaatgccatggatcttgttagcgtgcaaatctttggcgaatttgcgggtggtggcattcagaaaggcgtcgattacggagacaaagatttctatgtgtttgacatcctgtctgatagcgggaacgagaaagtttactgggatgactatcgcgtcgaatcgttttgcaccactgtgggtctgaaattagcgcctctgctgggacgtggtagtttcgctgaactgtcccagtacccaaacgatttcaaaagcctggtgaaccgttataatgaattggttgacacggtcggcctggagatggccaataaacacgtctttggtccgcaagcgtcttctgaaactggcctggcagaaggctacgttcttaaacccgtctatccgatcttctttaataccggtacgcgcgtggcgattaaatgcaagaactccaaattttcggagaaagccaagctggactcgccaattagtgcgaaggttgaactgacggagaacgataaacgtctgctcgaaatctttagcgagtatgttacctggaatcgcgtcagtaacgtactgtcacatattggctcagtgaccgcaaaagattttgggcgtgtttcgggtctgacgatgaaagacatcattaatgaagcagcacgcgaaggccatgatctgttgttcgctgataacccgtcggcggtgctgaaggagctgactggcctcatccagaacacgattcgctccaaatggcacgaagttctggag

SEQ ID NO: 1504 - protein, 346 aa, synthetic construct
  REGION 1..346: note = variant of RNA ligase 2 from Klebsiella phage KP179
MHHHHHHGGSNMFAYYSSLENHYNAKFIEKIRGAGFLMHTVEWVAREKIHGTNFSVIITPTEIVPAKRTGPILEDESFFGHEIIMKKYMDSFVKVQNMLNAMDLVSVQIFGEFAGGGIQKGVDYGDKDFYVFDILSDSGNEKVYWDDYRVESFCTTVGLKLAPLLGRGSFAELSQYPNDFKSLVNRYNELVDTVGLEMANKHVFGPQASSETGLAEGYVLKPVYPIFFNTGTRVAIKCKNSKFSEKAKLDSPISAKVELTENDKRLLEIFSEYVTWNRVSNVLSHIGSVTAKDFGRVSGLTMKDIINEAAREGHDLLFADNPSAVLKELTGLIQNTIRSKWHEVLE

SEQ ID NO: 1505 - DNA, 1038 bp, synthetic construct
  misc_feature 1..1038: note = variant of RNA ligase 2 from Klebsiella phage KP179
  source 1..1038: mol_type = other DNA
atgcatcaccatcaccatcacggtggcagcaacatgtttgcgtattattcaagtctggaaaaccattacaatgctaagttcattgagaagatccgtggtgcaggcttcctgatgcacaccgtggaatgggtagctcgcgagaagattcatggaacgaactttagcgttatcattactccgaccgaaatcgtcccagccaaacgcacagggccgatcttggaaggcgagtcgttctttggtcacgaaattatcatgaaaaaatatatggactccttcgtgaaggtgcagaacatgctgaatgccatggatcttgttagcgtgcaaatctttggcgaatttgcgggtggtggcattcagaaaggcgtcgattacggagacaaagatttctatgtgtttgacatcctgtctgatagcgggaacgagaaagtttactgggatgactatcgcgtcgaatcgttttgcaccactgtgggtctgaaattagcgcctctgctgggacgtggtagtttcgctgaactgtcccagtacccaaacgatttcaaaagcctggtgaaccgttataatgaattggttgacacggtcggcctggagatggccaataaacacgtctttggtccgcaagcgtcttctgaaactggcctggcagaaggctacgttcttaaacccgtctatccgatcttctttaatgttggtacgcgcgtggcgattaaatgcaagaactccaaattttcggagaaagccaagctggactcgccaattagtgcgaaggttgaactgacggagaacgataaacgtctgctcgaaatctttagcgagtatgttacctggaatcgcgtcagtaacgtactgtcacatattggctcagtgaccgcaaaagattttgggcgtgtttcgggtctgacgatgaaagacatcattaatgaagcagcacgcgaaggccatgatctgttgttcgctgataacccgtcggcggtgctgaaggagctgactggcctcatccagaacacgattcgctccaaatggcacgaagttctggag

SEQ ID NO: 1506 - protein, 346 aa, synthetic construct
  REGION 1..346: note = variant of RNA ligase 2 from Klebsiella phage KP179
MHHHHHHGGSNMFAYYSSLENHYNAKFIEKIRGAGFLMHTVEWVAREKIHGTNFSVIITPTEIVPAKRTGPILEGESFFGHEIIMKKYMDSFVKVQNMLNAMDLVSVQIFGEFAGGGIQKGVDYGDKDFYVFDILSDSGNEKVYWDDYRVESFCTTVGLKLAPLLGRGSFAELSQYPNDFKSLVNRYNELVDTVGLEMANKHVFGPQASSETGLAEGYVLKPVYPIFFNVGTRVAIKCKNSKFSEKAKLDSPISAKVELTENDKRLLEIFSEYVTWNRVSNVLSHIGSVTAKDFGRVSGLTMKDIINEAAREGHDLLFADNPSAVLKELTGLIQNTIRSKWHEVLE

SEQ ID NO: 1507 - DNA, 1038 bp, synthetic construct
  misc_feature 1..1038: note = variant of RNA ligase 2 from Klebsiella phage KP179
  source 1..1038: mol_type = other DNA
atgcatcaccatcaccatcacggtggcagcaacatgtttgcgtattattcaagtctggaaaaccattacaatgctaagttcattgagaagatccgtggtgcaggcttcctgatgcacaccgtggaatgggtagctcgcgagaagattcatggaacgaactttagcgttatcattactccgaccgaaatcgtcccagccaaacgcacagggccgatcttggaaggcgagatgttctttggtcacgaaattatcatgaaaaaatatatggactccttcgtgaaggtgcagaacatgctgaatgccatggatcttgttagcgtgcaaatctttggcgaatttgcgggtggtggcattcagaaaggcgtcgattacggagacaaagatttctatgtgtttgacatcctgtctgatagcgggaacgagaaagtttactgggatgactatcgcgtcgaatcgttttgcaccactgtgggtctgaaattagcgcctctgctgggacgtggtagtttcgctgaactgtcccagtacccaaacgatttcaaaagcctggtgaaccgttataatgaattggttgacacggtcggcctggagatggccaataaacacgtctttggtccgcaagcgtcttctgaaactggcctggcagaaggctacgttcttaaacccgtctatccgatcttctttaataccggtacgcgcgtggcgattaaatgcaagaactccaaattttcggagaaagccaagctggactcgccaattagtgcgaaggttgaactgacggagaacgataaacgtctgctcgaaatctttagcgagtatgttacctggaatcgcgtcagtaacgtactgtcacatattggctcagtgaccgcaaaagattttgggcgtgtttcgggtctgacgatgaaagacatcattaatgaagcagcacgcgaaggccatgatctgttgttcgctgataacccgtcggcggtgctgaaggagctgactggcctcatccagaacacgattcgctccaaatggcacgaagttctggag

SEQ ID NO: 1508 - protein, 346 aa, synthetic construct
  REGION 1..346: note = variant of RNA ligase 2 from Klebsiella phage KP179
MHHHHHHGGSNMFAYYSSLENHYNAKFIEKIRGAGFLMHTVEWVAREKIHGTNFSVIITPTEIVPAKRTGPILEGEMFFGHEIIMKKYMDSFVKVQNMLNAMDLVSVQIFGEFAGGGIQKGVDYGDKDFYVFDILSDSGNEKVYWDDYRVESFCTTVGLKLAPLLGRGSFAELSQYPNDFKSLVNRYNELVDTVGLEMANKHVFGPQASSETGLAEGYVLKPVYPIFFNTGTRVAIKCKNSKFSEKAKLDSPISAKVELTENDKRLLEIFSEYVTWNRVSNVLSHIGSVTAKDFGRVSGLTMKDIINEAAREGHDLLFADNPSAVLKELTGLIQNTIRSKWHEVLE

SEQ ID NO: 1509 - DNA, 1038 bp, synthetic construct
  misc_feature 1..1038: note = variant of RNA ligase 2 from Klebsiella phage KP179
  source 1..1038: mol_type = other DNA
atgcatcaccatcaccatcacggtggcagcaacatgtttgcgtattattcaagtctggaaaaccattacaatgctaagttcattgagaagatccgtggtgcaggcttcctgatgcacaccgtggaatgggtagctcgcgagaagattcatggaacgaactttagcgttatcattactccgaccgaaatcgtcccagccaaacgcacagggccgatcttggaaggcgagtcgttctttggtcacgaaattatcatgaaaaaatatatggactccttcgtgaaggtgcagaacatgctgaatgccatggatcttgttagcgtgcaaatctttggcgaatttgcgggtggtggcattcagaaaggcgtcgattacggagacaaagatttctatgtgtttgacatcctgtctgatagcgggaacgagaaagtttactgggatgactatcgcgtcgaatcgttttgcaccactgtgggtctgaaattagcgcctctgctgggacgtggtagtttcgctgaactgtcccagtacccaaacgatttcaaaagcctggtgaaccgttataatgaattggttgacacggtcggcctggagatggccaataaacacgtctttggtccgcaagcgtcttctgaaactggcctggcagaaggctacgttcttaaacccgtctatccgatcttctttaataccggtacgcgcgtggcgattaaatgcaagaactccaaattttcggagaaagccaagctggacgagccaattagtgcgaaggttgaactgacggagaacgataaacgtctgctcgaaatctttagcgagtatgttacctggaatcgcgtcagtaacgtactgtcacatattggctcagtgaccgcaaaagattttgggcgtgtttcgggtctgacgatgaaagacatcattaatgaagcagcacgcgaaggccatgatctgttgttcgctgataacccgtcggcggtgctgaaggagctgactggcctcatccagaacacgattcgctccaaatggcacgaagttctggag

SEQ ID NO: 1510 - protein, 346 aa, synthetic construct
  REGION 1..346: note = variant of RNA ligase 2 from Klebsiella phage KP179
MHHHHHHGGSNMFAYYSSLENHYNAKFIEKIRGAGFLMHTVEWVAREKIHGTNFSVIITPTEIVPAKRTGPILEGESFFGHEIIMKKYMDSFVKVQNMLNAMDLVSVQIFGEFAGGGIQKGVDYGDKDFYVFDILSDSGNEKVYWDDYRVESFCTTVGLKLAPLLGRGSFAELSQYPNDFKSLVNRYNELVDTVGLEMANKHVFGPQASSETGLAEGYVLKPVYPIFFNTGTRVAIKCKNSKFSEKAKLDEPISAKVELTENDKRLLEIFSEYVTWNRVSNVLSHIGSVTAKDFGRVSGLTMKDIINEAAREGHDLLFADNPSAVLKELTGLIQNTIRSKWHEVLE

SEQ ID NO: 1511 - DNA, 1038 bp, synthetic construct
  misc_feature 1..1038: note = variant of RNA ligase 2 from Klebsiella phage KP179
  source 1..1038: mol_type = other DNA
atgcatcaccatcaccatcacggtggcagcaacatgtttgcgtattattcaagtctggaaaaccatacgaatgctaagttcattgagaagatccgtggtgcaggcttcctgatgcacaccgtggaatgggtagctcgcgagaagattcatggaacgaactttagcgttatcattactccgaccgaaatcgtcccagccaaacgcacagggccgatcttggaaggcgagtcgttctttggtcacgaaattatcatgaaaaaatatatggactccttcgtgaaggtgcagaacatgctgaatgccatggatcttgttagcgtgcaaatctttggcgaatttgcgggtggtggcattcagaaaggcgtcgattacggagacaaagatttctatgtgtttgacatcctgtctgatagcgggaacgagaaagtttactgggatgactatcgcgtcgaatcgttttgcaccactgtgggtctgaaattagcgcctctgctgggacgtggtagtttcgctgaactgtcccagtacccaaacgatttcaaaagcctggtgaaccgttataatgaattggttgacacggtcggcctggagatggccaataaacacgtctttggtccgcaagcgtcttctgaaactggcctggcagaaggctacgttcttaaacccgtctatccgatcttctttaataccggtacgcgcgtggcgattaaatgcaagaactccaaattttcggagaaagccaagctggactcgccaattagtgcgaaggttgaactgacggagaacgataaacgtctgctcgaaatctttagcgagtatgttacctggaatcgcgtcagtaacgtactgtcacatattggctcagtgaccgcaaaagattttgggcgtgtttcgggtctgacgatgaaagacatcattaatgaagcagcacgcgaaggccatgatctgttgttcgctgataacccgtcggcggtgctgaaggagctgactggcctcatccagaacacgattcgctccaaatggcacgaagttctggag

SEQ ID NO: 1512 - protein, 346 aa, synthetic construct
  REGION 1..346: note = variant of RNA ligase 2 from Klebsiella phage KP179
MHHHHHHGGSNMFAYYSSLENHTNAKFIEKIRGAGFLMHTVEWVAREKIHGTNFSVIITPTEIVPAKRTGPILEGESFFGHEIIMKKYMDSFVKVQNMLNAMDLVSVQIFGEFAGGGIQKGVDYGDKDFYVFDILSDSGNEKVYWDDYRVESFCTTVGLKLAPLLGRGSFAELSQYPNDFKSLVNRYNELVDTVGLEMANKHVFGPQASSETGLAEGYVLKPVYPIFFNTGTRVAIKCKNSKFSEKAKLDSPISAKVELTENDKRLLEIFSEYVTWNRVSNVLSHIGSVTAKDFGRVSGLTMKDIINEAAREGHDLLFADNPSAVLKELTGLIQNTIRSKWHEVLE

SEQ ID NO: 1513 - DNA, 1038 bp, synthetic construct
  misc_feature 1..1038: note = variant of RNA ligase 2 from Klebsiella phage KP179
  source 1..1038: mol_type = other DNA
atgcatcaccatcaccatcacggtggcagcaacatgtttgcgtattattcaagtctggaaaaccattacaatgctaagttcattgagaagatccgtgtggcaggcttcctgatgcacaccgtggaatgggtagctcgcgagaagattcatggaacgaactttagcgttatcattactccgaccgaaatcgtcccagccaaacgcacagggccgatcttggaaggcgagtcgttctttggtcacgaaattatcatgaaaaaatatatggactccttcgtgaaggtgcagaacatgctgaatgccatggatcttgttagcgtgcaaatctttggcgaatttgcgggtggtggcattcagaaaggcgtcgattacggagacaaagatttctatgtgtttgacatcctgtctgatagcgggaacgagaaagtttactgggatgactatcgcgtcgaatcgttttgcaccactgtgggtctgaaattagcgcctctgctgggacgtggtagtttcgctgaactgtcccagtacccaaacgatttcaaaagcctggtgaaccgttataatgaattggttgacacggtcggcctggagatggccaataaacacgtctttggtccgcaagcgtcttctgaaactggcctggcagaaggctacgttcttaaacccgtctatccgatcttctttaataccggtacgcgcgtggcgattaaatgcaagaactccaaattttcggagaaagccaagctggactcgccaattagtgcgaaggttgaactgacggagaacgataaacgtctgctcgaaatctttagcgagtatgttacctggaatcgcgtcagtaacgtactgtcacatattggctcagtgaccgcaaaagattttgggcgtgtttcgggtctgacgatgaaagacatcattaatgaagcagcacgcgaaggccatgatctgttgttcgctgataacccgtcggcggtgctgaaggagctgactggcctcatccagaacacgattcgctccaaatggcacgaagttctggag

SEQ ID NO: 1514 - protein, 346 aa, synthetic construct
  REGION 1..346: note = variant of RNA ligase 2 from Klebsiella phage KP179
MHHHHHHGGSNMFAYYSSLENHYNAKFIEKIRVAGFLMHTVEWVAREKIHGTNFSVIITPTEIVPAKRTGPILEGESFFGHEIIMKKYMDSFVKVQNMLNAMDLVSVQIFGEFAGGGIQKGVDYGDKDFYVFDILSDSGNEKVYWDDYRVESFCTTVGLKLAPLLGRGSFAELSQYPNDFKSLVNRYNELVDTVGLEMANKHVFGPQASSETGLAEGYVLKPVYPIFFNTGTRVAIKCKNSKFSEKAKLDSPISAKVELTENDKRLLEIFSEYVTWNRVSNVLSHIGSVTAKDFGRVSGLTMKDIINEAAREGHDLLFADNPSAVLKELTGLIQNTIRSKWHEVLE

SEQ ID NO: 1515 - DNA, 1038 bp, synthetic construct
  misc_feature 1..1038: note = variant of RNA ligase 2 from Klebsiella phage KP179
  source 1..1038: mol_type = other DNA
atgcatcaccatcaccatcacggtggcagcaacatgtttgcgtattattcaagtctggaaaaccattacaatgctaagttcattgagaagatccgtggtgcaggcttcctgatgcacaccgtggaatgggtagctcgcgagaagattcatggaacgaactttagcgttatcattactccgaccgaaatcgtcccagccaaacgcacagggccgatcttggaaggcgagtcgttctttggtcacgaaattatcatgaaaaaatatatggactccttcgtgaaggtgcagaacatgctgaatgccatggatcttgttagcgtgcaaatctttggcgaatttgcgggtggtggcattcagaaaggcgtcgattacggagacaaagatttctatgtgtttgacatcctgtctgatagcgggaacgagaaagtttactgggatgactatcgcgtcgaatcgttttgcaccactgtgggtctgaaattagcgcctctgctgggacgtggtagtttcgctgaactgtcccagtacccaaacgatttcaaaagcctggtgaaccgttataatgaattggttgacacggtcggcctggagatggccaataaacacgtctttggtccgcaagcgtcttctgaaactggcctggcagaaggctacgttcttaaacccgtctatccgatcttccttaataccggtacgcgcgtggcgattaaatgcaagaactccaaattttcggagaaagccaagctggactcgccaattagtgcgaaggttgaactgacggagaacgataaacgtctgctcgaaatctttagcgagtatgttacctggaatcgcgtcagtaacgtactgtcacatattggctcagtgaccgcaaaagattttgggcgtgtttcgggtctgacgatgaaagacatcattaatgaagcagcacgcgaaggccatgatctgttgttcgctgataacccgtcggcggtgctgaaggagctgactggcctcatccagaacacgattcgctccaaatggcacgaagttctggag

SEQ ID NO: 1516 - protein, 346 aa, synthetic construct
  REGION 1..346: note = variant of RNA ligase 2 from Klebsiella phage KP179
MHHHHHHGGSNMFAYYSSLENHYNAKFIEKIRGAGFLMHTVEWVAREKIHGTNFSVIITPTEIVPAKRTGPILEGESFFGHEIIMKKYMDSFVKVQNMLNAMDLVSVQIFGEFAGGGIQKGVDYGDKDFYVFDILSDSGNEKVYWDDYRVESFCTTVGLKLAPLLGRGSFAELSQYPNDFKSLVNRYNELVDTVGLEMANKHVFGPQASSETGLAEGYVLKPVYPIFLNTGTRVAIKCKNSKFSEKAKLDSPISAKVELTENDKRLLEIFSEYVTWNRVSNVLSHIGSVTAKDFGRVSGLTMKDIINEAAREGHDLLFADNPSAVLKELTGLIQNTIRSKWHEVLE

SEQ ID NO: 1517 - DNA, 1038 bp, synthetic construct
  misc_feature 1..1038: note = variant of RNA ligase 2 from Klebsiella phage KP179
  source 1..1038: mol_type = other DNA
atgcatcaccatcaccatcacggtggcagcaacatgtttgcgtattattcaagtctggaaaaccattacaatgctaagttcattgagaagatccgtggtgcaggcttcctgatgcacaccgtggaatgggtagctcgcgagaagattcatggaacgaactttagcgttatcattactccgaccgaaatcgtcccagccaaacgcacagggccgatcttggaaggcgagtcgttctttggttacgaaattatcatgaaaaaatatatggactccttcgtgaaggtgcagaacatgctgaatgccatggatcttgttagcgtgcaaatctttggcgaatttgcgggtggtggcattcagaaaggcgtcgattacggagacaaagatttctatgtgtttgacatcctgtctgatagcgggaacgagaaagtttactgggatgactatcgcgtcgaatcgttttgcaccactgtgggtctgaaattagcgcctctgctgggacgtggtagtttcgctgaactgtcccagtacccaaacgatttcaaaagcctggtgaaccgttataatgaattggttgacacggtcggcctggagatggccaataaacacgtctttggtccgcaagcgtcttctgaaactggcctggcagaaggctacgttcttaaacccgtctatccgatcttctttaataccggtacgcgcgtggcgattaaatgcaagaactccaaattttcggagaaagccaagctggactcgccaattagtgcgaaggttgaactgacggagaacgataaacgtctgctcgaaatctttagcgagtatgttacctggaatcgcgtcagtaacgtactgtcacatattggctcagtgaccgcaaaagattttgggcgtgtttcgggtctgacgatgaaagacatcattaatgaagcagcacgcgaaggccatgatctgttgttcgctgataacccgtcggcggtgctgaaggagctgactggcctcatccagaacacgattcgctccaaatggcacgaagttctggag

SEQ ID NO: 1518 - protein, 346 aa, synthetic construct
  REGION 1..346: note = variant of RNA ligase 2 from Klebsiella phage KP179
MHHHHHHGGSNMFAYYSSLENHYNAKFIEKIRGAGFLMHTVEWVAREKIHGTNFSVIITPTEIVPAKRTGPILEGESFFGYEIIMKKYMDSFVKVQNMLNAMDLVSVQIFGEFAGGGIQKGVDYGDKDFYVFDILSDSGNEKVYWDDYRVESFCTTVGLKLAPLLGRGSFAELSQYPNDFKSLVNRYNELVDTVGLEMANKHVFGPQASSETGLAEGYVLKPVYPIFFNTGTRVAIKCKNSKFSEKAKLDSPISAKVELTENDKRLLEIFSEYVTWNRVSNVLSHIGSVTAKDFGRVSGLTMKDIINEAAREGHDLLFADNPSAVLKELTGLIQNTIRSKWHEVLE

SEQ ID NO: 1519 - DNA, 1038 bp, synthetic construct
  misc_feature 1..1038: note = variant of RNA ligase 2 from Klebsiella phage KP179
  source 1..1038: mol_type = other DNA
atgcatcaccatcaccatcacggtggcagcaacatgtttgcgtattattcaagtctggaaaaccattacaatgctaagttcattgagaagatccgtggtgcaggcttcctgatgcacaccgtggaatgggtagctcgcgagaagattcatggaacgaactttagcgttatcattactccgaccgaaatcgtcccagccaaacgcacagggccgatcttggaaggcgagtcgttctttggtcacgaaattatcatgaaaaaatatatggactccttcgtgaaggtgcagaacatgctgaatgccatggatcttgttagcgtgcaaatctttggcgaatttgcgggtggtggcattcagaaaggcgtcgattacggagacaaagatttctatgtgtttgacatcctgtctgatagcgggaacgagaaagtttactgggatgactatcgcgtcgaatcgttttgcaccactgtgggtctgaaattagcgcctctgctgggacgtggtagtttcgctgaactgtcccagtacccaaacgatttcaaaagcctggtgaaccgttataatgaattggttgacacggtcggcctggagatggccaataaacacgtctttggtccgcaagcgtcttctgaaactggcctggcagaaggctacgttcttaaacccgtcgcgccgatcttctttaataccggtacgcgcgtggcgattaaatgcaagaactccaaattttcggagaaagccaagctggactcgccaattagtgcgaaggttgaactgacggagaacgataaacgtctgctcgaaatctttagcgagtatgttacctggaatcgcgtcagtaacgtactgtcacatattggctcagtgaccgcaaaagattttgggcgtgtttcgggtctgacgatgaaagacatcattaatgaagcagcacgcgaaggccatgatctgttgttcgctgataacccgtcggcggtgctgaaggagctgactggcctcatccagaacacgattcgctccaaatggcacgaagttctggag

SEQ ID NO: 1520 - protein, 346 aa, synthetic construct
  REGION 1..346: note = variant of RNA ligase 2 from Klebsiella phage KP179
MHHHHHHGGSNMFAYYSSLENHYNAKFIEKIRGAGFLMHTVEWVAREKIHGTNFSVIITPTEIVPAKRTGPILEGESFFGHEIIMKKYMDSFVKVQNMLNAMDLVSVQIFGEFAGGGIQKGVDYGDKDFYVFDILSDSGNEKVYWDDYRVESFCTTVGLKLAPLLGRGSFAELSQYPNDFKSLVNRYNELVDTVGLEMANKHVFGPQASSETGLAEGYVLKPVAPIFFNTGTRVAIKCKNSKFSEKAKLDSPISAKVELTENDKRLLEIFSEYVTWNRVSNVLSHIGSVTAKDFGRVSGLTMKDIINEAAREGHDLLFADNPSAVLKELTGLIQNTIRSKWHEVLE

SEQ ID NO: 1521 - DNA, 1038 bp, synthetic construct
  misc_feature 1..1038: note = variant of RNA ligase 2 from Klebsiella phage KP179
  source 1..1038: mol_type = other DNA
atgcatcaccatcaccatcacggtggcagcaacatgtttgcgtattattcaagtctggaaaaccattacaatgctaagttcattgagaagatccgtggtgcaggcttcctgatgcacaccgtggaatgggtagctcgcgagaagattcatggaacgaactttagcgttatcattactccgaccgaaatccagccagccaaacgcacagggccgatcttggaaggcgagtcgttctttggtcacgaaattatcatgaaaaaatatatggactccttcgtgaaggtgcagaacatgctgaatgccatggatcttgttagcgtgcaaatctttggcgaatttgcgggtggtggcattcagaaaggcgtcgattacggagacaaagatttctatgtgtttgacatcctgtctgatagcgggaacgagaaagtttactgggatgactatcgcgtcgaatcgttttgcaccactgtgggtctgaaattagcgcctctgctgggacgtggtagtttcgctgaactgtcccagtacccaaacgatttcaaaagcctggtgaaccgttataatgaattggttgacacggtcggcctggagatggccaataaacacgtctttggtccgcaagcgtcttctgaaactggcctggcagaaggctacgttcttaaacccgtctatccgatcttctttaataccggtacgcgcgtggcgattaaatgcaagaactccaaattttcggagaaagccaagctggactcgccaattagtgcgaaggttgaactgacggagaacgataaacgtctgctcgaaatctttagcgagtatgttacctggaatcgcgtcagtaacgtactgtcacatattggctcagtgaccgcaaaagattttgggcgtgtttcgggtctgacgatgaaagacatcattaatgaagcagcacgcgaaggccatgatctgttgttcgctgataacccgtcggcggtgctgaaggagctgactggcctcatccagaacacgattcgctccaaatggcacgaagttctggag

SEQ ID NO: 1522 - protein, 346 aa, synthetic construct
  REGION 1..346: note = variant of RNA ligase 2 from Klebsiella phage KP179
MHHHHHHGGSNMFAYYSSLENHYNAKFIEKIRGAGFLMHTVEWVAREKIHGTNFSVIITPTEIQPAKRTGPILEGESFFGHEIIMKKYMDSFVKVQNMLNAMDLVSVQIFGEFAGGGIQKGVDYGDKDFYVFDILSDSGNEKVYWDDYRVESFCTTVGLKLAPLLGRGSFAELSQYPNDFKSLVNRYNELVDTVGLEMANKHVFGPQASSETGLAEGYVLKPVYPIFFNTGTRVAIKCKNSKFSEKAKLDSPISAKVELTENDKRLLEIFSEYVTWNRVSNVLSHIGSVTAKDFGRVSGLTMKDIINEAAREGHDLLFADNPSAVLKELTGLIQNTIRSKWHEVLE

SEQ ID NO: 1523 - DNA, 1038 bp, synthetic construct
  misc_feature 1..1038: note = variant of RNA ligase 2 from Klebsiella phage KP179
  source 1..1038: mol_type = other DNA
atgcatcaccatcaccatcacggtggcagcaacatgtttgcgtattattcaagtctggaaaaccattacaatgctaagttcattgagaagatccgtggtgcaggcttcctgatgcacaccgtggaatgggtagctcgcgagaagattcatggaacgaactttagcgttatcattactccgaccgaaatcgtcccagccaaacgcacagggccgatcttggaaggcgagtcgttctttggtcacgaaattatcatgaaaaaatatatggactccttcgtgaaggtgcagaacatgctgaatgccatggatcttgttagcgtgcaaatctttggcgaatttgcgggtggtggcattcagaaaggcgtcgattacggagacaaagatttctatgtgtttgacatcctgtctgatagcgggaacgagaaagtttactgggatgactatcgcgtcgaatcgttttgcaccactgtgggtctgaaattagcgcctctgctgggacgtggtagtttcgctgaactgtcccagtacccaaacgatttcaaaagcctggtgaaccgttataatgaattggttgacacggtcggcctggagatggccaataaacacgtctttggtccgcaagcgtcttctgaaactggcctggcagaaggctacgttcttaaacccgtctatccgatcttctttaataccggtacgcgcgtggcgattaaatgcaagaactccaaattttcggagaaagccaagctggactcgccaattaaagcgaaggttgaactgacggagaacgataaacgtctgctcgaaatctttagcgagtatgttacctggaatcgcgtcagtaacgtactgtcacatattggctcagtgaccgcaaaagattttgggcgtgtttcgggtctgacgatgaaagacatcattaatgaagcagcacgcgaaggccatgatctgttgttcgctgataacccgtcggcggtgctgaaggagctgactggcctcatccagaacacgattcgctccaaatggcacgaagttctggag

SEQ ID NO: 1524 - protein, 346 aa, synthetic construct
  REGION 1..346: note = variant of RNA ligase 2 from Klebsiella phage KP179
MHHHHHHGGSNMFAYYSSLENHYNAKFIEKIRGAGFLMHTVEWVAREKIHGTNFSVIITPTEIVPAKRTGPILEGESFFGHEIIMKKYMDSFVKVQNMLNAMDLVSVQIFGEFAGGGIQKGVDYGDKDFYVFDILSDSGNEKVYWDDYRVESFCTTVGLKLAPLLGRGSFAELSQYPNDFKSLVNRYNELVDTVGLEMANKHVFGPQASSETGLAEGYVLKPVYPIFFNTGTRVAIKCKNSKFSEKAKLDSPIKAKVELTENDKRLLEIFSEYVTWNRVSNVLSHIGSVTAKDFGRVSGLTMKDIINEAAREGHDLLFADNPSAVLKELTGLIQNTIRSKWHEVLE

SEQ ID NO: 1525 - DNA, 1038 bp, synthetic construct
  misc_feature 1..1038: note = variant of RNA ligase 2 from Klebsiella phage KP179
  source 1..1038: mol_type = other DNA
atgcatcaccatcaccatcacggtggcagcaacatgtttgcgtattattcaagtctggaaaaccattacaatgctaagttcattgagaagatccgtggtgcaggcttcctgatgcacaccgtggaatgggtagctcgcgagaagattcatggaacgaactttagcgttatcattactccgaccgaaatcgtcccagccaaacgcacagggccgatcttggaaggcgagtcgttctttggtcacgaaattatcatgaaaaaatatatggactccttcgtgaaggtgcagaacatgctgaatgccatggatcttgttagcgtgcaaatctttggcgaatttgcgggtggtggcattcagaaaggcgtcgattacggagacaaagatttctatgtgtttgacatcctgtctgatagcgggaacgagaaagtttactgggatgactatcgcgtcgaatcgttttgcaccactgtgggtctgaaattagcgcctctgctgggacgtggtagtttcgctgaactgtcccagtacccaaacgatttcaaaagcctggtgaaccgttataatgaattggttgacacggtcggcctggagatggccaataaacacgtctttggtccgcaagcgtcttctgaaactggcctggcagaaggctacgttcttaaacccgtctatccgatcttctttaataccggtacgcgcgtggcgattaaatgcaagaactccaaattttcggagaaagccaagctggactcgccaattagtgcgaaggttgaactgacggagaacgataaacgtctgctctttatctttagcgagtatgttacctggaatcgcgtcagtaacgtactgtcacatattggctcagtgaccgcaaaagattttgggcgtgtttcgggtctgacgatgaaagacatcattaatgaagcagcacgcgaaggccatgatctgttgttcgctgataacccgtcggcggtgctgaaggagctgactggcctcatccagaacacgattcgctccaaatggcacgaagttctggag

SEQ ID NO: 1526 - protein, 346 aa, synthetic construct
  REGION 1..346: note = variant of RNA ligase 2 from Klebsiella phage KP179
MHHHHHHGGSNMFAYYSSLENHYNAKFIEKIRGAGFLMHTVEWVAREKIHGTNFSVIITPTEIVPAKRTGPILEGESFFGHEIIMKKYMDSFVKVQNMLNAMDLVSVQIFGEFAGGGIQKGVDYGDKDFYVFDILSDSGNEKVYWDDYRVESFCTTVGLKLAPLLGRGSFAELSQYPNDFKSLVNRYNELVDTVGLEMANKHVFGPQASSETGLAEGYVLKPVYPIFFNTGTRVAIKCKNSKFSEKAKLDSPISAKVELTENDKRLLFIFSEYVTWNRVSNVLSHIGSVTAKDFGRVSGLTMKDIINEAAREGHDLLFADNPSAVLKELTGLIQNTIRSKWHEVLE

SEQ ID NO: 1527 - DNA, 1038 bp, synthetic construct
  misc_feature 1..1038: note = variant of RNA ligase 2 from Klebsiella phage KP179
  source 1..1038: mol_type = other DNA
atgcatcaccatcaccatcacggtggcagcaacatgtttgcgtattattcaagtctggaaaaccattacaatgctaagttcattgagaagatccgtggtgcaggcttcctgatgcacaccgtggaatgggtagctcgcgagaagattcatggaacgaactttagcgttatcattactccgaccgaaatcgtctgcgccaaacgcacagggccgatcttggaaggcgagtcgttctttggtcacgaaattatcatgaaaaaatatatggactccttcgtgaaggtgcagaacatgctgaatgccatggatcttgttagcgtgcaaatctttggcgaatttgcgggtggtggcattcagaaaggcgtcgattacggagacaaagatttctatgtgtttgacatcctgtctgatagcgggaacgagaaagtttactgggatgactatcgcgtcgaatcgttttgcaccactgtgggtctgaaattagcgcctctgctgggacgtggtagtttcgctgaactgtcccagtacccaaacgatttcaaaagcctggtgaaccgttataatgaattggttgacacggtcggcctggagatggccaataaacacgtctttggtccgcaagcgtcttctgaaactggcctggcagaaggctacgttcttaaacccgtctatccgatcttctttaataccggtacgcgcgtggcgattaaatgcaagaactccaaattttcggagaaagccaagctggactcgccaattagtgcgaaggttgaactgacggagaacgataaacgtctgctcgaaatctttagcgagtatgttacctggaatcgcgtcagtaacgtactgtcacatattggctcagtgaccgcaaaagattttgggcgtgtttcgggtctgacgatgaaagacatcattaatgaagcagcacgcgaaggccatgatctgttgttcgctgataacccgtcggcggtgctgaaggagctgactggcctcatccagaacacgattcgctccaaatggcacgaagttctggag

SEQ ID NO: 1528 - protein, 346 aa, synthetic construct
  REGION 1..346: note = variant of RNA ligase 2 from Klebsiella phage KP179
MHHHHHHGGSNMFAYYSSLENHYNAKFIEKIRGAGFLMHTVEWVAREKIHGTNFSVIITPTEIVCAKRTGPILEGESFFGHEIIMKKYMDSFVKVQNMLNAMDLVSVQIFGEFAGGGIQKGVDYGDKDFYVFDILSDSGNEKVYWDDYRVESFCTTVGLKLAPLLGRGSFAELSQYPNDFKSLVNRYNELVDTVGLEMANKHVFGPQASSETGLAEGYVLKPVYPIFFNTGTRVAIKCKNSKFSEKAKLDSPISAKVELTENDKRLLEIFSEYVTWNRVSNVLSHIGSVTAKDFGRVSGLTMKDIINEAAREGHDLLFADNPSAVLKELTGLIQNTIRSKWHEVLE

SEQ ID NO: 1529 - DNA, 1038 bp, synthetic construct
  misc_feature 1..1038: note = variant of RNA ligase 2 from Klebsiella phage KP179
  source 1..1038: mol_type = other DNA
atgcatcaccatcaccatcacggtggcagcaacatgtttgcgtattattcaagtctggaaaaccattacaatgctaagttcattgagaagatccgtggtgcaggcttcctgatgcacaccgtggaatgggtagctcgcgagaagattcatggaacgaactttagcgttatcattactccgaccgaaatcgtcccagccaaacgcacagggccgatcttggaaggcgagtcgttctttggtcacgaaattatcatgaaaaaatatatggactccttcgtgaaggtgcagaacatgctgaatgccatggatcttgttagcgtgcaaatctttggcgaatttgcgggtggtggcattcagaaaggcgtcgattacggagacaaagatttctatgtgtttgacatcctgtctgatagcgggaacgagaaagtttactgggatgactatcgcgtcgaatcgttttgcaccactgtgggtctgaaattagcgcctctgctgggacgtggtagtttcgctgaactgtcccagtacccaaacgatttcaaaagcctggtgaaccgttataatgaattggttgacacggtcggcctggagatggccaataaacacgtctttggtccgcaagcgtcttctgaaactggcctggcagaaggctacgttcttaaacccgtctatccgatcttctttaataccggtaatcgcgtggcgattaaatgcaagaactccaaattttcggagaaagccaagctggactcgccaattagtgcgaaggttgaactgacggagaacgataaacgtctgctcgaaatctttagcgagtatgttacctggaatcgcgtcagtaacgtactgtcacatattggctcagtgaccgcaaaagattttgggcgtgtttcgggtctgacgatgaaagacatcattaatgaagcagcacgcgaaggccatgatctgttgttcgctgataacccgtcggcggtgctgaaggagctgactggcctcatccagaacacgattcgctccaaatggcacgaagttctggag

SEQ ID NO: 1530 - protein, 346 aa, synthetic construct
  REGION 1..346: note = variant of RNA ligase 2 from Klebsiella phage KP179
MHHHHHHGGSNMFAYYSSLENHYNAKFIEKIRGAGFLMHTVEWVAREKIHGTNFSVIITPTEIVPAKRTGPILEGESFFGHEIIMKKYMDSFVKVQNMLNAMDLVSVQIFGEFAGGGIQKGVDYGDKDFYVFDILSDSGNEKVYWDDYRVESFCTTVGLKLAPLLGRGSFAELSQYPNDFKSLVNRYNELVDTVGLEMANKHVFGPQASSETGLAEGYVLKPVYPIFFNTGNRVAIKCKNSKFSEKAKLDSPISAKVELTENDKRLLEIFSEYVTWNRVSNVLSHIGSVTAKDFGRVSGLTMKDIINEAAREGHDLLFADNPSAVLKELTGLIQNTIRSKWHEVLE

SEQ ID NO: 1531 - DNA, 1038 bp, synthetic construct
  misc_feature 1..1038: note = variant of RNA ligase 2 from Klebsiella phage KP179
  source 1..1038: mol_type = other DNA
atgcatcaccatcaccatcacggtggcagcaacatgtttgcgtattattcaagtctggaaaaccattacaatgctaagttcattgagaagatccgtggtgcaggcttcctgatgcacaccgtggaatgggtagctcgcgagaagattcatggaacgaactttagcgttatcattactccgaccgaaatcgtcccagccaaacgcacagggccgatcttggaaggcgagtcgttctttggtcacgaaattatcatgaaaaaatatatggactccttcgtgaaggtgcagaacatgctgaatgccatggatcttgttagcgtgcaaatctttggcgaatttgcgggtggtggcattcagaaaggcgtcgattacggagacaaagatttctatgtgtttgacatcctgtctgatagcgggaacgagaaagtttactgggatgactatcgcgtcgaatcgttttgcaccactgtgggtctgaaattagcgcctctgctgggacgtggtagtttcgctgaactgtcccagtacccaaacgatttcaaaagcctggtgaaccgttataatgaattggttgacacggtcggcctggagatggccaataaacacgtctttggtccgcaagcgtcttctgaaactggcctggcagaaggctacgttcttaaacccgtctatccgatcttctttaataccggtacgcgcgtggcgattaaatgcaagaactccaaattttcggagaaagccaagctggactcgccaattagtgcgaaggttgaactgacggagaacgataaacgtctgctcgaaatctttagcgagtatgttacctggaatcgcgtcagtaacgtactgtcacatattggctcagtgaccgcaaaagattttgggcgtgtttcgggtctgacgatgaaagacatcattaatgaagcagcacgcgaaggccatgatctgttgttcgctgataacccgtcggcggtgctgaaggagctgactggcgagatccagaacacgattcgctccaaatggcacgaagttctggag

SEQ ID NO: 1532 - protein, 346 aa, synthetic construct
  REGION 1..346: note = variant of RNA ligase 2 from Klebsiella phage KP179
MHHHHHHGGSNMFAYYSSLENHYNAKFIEKIRGAGFLMHTVEWVAREKIHGTNFSVIITPTEIVPAKRTGPILEGESFFGHEIIMKKYMDSFVKVQNMLNAMDLVSVQIFGEFAGGGIQKGVDYGDKDFYVFDILSDSGNEKVYWDDYRVESFCTTVGLKLAPLLGRGSFAELSQYPNDFKSLVNRYNELVDTVGLEMANKHVFGPQASSETGLAEGYVLKPVYPIFFNTGTRVAIKCKNSKFSEKAKLDSPISAKVELTENDKRLLEIFSEYVTWNRVSNVLSHIGSVTAKDFGRVSGLTMKDIINEAAREGHDLLFADNPSAVLKELTGEIQNTIRSKWHEVLE

SEQ ID NO: 1533 - DNA, 1038 bp, synthetic construct
  misc_feature 1..1038: note = variant of RNA ligase 2 from Klebsiella phage KP179
  source 1..1038: mol_type = other DNA
atgcatcaccatcaccatcacggtggcagcaacatgtttgcgtattattcaagtctggaaaaccattacaatgctaagttcattgagaagatccgtggtgcaggcttcaagatgcacaccgtggaatgggtagctcgcgagaagattcatggaacgaactttagcgttatcattactccgaccgaaatcgtcccagccaaacgcacagggccgatcttggaaggcgagtcgttctttggtcacgaaattatcatgaaaaaatatatggactccttcgtgaaggtgcagaacatgctgaatgccatggatcttgttagcgtgcaaatctttggcgaatttgcgggtggtggcattcagaaaggcgtcgattacggagacaaagatttctatgtgtttgacatcctgtctgatagcgggaacgagaaagtttactgggatgactatcgcgtcgaatcgttttgcaccactgtgggtctgaaattagcgcctctgctgggacgtggtagtttcgctgaactgtcccagtacccaaacgatttcaaaagcctggtgaaccgttataatgaattggttgacacggtcggcctggagatggccaataaacacgtctttggtccgcaagcgtcttctgaaactggcctggcagaaggctacgttcttaaacccgtctatccgatcttctttaataccggtacgcgcgtggcgattaaatgcaagaactccaaattttcggagaaagccaagctggactcgccaattagtgcgaaggttgaactgacggagaacgataaacgtctgctcgaaatctttagcgagtatgttacctggaatcgcgtcagtaacgtactgtcacatattggctcagtgaccgcaaaagattttgggcgtgtttcgggtctgacgatgaaagacatcattaatgaagcagcacgcgaaggccatgatctgttgttcgctgataacccgtcggcggtgctgaaggagctgactggcctcatccagaacacgattcgctccaaatggcacgaagttctggag

SEQ ID NO: 1534 - protein, 346 aa, synthetic construct
  REGION 1..346: note = variant of RNA ligase 2 from Klebsiella phage KP179
MHHHHHHGGSNMFAYYSSLENHYNAKFIEKIRGAGFKMHTVEWVAREKIHGTNFSVIITPTEIVPAKRTGPILEGESFFGHEIIMKKYMDSFVKVQNMLNAMDLVSVQIFGEFAGGGIQKGVDYGDKDFYVFDILSDSGNEKVYWDDYRVESFCTTVGLKLAPLLGRGSFAELSQYPNDFKSLVNRYNELVDTVGLEMANKHVFGPQASSETGLAEGYVLKPVYPIFFNTGTRVAIKCKNSKFSEKAKLDSPISAKVELTENDKRLLEIFSEYVTWNRVSNVLSHIGSVTAKDFGRVSGLTMKDIINEAAREGHDLLFADNPSAVLKELTGLIQNTIRSKWHEVLE

SEQ ID NO: 1535 - DNA, 1038 bp, synthetic construct
  misc_feature 1..1038: note = variant of RNA ligase 2 from Klebsiella phage KP179
  source 1..1038: mol_type = other DNA
atgcatcaccatcaccatcacggtggcagcaacatgtttgcgtattattcaagtctggaaaaccattacaatgctaagttcattgagaagatccgtggtgcaggcttcctgatgcacaccgtggaatgggtagctcgcgagaagattcatggaacgaactttagcgttatcattactccgaccgaaatcgtcccagccaaacgcacagggccgatcttggaaggcgagtcgttctttggtcacgaaattatcatgaaaaaatatatggactccttcgtgaaggtgcagaacatgctgaatgccatggatcttgttagcgtgcaaatctttggcgaatttgcgggtggtggcattcagaaaggcgtcgattacggagacaaagatttctatgtgtttgacatcctgtctgatagcgggaacgagaaagtttactgggatgactatcgcgtcgaatcgttttgcaccactgtgggtctgaaattagcgcctctgctgggacgtggtagtttcgctgaactgtcccagtacccaaacgatttcaaaagcctggtgaaccgttataatgaattggttgacacggtcggcctggagatggccaataaacacgtctttggtccgcaagcgtcttctgaaactggcctggcagaaggctacgttcttaaacccgtctatccgatcttctttaataccggtacgcgcgtggcgattaaatgcaagaactccaaattttcggagaaagccaagctggactcgccaattagtgcgaaggttgaactgacggagaacgataaacgtctgctcgaaatctttagcgagtatgttacctggaatcgcgtcagtaacgtactgtcacatattggctcagtgaccgcaaaagattttgggcgtgtttcgggtctgacgatgaaagacatcattaatgaagcagcacgcgaaggccatgatctgttgttcgctgataacccgtcggcggtgctgaaggagctgactcggctcatccagaacacgattcgctccaaatggcacgaagttctggag

SEQ ID NO: 1536 - protein, 346 aa, synthetic construct
  REGION 1..346: note = variant of RNA ligase 2 from Klebsiella phage KP179
MHHHHHHGGSNMFAYYSSLENHYNAKFIEKIRGAGFLMHTVEWVAREKIHGTNFSVIITPTEIVPAKRTGPILEGESFFGHEIIMKKYMDSFVKVQNMLNAMDLVSVQIFGEFAGGGIQKGVDYGDKDFYVFDILSDSGNEKVYWDDYRVESFCTTVGLKLAPLLGRGSFAELSQYPNDFKSLVNRYNELVDTVGLEMANKHVFGPQASSETGLAEGYVLKPVYPIFFNTGTRVAIKCKNSKFSEKAKLDSPISAKVELTENDKRLLEIFSEYVTWNRVSNVLSHIGSVTAKDFGRVSGLTMKDIINEAAREGHDLLFADNPSAVLKELTRLIQNTIRSKWHEVLE

SEQ ID NO: 1537 - DNA, 1038 bp, synthetic construct
  misc_feature 1..1038: note = variant of RNA ligase 2 from Klebsiella phage KP179
  source 1..1038: mol_type = other DNA
atgcatcaccatcaccatcacggtggcagcaacatgtttgcgtattattcaagtctggaaaaccattacaatgctaagttcattgagaagatccgtggtgcaggcttcctgatgcacaccgtggaatgggtagctcgcgagaagattcatggaacgaactttagcgttatcattactccgaccgaaatcgtcccagccaaacgcacagggccgatcttggaaggcgagtcgttctttggtcacgaaattatcatgaaaaaatatatggactccttcgtgaaggtgcagaacatgctgaatgccatggatcttgttagcgtgcaaatctttggcgaatttgcgggtggtggcattcagaaaggcgtcgattacggagacaaagatttctatgtgtttgacatcctgtctgatagcgggaacgagaaagtttactgggatgactatcgcgtcgaatcgttttgcaccactgtgggtctgaaattagcgcctctgctgggacgtggtagtttcgctgaactgtcccagtacccaaacgatttcaaaagcctggtgaaccgttataatgaattggttgacacggtcggcctggagatggccaataaacacgtctttggtccgcaagcgtcttctgaaactggcctggcagaaggctacgttcttaaacccgtctatccgatcttctttaataccggtacgcgcgtggcgattaaatgcaagaactccaaattttcggagaaagccaagctggactcgccaattagtgcgaaggttgaactgacggagaacgataaacgtctgctcgaaatctttagcgagtatgttacctggaatcgcgtcagtaacgtactgtcacatattggctcagtgaccgcaaaagattttgggcgtgtttcgggtctgacgatgaaagacatcattaatgaagcagcacgcgaaggccatgatctgttgttcgctgataacccgtcggcggtgctgaaggagctgaagggcctcatccagaacacgattcgctccaaatggcacgaagttctggag

SEQ ID NO: 1538 - protein, 346 aa, synthetic construct
  REGION 1..346: note = variant of RNA ligase 2 from Klebsiella phage KP179
MHHHHHHGGSNMFAYYSSLENHYNAKFIEKIRGAGFLMHTVEWVAREKIHGTNFSVIITPTEIVPAKRTGPILEGESFFGHEIIMKKYMDSFVKVQNMLNAMDLVSVQIFGEFAGGGIQKGVDYGDKDFYVFDILSDSGNEKVYWDDYRVESFCTTVGLKLAPLLGRGSFAELSQYPNDFKSLVNRYNELVDTVGLEMANKHVFGPQASSETGLAEGYVLKPVYPIFFNTGTRVAIKCKNSKFSEKAKLDSPISAKVELTENDKRLLEIFSEYVTWNRVSNVLSHIGSVTAKDFGRVSGLTMKDIINEAAREGHDLLFADNPSAVLKELKGLIQNTIRSKWHEVLE

SEQ ID NO: 1539 - DNA, 1038 bp, synthetic construct
  misc_feature 1..1038: note = variant of RNA ligase 2 from Klebsiella phage KP179
  source 1..1038: mol_type = other DNA
atgcatcaccatcaccatcacggtggcagcaacatgtttgcgtattattcaagtctggaaaaccattacaatgctaagttcattgagaagatccgtggtgcaggcttcctgatgcacaccgtggaatgggtagctcgcgagaagattcatggaacgaactttagcgttatcattactccgaccgaaatcgtcccagccaaacgcacagggccgatcttggaaggcgagtcgttctttggtcacgaaattatcatgaaaaaatatatggactccttcgtgaaggtgcagaacatgctgaatcctatggatcttgttagcgtgcaaatctttggcgaatttgcgggtggtggcattcagaaaggcgtcgattacggagacaaagatttctatgtgtttgacatcctgtctgatagcgggaacgagaaagtttactgggatgactatcgcgtcgaatcgttttgcaccactgtgggtctgaaattagcgcctctgctgggacgtggtagtttcgctgaactgtcccagtacccaaacgatttcaaaagcctggtgaaccgttataatgaattggttgacacggtcggcctggagatggccaataaacacgtctttggtccgcaagcgtcttctgaaactggcctggcagaaggctacgttcttaaacccgtctatccgatcttctttaataccggtacgcgcgtggcgattaaatgcaagaactccaaattttcggagaaagccaagctggactcgccaattagtgcgaaggttgaactgacggagaacgataaacgtctgctcgaaatctttagcgagtatgttacctggaatcgcgtcagtaacgtactgtcacatattggctcagtgaccgcaaaagattttgggcgtgtttcgggtctgacgatgaaagacatcattaatgaagcagcacgcgaaggccatgatctgttgttcgctgataacccgtcggcggtgctgaaggagctgactggcctcatccagaacacgattcgctccaaatggcacgaagttctggag

SEQ ID NO: 1540 - protein, 346 aa, synthetic construct
  REGION 1..346: note = variant of RNA ligase 2 from Klebsiella phage KP179
MHHHHHHGGSNMFAYYSSLENHYNAKFIEKIRGAGFLMHTVEWVAREKIHGTNFSVIITPTEIVPAKRTGPILEGESFFGHEIIMKKYMDSFVKVQNMLNPMDLVSVQIFGEFAGGGIQKGVDYGDKDFYVFDILSDSGNEKVYWDDYRVESFCTTVGLKLAPLLGRGSFAELSQYPNDFKSLVNRYNELVDTVGLEMANKHVFGPQASSETGLAEGYVLKPVYPIFFNTGTRVAIKCKNSKFSEKAKLDSPISAKVELTENDKRLLEIFSEYVTWNRVSNVLSHIGSVTAKDFGRVSGLTMKDIINEAAREGHDLLFADNPSAVLKELTGLIQNTIRSKWHEVLE

SEQ ID NO: 1541 - DNA, 1038 bp, synthetic construct
  misc_feature 1..1038: note = variant of RNA ligase 2 from Klebsiella phage KP179
  source 1..1038: mol_type = other DNA
atgcatcaccatcaccatcacggtggcagcaacatgtttgcgtattattcaagtctggaaaaccattacaatgctaagttcattgagaagatccgtggtgcaggcttcctgatgcacaccgtggaatgggtagctcgcgagaagattcatggaacgaactttagcgttatcattactccgaccgaaatcgtcccagccaaacgcacagggccgatcttggaaggcgagtcgttctttggtcacgaaattatcatgaaaaaatatatggactccttcgtgaaggtgcagaacatgctgaatgccatggatcttgttagcgtgcaaatctttggcgaatttgcgggtggtggcattcagaaaggcgtcgattacggagacaaagatttctatgtgtttgacatcctgtctgatagcgggaacgagaaagtttactgggatgactatcgcgtcgaatcgttttgcaccactgtgggtctgaaattagcgcctctgctgggacgtggtagtttcgctgaactgtcccagtacccaaacgatttcaaaagcctggtgaaccgttataatgaattggttgacacggtcggcctggagatggccaataaacacgtctttggtccgcaagcgtcttctgaaactggcctggcagaaggctacgttcttaaacccgtctatccgatcttctttaataccggtacgcgcgtggcgattaaatgcaagaactccaaattttcggagaaagccaagctggactcgccaattagtgcgaaggttgaactgacggagaacgataaacgtctgctcgggatctttagcgagtatgttacctggaatcgcgtcagtaacgtactgtcacatattggctcagtgaccgcaaaagattttgggcgtgtttcgggtctgacgatgaaagacatcattaatgaagcagcacgcgaaggccatgatctgttgttcgctgataacccgtcggcggtgctgaaggagctgactggcctcatccagaacacgattcgctccaaatggcacgaagttctggag

SEQ ID NO: 1542 - protein, 346 aa, synthetic construct
  REGION 1..346: note = variant of RNA ligase 2 from Klebsiella phage KP179
MHHHHHHGGSNMFAYYSSLENHYNAKFIEKIRGAGFLMHTVEWVAREKIHGTNFSVIITPTEIVPAKRTGPILEGESFFGHEIIMKKYMDSFVKVQNMLNAMDLVSVQIFGEFAGGGIQKGVDYGDKDFYVFDILSDSGNEKVYWDDYRVESFCTTVGLKLAPLLGRGSFAELSQYPNDFKSLVNRYNELVDTVGLEMANKHVFGPQASSETGLAEGYVLKPVYPIFFNTGTRVAIKCKNSKFSEKAKLDSPISAKVELTENDKRLLGIFSEYVTWNRVSNVLSHIGSVTAKDFGRVSGLTMKDIINEAAREGHDLLFADNPSAVLKELTGLIQNTIRSKWHEVLE

SEQ ID NO: 1543 - DNA, 1038 bp, synthetic construct
  misc_feature 1..1038: note = variant of RNA ligase 2 from Klebsiella phage KP179
  source 1..1038: mol_type = other DNA
atgcatcaccatcaccatcacggtggcagcaacatgtttgcgtattattcaagtctggaaaaccattacaatgctaagttcattgagaagatccgtggtgcaggcttcctgatgcacaccgtggaatgggtagctcgcgagaagattcatggaacgaactttagcgttatcattactccgaccgaaatcgtcccagccaaacgcacagggccgatcttggaaggcgagtcgttctttggtcacgaaattatcatgaaaaaatatatggactccttcgtgaaggtgcagaacatgctgaatgccatggatcttgttagcgtgcaaatctttggcgaatttgcgggtggtggcattcagaaaggcgtcgattacggagacaaagatttctatgtgtttgacatcctgtctgatagcgggaacgagaaagtttactgggatgactatcgcgtcgaatcgttttgcaccactgtgggtctgaaattagcgcctctgctgggacgtggtagtttcgctgaactgtcccagtacccaaacgatttcaaaagcctggtgaaccgttataatgaattggttgacacggtcggcctggagatggccaataaacacgtctttggtccgcaagcgtcttctgaaactggcctggcagaaggctacgttcttaaacccgtctatccgatcttctttaataccggtacgcgcgtggcgattaaatgcaagaactccaaattttcggagaaagccaagctggactcgccaattagtgcgaaggttgaactgacggagaacgataaacgtctgctcgaaatctttagcgagtatgttacctggaatcgcgtcagtaacgtactgtcacatattggctcagtgaccgcaaaagattttgggcgtgtttcgggtctgacgatgaaagacatcattcgtgaagcagcacgcgaaggccatgatctgttgttcgctgataacccgtcggcggtgctgaaggagctgactggcctcatccagaacacgattcgctccaaatggcacgaagttctggag

SEQ ID NO: 1544 - protein, 346 aa, synthetic construct
  REGION 1..346: note = variant of RNA ligase 2 from Klebsiella phage KP179
MHHHHHHGGSNMFAYYSSLENHYNAKFIEKIRGAGFLMHTVEWVAREKIHGTNFSVIITPTEIVPAKRTGPILEGESFFGHEIIMKKYMDSFVKVQNMLNAMDLVSVQIFGEFAGGGIQKGVDYGDKDFYVFDILSDSGNEKVYWDDYRVESFCTTVGLKLAPLLGRGSFAELSQYPNDFKSLVNRYNELVDTVGLEMANKHVFGPQASSETGLAEGYVLKPVYPIFFNTGTRVAIKCKNSKFSEKAKLDSPISAKVELTENDKRLLEIFSEYVTWNRVSNVLSHIGSVTAKDFGRVSGLTMKDIIREAAREGHDLLFADNPSAVLKELTGLIQNTIRSKWHEVLE

SEQ ID NO: 1545 - DNA, 1038 bp, synthetic construct
  misc_feature 1..1038: note = variant of RNA ligase 2 from Klebsiella phage KP179
  source 1..1038: mol_type = other DNA
atgcatcaccatcaccatcacggtggcagcaacatgtttgcgtattattcaagtctggaaaaccattacaatgctaagttcattgagaagatccgtggtgcaggcttcctgatgcacaccgtggaatgggtagctcgcgagaagattcatggaacgaactttagcgttatcattactccgaccgaaatcgtcccagccaaacgcacagggccgatcttggaaggcgagtcgttctttggtcacgaaattatcatgaaaaaatatatggactccttcgtgaaggtgcagaacatgctgaatgccatggatcttgttagcgtgcaaatctttggcgaatttgcgggtggtggcattcagaaaggcgtcgattacggagacaaagatttctatgtgtttgacatcctgtctgatagcgggaacgagaaagtttactgggatgactatcgcgtcgaatcgttttgcaccactgtgggtctgaaattagcgcctctgctgggacgtggtagtttcgctgaactgtcccagtacccaaacgatttcaaaagcctggtgaaccgttataatgaattggttgacacggtcggcctggagatggccaataaacacgtctttggtccgcaagcgtcttctgaaactggcctggcagaaggctacgttcttaaacccgtccagccgatcttctttaataccggtacgcgcgtggcgattaaatgcaagaactccaaattttcggagaaagccaagctggactcgccaattagtgcgaaggttgaactgacggagaacgataaacgtctgctcgaaatctttagcgagtatgttacctggaatcgcgtcagtaacgtactgtcacatattggctcagtgaccgcaaaagattttgggcgtgtttcgggtctgacgatgaaagacatcattaatgaagcagcacgcgaaggccatgatctgttgttcgctgataacccgtcggcggtgctgaaggagctgactggcctcatccagaacacgattcgctccaaatggcacgaagttctggag

SEQ ID NO: 1546 - protein, 346 aa, synthetic construct
  REGION 1..346: note = variant of RNA ligase 2 from Klebsiella phage KP179
MHHHHHHGGSNMFAYYSSLENHYNAKFIEKIRGAGFLMHTVEWVAREKIHGTNFSVIITPTEIVPAKRTGPILEGESFFGHEIIMKKYMDSFVKVQNMLNAMDLVSVQIFGEFAGGGIQKGVDYGDKDFYVFDILSDSGNEKVYWDDYRVESFCTTVGLKLAPLLGRGSFAELSQYPNDFKSLVNRYNELVDTVGLEMANKHVFGPQASSETGLAEGYVLKPVQPIFFNTGTRVAIKCKNSKFSEKAKLDSPISAKVELTENDKRLLEIFSEYVTWNRVSNVLSHIGSVTAKDFGRVSGLTMKDIINEAAREGHDLLFADNPSAVLKELTGLIQNTIRSKWHEVLE

SEQ ID NO: 1547 - DNA, 1038 bp, synthetic construct
  misc_feature 1..1038: note = variant of RNA ligase 2 from Klebsiella phage KP179
  source 1..1038: mol_type = other DNA
atgcatcaccatcaccatcacggtggcagcaacatgtttgcgtattattcaagtctggaaaaccattacaatgctaagttcattgagaagatccgtggtgcaggcttcctgatgcacaccgtggaatgggtagctcgcgagaagattcatggaacgaactttagcgttatcattactccgaccgaaatcgtcccagccaaacgcacagggccgatcttggaaggcgagtcgttctttggtcacgaaattatcatgaaaaaatatatggactccttcgtgaaggtgcagaacatgctgaatgccatggatcttgttagcgtgcaaatctttggcgaatttgcgggtggtggcattcagaaaggcgtcgattacggagacaaagatttctatgtgtttgacatcctgtctaatagcgggaacgagaaagtttactgggatgactatcgcgtcgaatcgttttgcaccactgtgggtctgaaattagcgcctctgctgggacgtggtagtttcgctgaactgtcccagtacccaaacgatttcaaaagcctggtgaaccgttataatgaattggttgacacggtcggcctggagatggccaataaacacgtctttggtccgcaagcgtcttctgaaactggcctggcagaaggctacgttcttaaacccgtctatccgatcttctttaataccggtacgcgcgtggcgattaaatgcaagaactccaaattttcggagaaagccaagctggactcgccaattagtgcgaaggttgaactgacggagaacgataaacgtctgctcgaaatctttagcgagtatgttacctggaatcgcgtcagtaacgtactgtcacatattggctcagtgaccgcaaaagattttgggcgtgtttcgggtctgacgatgaaagacatcattaatgaagcagcacgcgaaggccatgatctgttgttcgctgataacccgtcggcggtgctgaaggagctgactggcctcatccagaacacgattcgctccaaatggcacgaagttctggag

SEQ ID NO: 1548 - protein, 346 aa, synthetic construct
  REGION 1..346: note = variant of RNA ligase 2 from Klebsiella phage KP179
MHHHHHHGGSNMFAYYSSLENHYNAKFIEKIRGAGFLMHTVEWVAREKIHGTNFSVIITPTEIVPAKRTGPILEGESFFGHEIIMKKYMDSFVKVQNMLNAMDLVSVQIFGEFAGGGIQKGVDYGDKDFYVFDILSNSGNEKVYWDDYRVESFCTTVGLKLAPLLGRGSFAELSQYPNDFKSLVNRYNELVDTVGLEMANKHVFGPQASSETGLAEGYVLKPVYPIFFNTGTRVAIKCKNSKFSEKAKLDSPISAKVELTENDKRLLEIFSEYVTWNRVSNVLSHIGSVTAKDFGRVSGLTMKDIINEAAREGHDLLFADNPSAVLKELTGLIQNTIRSKWHEVLE

SEQ ID NO: 1549 - DNA, 1038 bp, synthetic construct
  misc_feature 1..1038: note = variant of RNA ligase 2 from Klebsiella phage KP179
  source 1..1038: mol_type = other DNA
atgcatcaccatcaccatcacggtggcagcaacatgtttgcgtattattcaagtctggaaaaccattacaatgctaagttcattgagaagatccgtggtgcaggcttcctgatgcacaccgtggaatgggtagctcgcgagaagattcatggaacgaactttagcgttatcattactccgaccgaaatcgtcccagccaaacgcacagggccgatcttggaaggcgagtcgttctttggtcacgaaattatcatgaaaaaatatatggactccttcgtgaaggtgcagaacatgctgaatgccatggatcttgttagcgtgcaaatctttggcgaatttgcgggtggtggcattcagaaaggcgtcgattacggagacaaagatttctatgtgtttgacatcctgtctgatagcgggaacgagaaagtttactgggatgactatcgcgtcgaatcgttttgcaccactgtgggtctgaaattagcgcctctgctgggacgtggtagtttcgctgaactgtcccagtacccaaacgatttcaaaagcctggtgaaccgttataatgaattggttgacacggtcggcctggagatggccaataaacacgtctttggtccgcaagcgtcttctgaaactggcctggcagaaggctacgttcttaaaccctgttatccgatcttctttaataccggtacgcgcgtggcgattaaatgcaagaactccaaattttcggagaaagccaagctggactcgccaattagtgcgaaggttgaactgacggagaacgataaacgtctgctcgaaatctttagcgagtatgttacctggaatcgcgtcagtaacgtactgtcacatattggctcagtgaccgcaaaagattttgggcgtgtttcgggtctgacgatgaaagacatcattaatgaagcagcacgcgaaggccatgatctgttgttcgctgataacccgtcggcggtgctgaaggagctgactggcctcatccagaacacgattcgctccaaatggcacgaagttctggag

SEQ ID NO: 1550 - protein, 346 aa, synthetic construct
  REGION 1..346: note = variant of RNA ligase 2 from Klebsiella phage KP179
MHHHHHHGGSNMFAYYSSLENHYNAKFIEKIRGAGFLMHTVEWVAREKIHGTNFSVIITPTEIVPAKRTGPILEGESFFGHEIIMKKYMDSFVKVQNMLNAMDLVSVQIFGEFAGGGIQKGVDYGDKDFYVFDILSDSGNEKVYWDDYRVESFCTTVGLKLAPLLGRGSFAELSQYPNDFKSLVNRYNELVDTVGLEMANKHVFGPQASSETGLAEGYVLKPCYPIFFNTGTRVAIKCKNSKFSEKAKLDSPISAKVELTENDKRLLEIFSEYVTWNRVSNVLSHIGSVTAKDFGRVSGLTMKDIINEAAREGHDLLFADNPSAVLKELTGLIQNTIRSKWHEVLE

SEQ ID NO: 1551 - DNA, 1038 bp, synthetic construct
  misc_feature 1..1038: note = variant of RNA ligase 2 from Klebsiella phage KP179
  source 1..1038: mol_type = other DNA
atgcatcaccatcaccatcacggtggcagcaacatgtttgcgtattattcaagtctggaaaaccattacaatgctaagttcattgagaagatccgtggtgcaggcttcctgatgcacaccgtggaatgggtagctcgcgagaagattcatggaacgaactttagcgttatcattactccgaccgaaatcgtcccagccaaacgcacagggccgatcttggaaggcgagtcgttctttggtcacgaaattatcatgaaaaaatatatggactccttcgtgaaggtgcagaacatgctgaatgccatggatcttgttagcgtgcaaatctttggcgaatttgcgggtggtggcattcagaaaggcgtcgattacggagacaaagatttctatgtgtttgacatcctgtctgatagcgggaacgagaaagtttactgggatgactatcgcgtcgaatcgttttgcaccactgtgggtctgaaattagcgcctctgctgggacgtggtagtttcgctgaactgtcccagtacccaaacgatttcaaaagcctggtgaaccgttataatgaattggttgacacggtcggcctggagatggccaataaacacgtctttggtccgcaagcgtcttctgaaactggcctggcagaaggctacgttcttaaacccgtctatccgatcttctttaataccggtacgcgcgtggcgattaaatgcaagaactccaaattttcggagaaagccaagctggactcgccaattagtgcgaaggttgaactgacggagaacgataaacgtctgctcgaaatctttagcgagtatgttacctggaatcgcgtcaacaacgtactgtcacatattggctcagtgaccgcaaaagattttgggcgtgtttcgggtctgacgatgaaagacatcattaatgaagcagcacgcgaaggccatgatctgttgttcgctgataacccgtcggcggtgctgaaggagctgactggcctcatccagaacacgattcgctccaaatggcacgaagttctggag

SEQ ID NO: 1552 - protein, 346 aa, synthetic construct
  REGION 1..346: note = variant of RNA ligase 2 from Klebsiella phage KP179
MHHHHHHGGSNMFAYYSSLENHYNAKFIEKIRGAGFLMHTVEWVAREKIHGTNFSVIITPTEIVPAKRTGPILEGESFFGHEIIMKKYMDSFVKVQNMLNAMDLVSVQIFGEFAGGGIQKGVDYGDKDFYVFDILSDSGNEKVYWDDYRVESFCTTVGLKLAPLLGRGSFAELSQYPNDFKSLVNRYNELVDTVGLEMANKHVFGPQASSETGLAEGYVLKPVYPIFFNTGTRVAIKCKNSKFSEKAKLDSPISAKVELTENDKRLLEIFSEYVTWNRVNNVLSHIGSVTAKDFGRVSGLTMKDIINEAAREGHDLLFADNPSAVLKELTGLIQNTIRSKWHEVLE

SEQ ID NO: 1553 - DNA, 1038 bp, synthetic construct
  misc_feature 1..1038: note = variant of RNA ligase 2 from Klebsiella phage KP179
  source 1..1038: mol_type = other DNA
atgcatcaccatcaccatcacggtggcagcaacatgtttgcgtattattcaagtctggaaaaccattacaatgctaagttcattgagaagatccgtggtgcaggcttcctgatgcacaccgtggaatgggtagctcgcgagaagattcatggaacgaactttagcgttatcattactccgaccgaaatcgtcccagccaaacgcacagggccgatcttggaaggcgagtcgttctttggtcacgaaattatcatgaaaaaatatatggactccttcgtgaaggtgcagaacatgctgaatgccatggatcttgttagcgtgcaaatctttggcgaatttgcgggtggtggcattcagaaaggcgtcgattacggagacaaagatttctatgtgtttgacatcctgtctgatagcgggaacgagaaagtttactgggatgactatcgcgtcgaatcgttttgcaccactgtgggtctgaaattagcgcctctgctgggacgtggtagtttcgctgaactgtcccagtacccaaacgatttcaaaagcctggtgaaccgttataatgaattggttgacacggtcggcctggagatggccaataaacacgtctttggtccgcaagcgtcttctgaaactggcctggcagaaggctacgttcttaaacccgtctatccgatcttctttaataccggtacgcgcgtggcgattaaatgcaagaactccaaattttcggagaaagccaagctggactcgccaattagtgcgaaggttgaactgacggagaacgataaacgtctgctcgaaatctttagcgagtatgttacctggaatcgcgtcagtaacgtactgtcacatattggctcaatcaccgcaaaagattttgggcgtgtttcgggtctgacgatgaaagacatcattaatgaagcagcacgcgaaggccatgatctgttgttcgctgataacccgtcggcggtgctgaaggagctgactggcctcatccagaacacgattcgctccaaatggcacgaagttctggag

SEQ ID NO: 1554 - protein, 346 aa, synthetic construct
  REGION 1..346: note = variant of RNA ligase 2 from Klebsiella phage KP179
MHHHHHHGGSNMFAYYSSLENHYNAKFIEKIRGAGFLMHTVEWVAREKIHGTNFSVIITPTEIVPAKRTGPILEGESFFGHEIIMKKYMDSFVKVQNMLNAMDLVSVQIFGEFAGGGIQKGVDYGDKDFYVFDILSDSGNEKVYWDDYRVESFCTTVGLKLAPLLGRGSFAELSQYPNDFKSLVNRYNELVDTVGLEMANKHVFGPQASSETGLAEGYVLKPVYPIFFNTGTRVAIKCKNSKFSEKAKLDSPISAKVELTENDKRLLEIFSEYVTWNRVSNVLSHIGSITAKDFGRVSGLTMKDIINEAAREGHDLLFADNPSAVLKELTGLIQNTIRSKWHEVLE

SEQ ID NO: 1555 - DNA, 1038 bp, synthetic construct
  misc_feature 1..1038: note = variant of RNA ligase 2 from Klebsiella phage KP179
  source 1..1038: mol_type = other DNA
atgcatcaccatcaccatcacggtggcagcaacatgtttgcgtattattcaagtctggaaaaccattacaatgctaagttcattgagaagatccgtggtgcaggcttcctgatgcacaccgtggaatgggtagctcgcgagaagattcatggaacgaactttagcgttatcattactccgaccgaaatcgtcccagccaaacgcacagggccgatcttggaaggcgagtcgttctttggtcacgaaattatcatgaaaaaatatatggactccttcgtgaaggtgcagaacatgctgaatgccatggatcttgttagcgtgcaaatctttggcgaatttgcgggtggtggcattcagaaaggcgtcgattacggagacaaagatttctatgtgtttgacatcctgtctgatagcgggaacgagaaagtttactgggatgactatcgcgtcgaatcgttttgcaccactgtgggtctgaaattagcgcctctgctgggacgtggtagtttcgctgaactgtcccagtacccaaacgatttcaaaagcctggtgaaccgttataatgaattggttgacacggtcggcctggagatggccaataaacacgtctttggtccgcaagcgtcttctgaaactggcctggcagaaggctacgttcttaaacccgtctatccgatcttctttaataccggtacgcgcgtggcgattaaatgcaagaactccaaattttcggagaaagccaagctggactcgccaattagtgcgaaggttgaactgacggagaacgataaacgtctgctcgaaatctttagcgagtatgttacctggaatcgcgtcagtaacgtactgtcacatattggcgaagtgaccgcaaaagattttgggcgtgtttcgggtctgacgatgaaagacatcattaatgaagcagcacgcgaaggccatgatctgttgttcgctgataacccgtcggcggtgctgaaggagctgactggcctcatccagaacacgattcgctccaaatggcacgaagttctggag

SEQ ID NO: 1556 - protein, 346 aa, synthetic construct
  REGION 1..346: note = variant of RNA ligase 2 from Klebsiella phage KP179
MHHHHHHGGSNMFAYYSSLENHYNAKFIEKIRGAGFLMHTVEWVAREKIHGTNFSVIITPTEIVPAKRTGPILEGESFFGHEIIMKKYMDSFVKVQNMLNAMDLVSVQIFGEFAGGGIQKGVDYGDKDFYVFDILSDSGNEKVYWDDYRVESFCTTVGLKLAPLLGRGSFAELSQYPNDFKSLVNRYNELVDTVGLEMANKHVFGPQASSETGLAEGYVLKPVYPIFFNTGTRVAIKCKNSKFSEKAKLDSPISAKVELTENDKRLLEIFSEYVTWNRVSNVLSHIGEVTAKDFGRVSGLTMKDIINEAAREGHDLLFADNPSAVLKELTGLIQNTIRSKWHEVLE

SEQ ID NO: 1557 - DNA, 1038 bp, synthetic construct
  misc_feature 1..1038: note = variant of RNA ligase 2 from Klebsiella phage KP179
  source 1..1038: mol_type = other DNA
atgcatcaccatcaccatcacggtggcagcaacatgtttgcgtattattcaagtctggaaaaccattacaatgctaagttcattgagaagatccgtggtgcaggcttcctgatgcacaccgtggaatgggtagctcgcgagaagattcatggaacgaactttagcgttatcattactccgaccgaaatcgtcccagccaaacgcacagggccgatcttggaaggcgagtcgttctttggtcacgaaattatcatgaaaaaatatatggactccttcgtgaaggtgcagaacatgctgaatgccatggatcttgttagcgtgcaaatctttggcgaatttgcgggtggtggcattcagaaaggcgtcgattacggagacaaagatttctatgtgtttgacatcctgtctgatagcgggaacgagaaagtttactgggatgactatcgcgtcgaatcgttttgcaccactgtgggtctgaaattagcgcctctgctgggacgtggtagtttcgctgaactgtcccagtacccaaacgatttcaaaagcctggtgaaccgttataatgaattggttgacacggtcggcctggagatggccaataaacacgtctttggtccgcaagcgtcttctgaaactggcctggcagaaggctacgttcttaaacccgtctatccgatcttctttaataccggtacgcgcgtggcgattaaatgcaagaactccaaattttcggagaaagccaagctggactcgccaattagtgcgaaggttgaactgacggagaacgataaacgtctgctcgaaatctttagcgagtatgttacctggaatcgcgtcagtaacgtactgtcacatattggctcagtgaccgcaaaagattttgggcgtgtttcgggtctgacgatgaaagacatcattaatgaagcagcacgcgaaggccatgatctgttgttcgctgataacccgtcggcggtgctgaaggagctgactggcctcatccagaacacgattcgctccaaatggacggaagttctggag

SEQ ID NO: 1558 - protein, 346 aa, synthetic construct
  REGION 1..346: note = variant of RNA ligase 2 from Klebsiella phage KP179
MHHHHHHGGSNMFAYYSSLENHYNAKFIEKIRGAGFLMHTVEWVAREKIHGTNFSVIITPTEIVPAKRTGPILEGESFFGHEIIMKKYMDSFVKVQNMLNAMDLVSVQIFGEFAGGGIQKGVDYGDKDFYVFDILSDSGNEKVYWDDYRVESFCTTVGLKLAPLLGRGSFAELSQYPNDFKSLVNRYNELVDTVGLEMANKHVFGPQASSETGLAEGYVLKPVYPIFFNTGTRVAIKCKNSKFSEKAKLDSPISAKVELTENDKRLLEIFSEYVTWNRVSNVLSHIGSVTAKDFGRVSGLTMKDIINEAAREGHDLLFADNPSAVLKELTGLIQNTIRSKWTEVLE

SEQ ID NO: 1559 - DNA, 1038 bp, synthetic construct
  misc_feature 1..1038: note = variant of RNA ligase 2 from Klebsiella phage KP179
  source 1..1038: mol_type = other DNA
atgcatcaccatcaccatcacggtggcagcaacatgtttgcgtattattcaagtctggaaaaccattacaatgctaagttcattgagaagatccgtggtgcaggcttcctgatgcacaccgtggaatgggtagctcgcgagaagattcatggaacgaactttagcgttatcattactccgaccgaaatcgtcccagccaaacgcacagggccgatcttggaaggcgagtcgttctttggtcacgaaattatcatgaaaaaatatatggactccttcaaaaaggtgcagaacatgctgaatgccatggatcttgttagcgtgcaaatctttggcgaatttgcgggtggtggcattcagaaaggcgtcgattacggagacaaagatttctatgtgtttgacatcctgtctgatagcgggaacgagaaagtttactgggatgactatcgcgtcgaatcgttttgcaccactgtgggtctgaaattagcgcctctgctgggacgtggtagtttcgctgaactgtcccagtacccaaacgatttcaaaagcctggtgaaccgttataatgaattggttgacacggtcggcctggagatggccaataaacacgtctttggtccgcaagcgtcttctgaaactggcctggcagaaggctacgttcttaaacccgtctatccgatcttctttaataccggtacgcgcgtggcgattaaatgcaagaactccaaattttcggagaaagccaagctggactcgccaattagtgcgaaggttgaactgacggagaacgataaacgtctgctcgaaatctttagcgagtatgttacctggaatcgcgtcagtaacgtactgtcacatattggctcagtgaccgcaaaagattttgggcgtgtttcgggtctgacgatgaaagacatcattaatgaagcagcacgcgaaggccatgatctgttgttcgctgataacccgtcggcggtgctgaaggagctgactggcctcatccagaacacgattcgctccaaatggcacgaagttctggag

SEQ ID NO: 1560 - protein, 346 aa, synthetic construct
  REGION 1..346: note = variant of RNA ligase 2 from Klebsiella phage KP179
MHHHHHHGGSNMFAYYSSLENHYNAKFIEKIRGAGFLMHTVEWVAREKIHGTNFSVIITPTEIVPAKRTGPILEGESFFGHEIIMKKYMDSFKKVQNMLNAMDLVSVQIFGEFAGGGIQKGVDYGDKDFYVFDILSDSGNEKVYWDDYRVESFCTTVGLKLAPLLGRGSFAELSQYPNDFKSLVNRYNELVDTVGLEMANKHVFGPQASSETGLAEGYVLKPVYPIFFNTGTRVAIKCKNSKFSEKAKLDSPISAKVELTENDKRLLEIFSEYVTWNRVSNVLSHIGSVTAKDFGRVSGLTMKDIINEAAREGHDLLFADNPSAVLKELTGLIQNTIRSKWHEVLE

SEQ ID NO: 1561 - DNA, 1038 bp, synthetic construct
  misc_feature 1..1038: note = variant of RNA ligase 2 from Klebsiella phage KP179
  source 1..1038: mol_type = other DNA
atgcatcaccatcaccatcacggtggcagcaacatgtttgcgtattattcaagtctggaaaaccattacaatgctaagttcattgagaagatccgtggtgcaggcttcctgatgcacaccgtggaatgggtagctcgcgagaagattcatggaacgaactttagcgttatcattactccgaccgaaatcgtcccagccaaacgcacagggccgatcttggaaggcgagtcgttctttggtcacgaaattatcatgaaaaaatatatggactccttcgtgaaggtgcagaacatgctgaatgccatggatcttgttagcgtgcaaatctttggcgaatttgcgggtggtggcattcagaaaggcgtcgattacggagacaaagatttctatgtgtttgacatcctgtctgatagcgggaacgagaaagtttactgggatgactatcgcgtcgaatcgttttgcaccactgtgggtctgaaattagcgcctctgctgggacgtggtagtttcgctgaactgtcccagtacccaaacgatttcaaaagcctggtgaaccgttataatgaattggttgacacggtcggcctggagatggccaataaacacgtctttggtccgcaagcgtcttctgaaactggcctggcagaaggctacgttcttaaacccgtctatccgatcttctttaataccggtacgcgcgtggcgattaaatgcaagaactccaaattttcggagaaagccaagctggactcgccaattagtgcgaaggttgaactgacggagaacgataaacgtctgctcatgatctttagcgagtatgttacctggaatcgcgtcagtaacgtactgtcacatattggctcagtgaccgcaaaagattttgggcgtgtttcgggtctgacgatgaaagacatcattaatgaagcagcacgcgaaggccatgatctgttgttcgctgataacccgtcggcggtgctgaaggagctgactggcctcatccagaacacgattcgctccaaatggcacgaagttctggag

SEQ ID NO: 1562 - protein, 346 aa, synthetic construct
  REGION 1..346: note = variant of RNA ligase 2 from Klebsiella phage KP179
MHHHHHHGGSNMFAYYSSLENHYNAKFIEKIRGAGFLMHTVEWVAREKIHGTNFSVIITPTEIVPAKRTGPILEGESFFGHEIIMKKYMDSFVKVQNMLNAMDLVSVQIFGEFAGGGIQKGVDYGDKDFYVFDILSDSGNEKVYWDDYRVESFCTTVGLKLAPLLGRGSFAELSQYPNDFKSLVNRYNELVDTVGLEMANKHVFGPQASSETGLAEGYVLKPVYPIFFNTGTRVAIKCKNSKFSEKAKLDSPISAKVELTENDKRLLMIFSEYVTWNRVSNVLSHIGSVTAKDFGRVSGLTMKDIINEAAREGHDLLFADNPSAVLKELTGLIQNTIRSKWHEVLE

SEQ ID NO: 1563 - DNA, 1038 bp, synthetic construct
  misc_feature 1..1038: note = variant of RNA ligase 2 from Klebsiella phage KP179
  source 1..1038: mol_type = other DNA
atgcatcaccatcaccatcacggtggcagcaacatgtttgcgtattattcaagtctggaaaaccattacaatgctaagttcattgagaagatccgtggtgcaggcttcctgatgcacaccgtggaatgggtagctcgcgagaagattcatggaacgaactttagcgttatcattactccgaccgaaatcgtcccagccaaacgcacagggccgatcttggaaggcgagtcgttctttggtcacgaaattatcatgaaaaaatatatggactccttcgtgaaggtgcagaacatgctgaatgccatggatcttgttagcgtgcaaatctttggcgaatttgcgggtggtggcattcagaaaggcgtcgattacggagacaaagatttctatgtgtttgacatcctgtctgatagcgggaacgagaaagtttactgggatgactatcgcgtcgaatcgttttgcaccactgtgggtctgaaattagcgcctctgctgggacgtggtagtttcgctgaactgtcccagtacccaaacgatttcaaaagcctggtgaaccgttataatgaattggttgacacggtcggcctggagatggccaataaacacgtctttggtccgcaagcgtcttctgaaactggcctggcagaaggctacgttcttaaacccgtctatccgatcttctttaataccggtacgcgcgtggcgattaaatgcaagaactccaaattttcggagaaagccaagctggactcgccaattagtgcgaaggttgaactgacggagaacgataaacgtctgctcgaaatctttagcgagtatgttacctggaatcgcgtcagtaacgtactgtcacatattggctcagtgaccgcaaaagattttgggcaggtttcgggtctgacgatgaaagacatcattaatgaagcagcacgcgaaggccatgatctgttgttcgctgataacccgtcggcggtgctgaaggagctgactggcctcatccagaacacgattcgctccaaatggcacgaagttctggag

SEQ ID NO: 1564 - protein, 346 aa, synthetic construct
  REGION 1..346: note = variant of RNA ligase 2 from Klebsiella phage KP179
MHHHHHHGGSNMFAYYSSLENHYNAKFIEKIRGAGFLMHTVEWVAREKIHGTNFSVIITPTEIVPAKRTGPILEGESFFGHEIIMKKYMDSFVKVQNMLNAMDLVSVQIFGEFAGGGIQKGVDYGDKDFYVFDILSDSGNEKVYWDDYRVESFCTTVGLKLAPLLGRGSFAELSQYPNDFKSLVNRYNELVDTVGLEMANKHVFGPQASSETGLAEGYVLKPVYPIFFNTGTRVAIKCKNSKFSEKAKLDSPISAKVELTENDKRLLEIFSEYVTWNRVSNVLSHIGSVTAKDFGQVSGLTMKDIINEAAREGHDLLFADNPSAVLKELTGLIQNTIRSKWHEVLE

SEQ ID NO: 1565 - DNA, 1038 bp, synthetic construct
  misc_feature 1..1038: note = variant of RNA ligase 2 from Klebsiella phage KP179
  source 1..1038: mol_type = other DNA
atgcatcaccatcaccatcacggtggcagcaacatgtttgcgtattattcaagtctggaaaaccattacaatgctaagttcattgagaagatccgtggtgcaggcttcctgatgcacaccgtggaatgggtagctcgcgagaagattcatggaacgaactttagcgttatcattactccgaccgaaatcgtcccagccaaacgcacagggccgatcttggaaggcgagtcgttctttggtcacgaaattatcatgggtaaatatatggactccttcgtgaaggtgcagaacatgctgaatgccatggatcttgttagcgtgcaaatctttggcgaatttgcgggtggtggcattcagaaaggcgtcgattacggagacaaagatttctatgtgtttgacatcctgtctgatagcgggaacgagaaagtttactgggatgactatcgcgtcgaatcgttttgcaccactgtgggtctgaaattagcgcctctgctgggacgtggtagtttcgctgaactgtcccagtacccaaacgatttcaaaagcctggtgaaccgttataatgaattggttgacacggtcggcctggagatggccaataaacacgtctttggtccgcaagcgtcttctgaaactggcctggcagaaggctacgttcttaaacccgtctatccgatcttctttaataccggtacgcgcgtggcgattaaatgcaagaactccaaattttcggagaaagccaagctggactcgccaattagtgcgaaggttgaactgacggagaacgataaacgtctgctcgaaatctttagcgagtatgttacctggaatcgcgtcagtaacgtactgtcacatattggctcagtgaccgcaaaagattttgggcgtgtttcgggtctgacgatgaaagacatcattaatgaagcagcacgcgaaggccatgatctgttgttcgctgataacccgtcggcggtgctgaaggagctgactggcctcatccagaacacgattcgctccaaatggcacgaagttctggag

SEQ ID NO: 1566 - protein, 346 aa, synthetic construct
  REGION 1..346: note = variant of RNA ligase 2 from Klebsiella phage KP179
MHHHHHHGGSNMFAYYSSLENHYNAKFIEKIRGAGFLMHTVEWVAREKIHGTNFSVIITPTEIVPAKRTGPILEGESFFGHEIIMGKYMDSFVKVQNMLNAMDLVSVQIFGEFAGGGIQKGVDYGDKDFYVFDILSDSGNEKVYWDDYRVESFCTTVGLKLAPLLGRGSFAELSQYPNDFKSLVNRYNELVDTVGLEMANKHVFGPQASSETGLAEGYVLKPVYPIFFNTGTRVAIKCKNSKFSEKAKLDSPISAKVELTENDKRLLEIFSEYVTWNRVSNVLSHIGSVTAKDFGRVSGLTMKDIINEAAREGHDLLFADNPSAVLKELTGLIQNTIRSKWHEVLE

SEQ ID NO: 1567 - DNA, 1038 bp, synthetic construct
  misc_feature 1..1038: note = variant of RNA ligase 2 from Klebsiella phage KP179
  source 1..1038: mol_type = other DNA
atgcatcaccatcaccatcacggtggcagcaacatgtttgcgtattattcaagtctggaaaaccattacaatgctaagttcattgagaagatccgtggtgcaggcttcctgatgcacaccgtggaatgggtagctcgcgagaagattcatggaacgaactttagcgttatcattactccgaccgaaatcgtcccagccaaacgcacagggccgatcttggaaggcgagtcgttctttggtcacgaaattatcatgaaaaaatatatggactccttcgtgaaggtgcagaacatgctgaatgccatggatcttgttagcgtgcaaatctttggcgaatttgcgggtggtggcattcagaaaggcgtcgattacggagacaaagatttctatgtgtttgacatcctgtctgatagcgggaacgagaaagtttactgggatgactatcgcgtcgaatcgttttgcaccactgtgggtctgaaattagcgcctctgctgggacgtggtagtttcgctgaactgtcccagtacccaaacgatttcaaaagcctggtgaaccgttataatgaattggttgacacggtcggcctggagatggccaataaacacgtctttggtccgcaagcgtcttctgaaactggcctggcagaaggctacgttcttaaacccgtctatccgatcttctttaataccggtacgcgcgtggcgattaaatgcaagaaccagaaattttcggagaaagccaagctggactcgccaattagtgcgaaggttgaactgacggagaacgataaacgtctgctcgaaatctttagcgagtatgttacctggaatcgcgtcagtaacgtactgtcacatattggctcagtgaccgcaaaagattttgggcgtgtttcgggtctgacgatgaaagacatcattaatgaagcagcacgcgaaggccatgatctgttgttcgctgataacccgtcggcggtgctgaaggagctgactggcctcatccagaacacgattcgctccaaatggcacgaagttctggag

SEQ ID NO: 1568 - protein, 346 aa, synthetic construct
  REGION 1..346: note = variant of RNA ligase 2 from Klebsiella phage KP179
MHHHHHHGGSNMFAYYSSLENHYNAKFIEKIRGAGFLMHTVEWVAREKIHGTNFSVIITPTEIVPAKRTGPILEGESFFGHEIIMKKYMDSFVKVQNMLNAMDLVSVQIFGEFAGGGIQKGVDYGDKDFYVFDILSDSGNEKVYWDDYRVESFCTTVGLKLAPLLGRGSFAELSQYPNDFKSLVNRYNELVDTVGLEMANKHVFGPQASSETGLAEGYVLKPVYPIFFNTGTRVAIKCKNQKFSEKAKLDSPISAKVELTENDKRLLEIFSEYVTWNRVSNVLSHIGSVTAKDFGRVSGLTMKDIINEAAREGHDLLFADNPSAVLKELTGLIQNTIRSKWHEVLE

SEQ ID NO: 1569 - DNA, 1038 bp, synthetic construct
  misc_feature 1..1038: note = variant of RNA ligase 2 from Klebsiella phage KP179
  source 1..1038: mol_type = other DNA
atgcatcaccatcaccatcacggtggcagcaacatgtttgcgtattattcaagtctggaaaaccattacaatgctaagttcattgagaagatccgtggtgcaggcttcctgatgcacaccgtggaatgggtagctcgcgagaagattcatggaacgaactttagcgttatcattactccgaccgaaatcgtcccagccaaacgcacagggccgatcttggaaggcgagtcgttctttggtcacgaaattatcatgaaaaaatatatggactccttcgtgaaggtgcagaacatgctgaatgccatggatcttgttagcgtgcaaatctttggcgaatttgcgggtggtggcattcagaaaggcgtcgattacggaatgaaagatttctatgtgtttgacatcctgtctgatagcgggaacgagaaagtttactgggatgactatcgcgtcgaatcgttttgcaccactgtgggtctgaaattagcgcctctgctgggacgtggtagtttcgctgaactgtcccagtacccaaacgatttcaaaagcctggtgaaccgttataatgaattggttgacacggtcggcctggagatggccaataaacacgtctttggtccgcaagcgtcttctgaaactggcctggcagaaggctacgttcttaaacccgtctatccgatcttctttaataccggtacgcgcgtggcgattaaatgcaagaactccaaattttcggagaaagccaagctggactcgccaattagtgcgaaggttgaactgacggagaacgataaacgtctgctcgaaatctttagcgagtatgttacctggaatcgcgtcagtaacgtactgtcacatattggctcagtgaccgcaaaagattttgggcgtgtttcgggtctgacgatgaaagacatcattaatgaagcagcacgcgaaggccatgatctgttgttcgctgataacccgtcggcggtgctgaaggagctgactggcctcatccagaacacgattcgctccaaatggcacgaagttctggag

SEQ ID NO: 1570 - protein, 346 aa, synthetic construct
  REGION 1..346: note = variant of RNA ligase 2 from Klebsiella phage KP179
MHHHHHHGGSNMFAYYSSLENHYNAKFIEKIRGAGFLMHTVEWVAREKIHGTNFSVIITPTEIVPAKRTGPILEGESFFGHEIIMKKYMDSFVKVQNMLNAMDLVSVQIFGEFAGGGIQKGVDYGMKDFYVFDILSDSGNEKVYWDDYRVESFCTTVGLKLAPLLGRGSFAELSQYPNDFKSLVNRYNELVDTVGLEMANKHVFGPQASSETGLAEGYVLKPVYPIFFNTGTRVAIKCKNSKFSEKAKLDSPISAKVELTENDKRLLEIFSEYVTWNRVSNVLSHIGSVTAKDFGRVSGLTMKDIINEAAREGHDLLFADNPSAVLKELTGLIQNTIRSKWHEVLE

SEQ ID NO: 1571 - DNA, 1038 bp, synthetic construct
  misc_feature 1..1038: note = variant of RNA ligase 2 from Klebsiella phage KP179
  source 1..1038: mol_type = other DNA
atgcatcaccatcaccatcacggtggcagcaacatgtttgcgtattattcaagtctggaaaaccattacaatgctaagttcattgagaagatccgtggtgcaggcttcctgatgcacaccgtggaatgggtagctcgcgagaagattcatggaacgaactttagcgttatcattactccgaccgaaatcgtcccagccaaacgcacagggccgatcttggaaggcgagtcgttctttggtcacgaaattatcatgaaaaaatatatggactccttcgtgaaggtgcagaacatgctgaatgccatggatcttgttagcgtgcaaatctttggcgaatttgcgggtggtggcattcagaaaggcgtcgattacggagacaaagatttctatgtgtttgacatcctgtctgatagcgggaacgagaaagtttactgggatgactatcgcgtcgaatcgttttgcaccactgtgggtctgaaattagcgcctctgctgggacgtggtagtttcgctgaactgtcccagtacccaaacgatttcaaaagcctggtgaaccgttataatgaattggttgacacggtcggcctggagatggccaataaacacgtctttggtccgcaagcgtcttctgaaactggcctggcagaaggctacgttcttaaacccgtctatccgatcttctttaataccggtacgcgcgtggcgattaaatgcaagaactccaaattttcggagaaagccaagctggactcgccaattagtgcgaaggttgaactgacggagaacgataaacgtctgctcgaaatctttagcgagtatgttacctgggcgcgcgtcagtaacgtactgtcacatattggctcagtgaccgcaaaagattttgggcgtgtttcgggtctgacgatgaaagacatcattaatgaagcagcacgcgaaggccatgatctgttgttcgctgataacccgtcggcggtgctgaaggagctgactggcctcatccagaacacgattcgctccaaatggcacgaagttctggag

SEQ ID NO: 1572 - protein, 346 aa, synthetic construct
  REGION 1..346: note = variant of RNA ligase 2 from Klebsiella phage KP179
MHHHHHHGGSNMFAYYSSLENHYNAKFIEKIRGAGFLMHTVEWVAREKIHGTNFSVIITPTEIVPAKRTGPILEGESFFGHEIIMKKYMDSFVKVQNMLNAMDLVSVQIFGEFAGGGIQKGVDYGDKDFYVFDILSDSGNEKVYWDDYRVESFCTTVGLKLAPLLGRGSFAELSQYPNDFKSLVNRYNELVDTVGLEMANKHVFGPQASSETGLAEGYVLKPVYPIFFNTGTRVAIKCKNSKFSEKAKLDSPISAKVELTENDKRLLEIFSEYVTWARVSNVLSHIGSVTAKDFGRVSGLTMKDIINEAAREGHDLLFADNPSAVLKELTGLIQNTIRSKWHEVLE

SEQ ID NO: 1573 - DNA, 1038 bp, synthetic construct
  misc_feature 1..1038: note = variant of RNA ligase 2 from Klebsiella phage KP179
  source 1..1038: mol_type = other DNA
atgcatcaccatcaccatcacggtggcagcaacatgtttgcgtattattcaagtctggaaaaccattacaatgctaagttcattgagaagatccgtggtgcaggcttcctgatgcacaccgtggaatgggtagctcgcgagaagattcatggaacgaactttagcgttatcattactccgaccgaaatcgtcccagccaaacgcacagggccgatcttggaaggcgagtcgttctttggtcacgaaattatcatgaaagagtatatggactccttcgtgaaggtgcagaacatgctgaatgccatggatcttgttagcgtgcaaatctttggcgaatttgcgggtggtggcattcagaaaggcgtcgattacggagacaaagatttctatgtgtttgacatcctgtctgatagcgggaacgagaaagtttactgggatgactatcgcgtcgaatcgttttgcaccactgtgggtctgaaattagcgcctctgctgggacgtggtagtttcgctgaactgtcccagtacccaaacgatttcaaaagcctggtgaaccgttataatgaattggttgacacggtcggcctggagatggccaataaacacgtctttggtccgcaagcgtcttctgaaactggcctggcagaaggctacgttcttaaacccgtctatccgatcttctttaataccggtacgcgcgtggcgattaaatgcaagaactccaaattttcggagaaagccaagctggactcgccaattagtgcgaaggttgaactgacggagaacgataaacgtctgctcgaaatctttagcgagtatgttacctggaatcgcgtcagtaacgtactgtcacatattggctcagtgaccgcaaaagattttgggcgtgtttcgggtctgacgatgaaagacatcattaatgaagcagcacgcgaaggccatgatctgttgttcgctgataacccgtcggcggtgctgaaggagctgactggcctcatccagaacacgattcgctccaaatggcacgaagttctggag

SEQ ID NO: 1574 - protein, 346 aa, synthetic construct
  REGION 1..346: note = variant of RNA ligase 2 from Klebsiella phage KP179
MHHHHHHGGSNMFAYYSSLENHYNAKFIEKIRGAGFLMHTVEWVAREKIHGTNFSVIITPTEIVPAKRTGPILEGESFFGHEIIMKEYMDSFVKVQNMLNAMDLVSVQIFGEFAGGGIQKGVDYGDKDFYVFDILSDSGNEKVYWDDYRVESFCTTVGLKLAPLLGRGSFAELSQYPNDFKSLVNRYNELVDTVGLEMANKHVFGPQASSETGLAEGYVLKPVYPIFFNTGTRVAIKCKNSKFSEKAKLDSPISAKVELTENDKRLLEIFSEYVTWNRVSNVLSHIGSVTAKDFGRVSGLTMKDIINEAAREGHDLLFADNPSAVLKELTGLIQNTIRSKWHEVLE

SEQ ID NO: 1575 - DNA, 1038 bp, synthetic construct
  misc_feature 1..1038: note = variant of RNA ligase 2 from Klebsiella phage KP179
  source 1..1038: mol_type = other DNA
atgcatcaccatcaccatcacggtggcagcaacatgtttgcgtattattcaagtctggaaaaccattacaatgctaagttcattgagaagatccgtggtgcaggcttcctgatgcacaccgtggaatgggtagctcgcgagaagattcatggaacgaactttagcgttatcattactccgaccgaaatcgtcccagccaaacgcacagggccgatcttggaaggcgagtcgttctttggtcacgaaattatcatgaaaaaatatatggactccttcgtgaaggtgcagaacatgctgaatgccatggatcttgttagcgtgcaaatctttggcgaatttgcgggtggtggcattcagaaaggcgtcgattacggagacaaagatttctatgtgtttgacatcctgtctgatagcgggaacgagaaagtttactgggatgactatcgcgtcgaatcgttttgcaccactgtgggtctgaaattagcgcctctgctgggacgtggtagtttcgctgaactgtcccagtacccaaacgatttcaaaagcctggtgaaccgttataatgaattggttgacacggtcggcctggagatggccaataaacacgtctttggtccgcaagcgtcttctgaaactggcctggcagaaggctacgttcttaaacccgtctatccgatcttctttaataccggtacgcgcgtggcgattaaatgcaagaactccaaattttcggagaaaatcaagctggactcgccaattagtgcgaaggttgaactgacggagaacgataaacgtctgctcgaaatctttagcgagtatgttacctggaatcgcgtcagtaacgtactgtcacatattggctcagtgaccgcaaaagattttgggcgtgtttcgggtctgacgatgaaagacatcattaatgaagcagcacgcgaaggccatgatctgttgttcgctgataacccgtcggcggtgctgaaggagctgactggcctcatccagaacacgattcgctccaaatggcacgaagttctggag

SEQ ID NO: 1576 - protein, 346 aa, synthetic construct
  REGION 1..346: note = variant of RNA ligase 2 from Klebsiella phage KP179
MHHHHHHGGSNMFAYYSSLENHYNAKFIEKIRGAGFLMHTVEWVAREKIHGTNFSVIITPTEIVPAKRTGPILEGESFFGHEIIMKKYMDSFVKVQNMLNAMDLVSVQIFGEFAGGGIQKGVDYGDKDFYVFDILSDSGNEKVYWDDYRVESFCTTVGLKLAPLLGRGSFAELSQYPNDFKSLVNRYNELVDTVGLEMANKHVFGPQASSETGLAEGYVLKPVYPIFFNTGTRVAIKCKNSKFSEKIKLDSPISAKVELTENDKRLLEIFSEYVTWNRVSNVLSHIGSVTAKDFGRVSGLTMKDIINEAAREGHDLLFADNPSAVLKELTGLIQNTIRSKWHEVLE

SEQ ID NO: 1577 - DNA, 1038 bp, synthetic construct
  misc_feature 1..1038: note = variant of RNA ligase 2 from Klebsiella phage KP179
  source 1..1038: mol_type = other DNA
atgcatcaccatcaccatcacggtggcagcaacatgtttgcgtattattcaagtctggaaaaccattacaatgctaagttcattgagaagatccgtggtgcaggcttcctgatgcacaccgtggaatgggtagctcgcgagaagattcatggaacgaactttagcgttatcattactccgaccgaaatcgtcccagccaaacgcacagggccgatcttggaaggcgagtcgttctttggtcacgaaattatcatgaaaaaatatatggactccttcgtgaaggtgcagaacatgctgaatgccatggatcttgttagcgtgcaaatctttggcgaatttgcgggtggtggcattcagaaaggcgtcgattacggagacaaagatttctatgtgtttgacatcctgtctgatagcgggaacgagaaagtttactgggatgactatcgcgtcgaatcgttttgcaccactgtgggtctgaaattagcgcctctgctgggacgtggtagtttcgctgaactgtcccagtacccaaacgatttcaaaagcctggtgaaccgttataatgaattggttgacacggtcggcctggagatggccaataaacacgtctttggtccgcaagcgtcttctgaaactggcctggcagaaggctacgttcttaaacccgtctatccgatcttctttaataccggtacgcgcgtggcgattaaatgcaagaactccaaacattcggagaaagccaagctggactcgccaattagtgcgaaggttgaactgacggagaacgataaacgtctgctcgaaatctttagcgagtatgttacctggaatcgcgtcagtaacgtactgtcacatattggctcagtgaccgcaaaagattttgggcgtgtttcgggtctgacgatgaaagacatcattaatgaagcagcacgcgaaggccatgatctgttgttcgctgataacccgtcggcggtgctgaaggagctgactggcctcatccagaacacgattcgctccaaatggcacgaagttctggag

SEQ ID NO: 1578 - protein, 346 aa, synthetic construct
  REGION 1..346: note = variant of RNA ligase 2 from Klebsiella phage KP179
MHHHHHHGGSNMFAYYSSLENHYNAKFIEKIRGAGFLMHTVEWVAREKIHGTNFSVIITPTEIVPAKRTGPILEGESFFGHEIIMKKYMDSFVKVQNMLNAMDLVSVQIFGEFAGGGIQKGVDYGDKDFYVFDILSDSGNEKVYWDDYRVESFCTTVGLKLAPLLGRGSFAELSQYPNDFKSLVNRYNELVDTVGLEMANKHVFGPQASSETGLAEGYVLKPVYPIFFNTGTRVAIKCKNSKHSEKAKLDSPISAKVELTENDKRLLEIFSEYVTWNRVSNVLSHIGSVTAKDFGRVSGLTMKDIINEAAREGHDLLFADNPSAVLKELTGLIQNTIRSKWHEVLE

SEQ ID NO: 1579 - DNA, 1038 bp, synthetic construct
  misc_feature 1..1038: note = variant of RNA ligase 2 from Klebsiella phage KP179
  source 1..1038: mol_type = other DNA
atgcatcaccatcaccatcacggtggcagcaacatgtttgcgtattattcaagtctggaaaaccattacaatgctaagttcattgagaagatccgtggtgcaggcttcctgatgcacaccgtggaatgggtagctcgcgagaagattcatggaacgaactttagcgttatcattactccgaccgaaatcgtcccagccaaacgcacagggccgatcttggaaggcgagtcgttctttggtcacgaaattgtcatgaaaaaatatatggactccttcgtgaaggtgcagaacatgctgaatgccatggatcttgttagcgtgcaaatctttggcgaatttgcgggtggtggcattcagaaaggcgtcgattacggagacaaagatttctatgtgtttgacatcctgtctgatagcgggaacgagaaagtttactgggatgactatcgcgtcgaatcgttttgcaccactgtgggtctgaaattagcgcctctgctgggacgtggtagtttcgctgaactgtcccagtacccaaacgatttcaaaagcctggtgaaccgttataatgaattggttgacacggtcggcctggagatggccaataaacacgtctttggtccgcaagcgtcttctgaaactggcctggcagaaggctacgttcttaaacccgtctatccgatcttctttaataccggtacgcgcgtggcgattaaatgcaagaactccaaattttcggagaaagccaagctggactcgccaattagtgcgaaggttgaactgacggagaacgataaacgtctgctcgaaatctttagcgagtatgttacctggaatcgcgtcagtaacgtactgtcacatattggctcagtgaccgcaaaagattttgggcgtgtttcgggtctgacgatgaaagacatcattaatgaagcagcacgcgaaggccatgatctgttgttcgctgataacccgtcggcggtgctgaaggagctgactggcctcatccagaacacgattcgctccaaatggcacgaagttctggag

SEQ ID NO: 1580 - protein, 346 aa, synthetic construct
  REGION 1..346: note = variant of RNA ligase 2 from Klebsiella phage KP179
MHHHHHHGGSNMFAYYSSLENHYNAKFIEKIRGAGFLMHTVEWVAREKIHGTNFSVIITPTEIVPAKRTGPILEGESFFGHEIVMKKYMDSFVKVQNMLNAMDLVSVQIFGEFAGGGIQKGVDYGDKDFYVFDILSDSGNEKVYWDDYRVESFCTTVGLKLAPLLGRGSFAELSQYPNDFKSLVNRYNELVDTVGLEMANKHVFGPQASSETGLAEGYVLKPVYPIFFNTGTRVAIKCKNSKFSEKAKLDSPISAKVELTENDKRLLEIFSEYVTWNRVSNVLSHIGSVTAKDFGRVSGLTMKDIINEAAREGHDLLFADNPSAVLKELTGLIQNTIRSKWHEVLE

SEQ ID NO: 1581 - DNA, 1038 bp, synthetic construct
  misc_feature 1..1038: note = variant of RNA ligase 2 from Klebsiella phage KP179
  source 1..1038: mol_type = other DNA
atgcatcaccatcaccatcacggtggcagcaacatgtttgcgtattattcaagtctggaaaaccattacaatgctaagttcattgagaagatccgtggtgcaggcttcctgatgcacaccgtggaatgggtagctcgcgagaagattcatggaacgaactttagcgttatcattactccgaccgaaatcgtcccagccaaacgcacagggccgatcttggaaggcgagtcgttctttggtcacgaagcgatcatgaaaaaatatatggactccttcgtgaaggtgcagaacatgctgaatgccatggatcttgttagcgtgcaaatctttggcgaatttgcgggtggtggcattcagaaaggcgtcgattacggagacaaagatttctatgtgtttgacatcctgtctgatagcgggaacgagaaagtttactgggatgactatcgcgtcgaatcgttttgcaccactgtgggtctgaaattagcgcctctgctgggacgtggtagtttcgctgaactgtcccagtacccaaacgatttcaaaagcctggtgaaccgttataatgaattggttgacacggtcggcctggagatggccaataaacacgtctttggtccgcaagcgtcttctgaaactggcctggcagaaggctacgttcttaaacccgtctatccgatcttctttaataccggtacgcgcgtggcgattaaatgcaagaactccaaattttcggagaaagccaagctggactcgccaattagtgcgaaggttgaactgacggagaacgataaacgtctgctcgaaatctttagcgagtatgttacctggaatcgcgtcagtaacgtactgtcacatattggctcagtgaccgcaaaagattttgggcgtgtttcgggtctgacgatgaaagacatcattaatgaagcagcacgcgaaggccatgatctgttgttcgctgataacccgtcggcggtgctgaaggagctgactggcctcatccagaacacgattcgctccaaatggcacgaagttctggag

SEQ ID NO: 1582 - protein, 346 aa, synthetic construct
  REGION 1..346: note = variant of RNA ligase 2 from Klebsiella phage KP179
MHHHHHHGGSNMFAYYSSLENHYNAKFIEKIRGAGFLMHTVEWVAREKIHGTNFSVIITPTEIVPAKRTGPILEGESFFGHEAIMKKYMDSFVKVQNMLNAMDLVSVQIFGEFAGGGIQKGVDYGDKDFYVFDILSDSGNEKVYWDDYRVESFCTTVGLKLAPLLGRGSFAELSQYPNDFKSLVNRYNELVDTVGLEMANKHVFGPQASSETGLAEGYVLKPVYPIFFNTGTRVAIKCKNSKFSEKAKLDSPISAKVELTENDKRLLEIFSEYVTWNRVSNVLSHIGSVTAKDFGRVSGLTMKDIINEAAREGHDLLFADNPSAVLKELTGLIQNTIRSKWHEVLE

SEQ ID NO: 1583 - DNA, 1038 bp, synthetic construct
  misc_feature 1..1038: note = variant of RNA ligase 2 from Klebsiella phage KP179
  source 1..1038: mol_type = other DNA
atgcatcaccatcaccatcacggtggcagcaacatgtttgcgtattattcaagtctggaaaaccattacaatgctaagttcattgagaagatccgtggtgcaggcttcctgatgcacaccgtggaatgggtagctcgcgagaagattcatggaacgaactttagcgttatcattactccgaccgaaatcgtcccagccaaacgcacagggccgatcttggaaggcgagtcgttctttggtcacgaaattatcatgaaaaaatatatggactccttcgtgaaggtgcagaacatgctgaatgccatggatcttgttagcgtgcaaatctttggcgaatttgcgggtggtggcattcagaaaggcgtcgattacggagacaaagatttctatgtgtttgacatcctgtctgatagcgggaacgagaaagtttactgggatgactatcgcgtcgaatcgttttgcaccactgtgggtctgaaattagcgcctctgctgggacgtggtagtttcgctgaactgtcccagtacccaaacgatttcaaaagcctggtgaaccgttataatgaattggttgagacggtcggcctggagatggccaataaacacgtctttggtccgcaagcgtcttctgaaactggcctggcagaaggctacgttcttaaacccgtctatccgatcttctttaataccggtacgcgcgtggcgattaaatgcaagaactccaaattttcggagaaagccaagctggactcgccaattagtgcgaaggttgaactgacggagaacgataaacgtctgctcgaaatctttagcgagtatgttacctggaatcgcgtcagtaacgtactgtcacatattggctcagtgaccgcaaaagattttgggcgtgtttcgggtctgacgatgaaagacatcattaatgaagcagcacgcgaaggccatgatctgttgttcgctgataacccgtcggcggtgctgaaggagctgactggcctcatccagaacacgattcgctccaaatggcacgaagttctggag

SEQ ID NO: 1584 - protein, 346 aa, synthetic construct
  REGION 1..346: note = variant of RNA ligase 2 from Klebsiella phage KP179
MHHHHHHGGSNMFAYYSSLENHYNAKFIEKIRGAGFLMHTVEWVAREKIHGTNFSVIITPTEIVPAKRTGPILEGESFFGHEIIMKKYMDSFVKVQNMLNAMDLVSVQIFGEFAGGGIQKGVDYGDKDFYVFDILSDSGNEKVYWDDYRVESFCTTVGLKLAPLLGRGSFAELSQYPNDFKSLVNRYNELVETVGLEMANKHVFGPQASSETGLAEGYVLKPVYPIFFNTGTRVAIKCKNSKFSEKAKLDSPISAKVELTENDKRLLEIFSEYVTWNRVSNVLSHIGSVTAKDFGRVSGLTMKDIINEAAREGHDLLFADNPSAVLKELTGLIQNTIRSKWHEVLE

SEQ ID NO: 1585 - DNA, 1038 bp, synthetic construct
  misc_feature 1..1038: note = variant of RNA ligase 2 from Klebsiella phage KP179
  source 1..1038: mol_type = other DNA
atgcatcaccatcaccatcacggtggcagcaacatgtttgcgtattattcaagtctggaaaaccattacaatgctaagttcattgagaagatccgtggtgcaggcttcctgatgcacaccgtggaatgggtagctcgcgagaagattcatggaacgaactttagcgttatcattactccgaccgaaatcgtcccagccaaacgcacagggccgatcttggaaggcgagtcgttctttggtcacgaaattatcatgaaaaaatatatggactccttcgtgaaggtgcagaacatgctgaatgccatggatcttaaaagcgtgcaaatctttggcgaatttgcgggtggtggcattcagaaaggcgtcgattacggagacaaagatttctatgtgtttgacatcctgtctgatagcgggaacgagaaagtttactgggatgactatcgcgtcgaatcgttttgcaccactgtgggtctgaaattagcgcctctgctgggacgtggtagtttcgctgaactgtcccagtacccaaacgatttcaaaagcctggtgaaccgttataatgaattggttgacacggtcggcctggagatggccaataaacacgtctttggtccgcaagcgtcttctgaaactggcctggcagaaggctacgttcttaaacccgtctatccgatcttctttaataccggtacgcgcgtggcgattaaatgcaagaactccaaattttcggagaaagccaagctggactcgccaattagtgcgaaggttgaactgacggagaacgataaacgtctgctcgaaatctttagcgagtatgttacctggaatcgcgtcagtaacgtactgtcacatattggctcagtgaccgcaaaagattttgggcgtgtttcgggtctgacgatgaaagacatcattaatgaagcagcacgcgaaggccatgatctgttgttcgctgataacccgtcggcggtgctgaaggagctgactggcctcatccagaacacgattcgctccaaatggcacgaagttctggag

SEQ ID NO: 1586 - protein, 346 aa, synthetic construct
  REGION 1..346: note = variant of RNA ligase 2 from Klebsiella phage KP179
MHHHHHHGGSNMFAYYSSLENHYNAKFIEKIRGAGFLMHTVEWVAREKIHGTNFSVIITPTEIVPAKRTGPILEGESFFGHEIIMKKYMDSFVKVQNMLNAMDLKSVQIFGEFAGGGIQKGVDYGDKDFYVFDILSDSGNEKVYWDDYRVESFCTTVGLKLAPLLGRGSFAELSQYPNDFKSLVNRYNELVDTVGLEMANKHVFGPQASSETGLAEGYVLKPVYPIFFNTGTRVAIKCKNSKFSEKAKLDSPISAKVELTENDKRLLEIFSEYVTWNRVSNVLSHIGSVTAKDFGRVSGLTMKDIINEAAREGHDLLFADNPSAVLKELTGLIQNTIRSKWHEVLE

SEQ ID NO: 1587 - DNA, 1038 bp, synthetic construct
  misc_feature 1..1038: note = variant of RNA ligase 2 from Klebsiella phage KP179
  source 1..1038: mol_type = other DNA
atgcatcaccatcaccatcacggtggcagcaacatgtttgcgtattattcaagtctggaaaaccattataatggcaagttcattagcaagatccgtggtgcaggcttcctgatgcacaccgtggaatgggtagctcgcgagaagattcatggaacgaactttagcgttatcattactccgaccgaaatcgtcccagccaaacgcacagggccgatcttggaaggtgagagcttctttggtcacgaaattatcatgaaaaaatatatggactccttcgtgaaggtgcagaacatgctgaatgccatggatcttgttagcgtgcaaatctttggcgaatttgcgggtggtggcattcagaaaggcgtcgattacggagacaaagatttctatgtgtttgacatcctgtctgatagcgggaacgagaaagtttactgggatgactatcgcgtcgaatcgttttgcaccactgtgggtctgaaattagcgcctctgctgggacgtggtagtttcgctgaactgtcccagtacccaaacgatttcaaaagcctggtgaaccgttataatgaattggttgacacggtcggcctggagatggccaataaacacgtctttggtccgcaagcgtcttctgaaactggcctggcagaaggctacgttcttaaacccgtctatccgattttctttaataccggtacgcgcgtggcgattaaatgcaagaactccaaattttcggagaaagccaagctggactcgccaattagtgcgaaggttgaactgacggagaacgataaacgtctgctcgaaatctttagcgagtatgttacctggaatcgcgtcagtaacgtactgtcacatattggctcagtgaccgcaaaagattttgggcgtgtttcgggtctgacgatgaaagacatcattaatgaagcagcacgcgaaggccatgatctgttgttcgctgataacccgtcggcggtgctgaaggagctgactggcctcatccagaacacgattcgctccaaatggcacgaagttctggag

SEQ ID NO: 1588 - protein, 346 aa, synthetic construct
  REGION 1..346: note = variant of RNA ligase 2 from Klebsiella phage KP179
MHHHHHHGGSNMFAYYSSLENHYNGKFISKIRGAGFLMHTVEWVAREKIHGTNFSVIITPTEIVPAKRTGPILEGESFFGHEIIMKKYMDSFVKVQNMLNAMDLVSVQIFGEFAGGGIQKGVDYGDKDFYVFDILSDSGNEKVYWDDYRVESFCTTVGLKLAPLLGRGSFAELSQYPNDFKSLVNRYNELVDTVGLEMANKHVFGPQASSETGLAEGYVLKPVYPIFFNTGTRVAIKCKNSKFSEKAKLDSPISAKVELTENDKRLLEIFSEYVTWNRVSNVLSHIGSVTAKDFGRVSGLTMKDIINEAAREGHDLLFADNPSAVLKELTGLIQNTIRSKWHEVLE

SEQ ID NO: 1589 - DNA, 1038 bp, synthetic construct
  misc_feature 1..1038: note = variant of RNA ligase 2 from Klebsiella phage KP179
  source 1..1038: mol_type = other DNA
atgcatcaccatcaccatcacggtggcagcaacatgtttgcgtattattcaagtctggaaaaccattataatggcaagttcattagcaagatccgtggtgcaggcttcctgatgcacaccgtggaatgggtagctcgcgagaagattcatggaacgaactttagcgttatcattactccgaccgaaatcgtcccagccaaacgcacagggccgatcttggaaggtgagagcttctttggtcacgaaattatcatgaaaaaatatatggactccttcgtgaaggtgcagaacatgctgaatgccatggatcttgttagcgtgcaaatctttggcgaatttgcgggtggtggcattcagaaaggcgtcgattacggagacaaagatttctatgtgtttgacatcctgtctgatagcgggaacgagaaagtttactgggatgactatcgcgtcgaatcgttttgcaccactgtgggtctgaaattagcgcctctgctgggacgtggtagtttcgctgaactgtcccagtacccaaacgatttcaaaagcctggtgaaccgttataatgaattggttgacacggtcggcctggagatggccaataaacacgtctttggtccgcaagcgtcttctgaaactggcctggcagaaggctacgttcttaaacccgtctatccgattttctttaataccggtacgcgcgtggcgattaaatgcaagaactccaaattttcggagaaagccaagctgagctcgccaattagtgcgaaggttgaactgacggagaacgataaacgtctgctcgaaatctttagcgagtatgttacctggaatcgcgtcagtaacgtactgtcacatattggctcagtgaccgcaaaagattttgggcgtgtttcgggtctgacgatgaaagacatcattaatgaagcagcacgcgaaggccatgatctgttgttcgctgataacccgtcggcggtgctgaaggagctgactggcctcatccagaacacgattcgctccaaatggcacgaagttctggag

SEQ ID NO: 1590 - protein, 346 aa, synthetic construct
  REGION 1..346: note = variant of RNA ligase 2 from Klebsiella phage KP179
MHHHHHHGGSNMFAYYSSLENHYNGKFISKIRGAGFLMHTVEWVAREKIHGTNFSVIITPTEIVPAKRTGPILEGESFFGHEIIMKKYMDSFVKVQNMLNAMDLVSVQIFGEFAGGGIQKGVDYGDKDFYVFDILSDSGNEKVYWDDYRVESFCTTVGLKLAPLLGRGSFAELSQYPNDFKSLVNRYNELVDTVGLEMANKHVFGPQASSETGLAEGYVLKPVYPIFFNTGTRVAIKCKNSKFSEKAKLSSPISAKVELTENDKRLLEIFSEYVTWNRVSNVLSHIGSVTAKDFGRVSGLTMKDIINEAAREGHDLLFADNPSAVLKELTGLIQNTIRSKWHEVLE

SEQ ID NO: 1591 - DNA, 1038 bp, synthetic construct
  misc_feature 1..1038: note = variant of RNA ligase 2 from Klebsiella phage KP179
  source 1..1038: mol_type = other DNA
atgcatcaccatcaccatcacggtggcagcaacatgtttgcgtattattcaagtctggaaaaccattataatggcaagttcattagcaagatccgtggtgcaggcttcctgatgcacaccgtggaatgggtagctcgcgagaagattcatggaacgaactttagcgttatcattactccgaccgaaatcgtcccagccaaacgcacagggccgatcttggaagatgagatgttctttggtcacgaaattatcatgaaaaaatatatggactccttcgtgaaggtgcagaacatgctgaatgccatggatcttgttagcgtgcaaatctttggcgaatttgcgggtggtggcattcagaaaggcgtcgattacggagacaaagatttctatgtgtttgacatcctgtctgatagcgggaacgagaaagtttactgggatgactatcgcgtcgaatcgttttgcaccactgtgggtctgaaattagcgcctctgctgggacgtggtagtttcgctgaactgtcccagtacccaaacgatttcaaaagcctggtgaaccgttataatgaattggttgacacggtcggcctggagatggccaataaacacgtctttggtccgcaagcgtcttctgaaactggcctggcagaaggctacgttcttaaacccgtctatccgattttctttaataccggtacgcgcgtggcgattaaatgcaagaactccaaattttcggagaaagccaagctgagttcgccaattagttcgaaggttgaactgacggagaacgataaacgtctgctcgaaatctttagcgagtatgttacctggaatcgcgtcagtaacgtactgtcacatattggctcagtgaccgcaaaagattttgggcgtgtttcgggtctgacgatgaaagacatcattaatgaagcagcacgcgaaggccatgatctgttgttcgctgataacccgtcggcggtgctgaaggagctgactggcctcatccagaacacgattcgctccaaatggcacgaagttctggag

SEQ ID NO: 1592 - protein, 346 aa, synthetic construct
  REGION 1..346: note = variant of RNA ligase 2 from Klebsiella phage KP179
MHHHHHHGGSNMFAYYSSLENHYNGKFISKIRGAGFLMHTVEWVAREKIHGTNFSVIITPTEIVPAKRTGPILEDEMFFGHEIIMKKYMDSFVKVQNMLNAMDLVSVQIFGEFAGGGIQKGVDYGDKDFYVFDILSDSGNEKVYWDDYRVESFCTTVGLKLAPLLGRGSFAELSQYPNDFKSLVNRYNELVDTVGLEMANKHVFGPQASSETGLAEGYVLKPVYPIFFNTGTRVAIKCKNSKFSEKAKLSSPISSKVELTENDKRLLEIFSEYVTWNRVSNVLSHIGSVTAKDFGRVSGLTMKDIINEAAREGHDLLFADNPSAVLKELTGLIQNTIRSKWHEVLE

SEQ ID NO: 1593 - DNA, 1038 bp, synthetic construct
  misc_feature 1..1038: note = variant of RNA ligase 2 from Klebsiella phage KP179
  source 1..1038: mol_type = other DNA
atgcatcaccatcaccatcacggtggcagcaacatgtttgcgtattattcaagtctggaaaaccattataatggcaagttcattgaaaagatccgtggtgcaggcttcctgatgcacaccgtggaatgggtagctcgcgagaagattcatggaacgaactttagcgttatcattactccgaccgaaatcgtcccagccaaacgcacagggccgatcttggaagatgagagcttctttggtcacgaaattatcatgaaaaaatatatggactccttcgtgaaggtgcagaacatgctgaatgccatggatcttgttagcgtgcaaatctttggcgaatttgcgggtggtggcattcagaaaggcgtcgattacggagacaaagatttctatgtgtttgacatcctgtctgatagcgggaacgagaaagtttactgggatgactatcgcgtcgaatcgttttgcaccactgtgggtctgaaattagcgcctctgctgggacgtggtagtttcgctgaactgtcccagtacccaaacgatttcaaaagcctggtgaaccgttataatgaattggttgacacggtcggcctggagatggccaataaacacgtctttggtccgcaagcgtcttctgaaactggcctggcagaaggctacgttcttaaacccgtctatccgattttctttaatgtgggtacgcgcgtggcgattaaatgcaagaactccaaattttcggagaaagccaagctggattcgccaattagtgcgaaggttgaactgacggagaacgataaacgtctgctcgaaatctttagcgagtatgttacctggaatcgcgtcagtaacgtactgtcacatattggctcagtgaccgcaaaagattttgggcgtgtttcgggtctgacgatgaaagacatcattaatgaagcagcacgcgaaggccatgatctgttgttcgctgataacccgtcggcggtgctgaaggagctgactggcctcatccagaacacgattcgctccaaatggcacgaagttctggag

SEQ ID NO: 1594 - protein, 346 aa, synthetic construct
  REGION 1..346: note = variant of RNA ligase 2 from Klebsiella phage KP179
MHHHHHHGGSNMFAYYSSLENHYNGKFIEKIRGAGFLMHTVEWVAREKIHGTNFSVIITPTEIVPAKRTGPILEDESFFGHEIIMKKYMDSFVKVQNMLNAMDLVSVQIFGEFAGGGIQKGVDYGDKDFYVFDILSDSGNEKVYWDDYRVESFCTTVGLKLAPLLGRGSFAELSQYPNDFKSLVNRYNELVDTVGLEMANKHVFGPQASSETGLAEGYVLKPVYPIFFNVGTRVAIKCKNSKFSEKAKLDSPISAKVELTENDKRLLEIFSEYVTWNRVSNVLSHIGSVTAKDFGRVSGLTMKDIINEAAREGHDLLFADNPSAVLKELTGLIQNTIRSKWHEVLE

SEQ ID NO: 1595 - DNA, 1038 bp, synthetic construct
  misc_feature 1..1038: note = variant of RNA ligase 2 from Klebsiella phage KP179
  source 1..1038: mol_type = other DNA
atgcatcaccatcaccatcacggtggcagcaacatgtttgcgtattattcaagtctggaaaaccattataatggcaagttcattgaaaagatccgtggtgcaggcttcctgatgcacaccgtggaatgggtagctcgcgagaagattcatggaacgaactttagcgttatcattactccgaccgaaatcgtcccagccaaacgcacagggccgatcttggaaggtgagatgttctttggtcacgaaattatcatgaaaaaatatatggactccttcgtgaaggtgcagaacatgctgaatgccatggatcttgttagcgtgcaaatctttggcgaatttgcgggtggtggcattcagaaaggcgtcgattacggagacaaagatttctatgtgtttgacatcctgtctgatagcgggaacgagaaagtttactgggatgactatcgcgtcgaatcgttttgcaccactgtgggtctgaaattagcgcctctgctgggacgtggtagtttcgctgaactgtcccagtacccaaacgatttcaaaagcctggtgaaccgttataatgaattggttgacacggtcggcctggagatggccaataaacacgtctttggtccgcaagcgtcttctgaaactggcctggcagaaggctacgttcttaaacccgtctatccgcgcttctttaataccggtacgcgcgtggcgattaaatgcaagaactccaaattttcggagaaagccaagctggattcgccaattagttcgaaggttgaactgacggagaacgataaacgtctgctcgaaatctttagcgagtatgttacctggaatcgcgtcagtaacgtactgtcacatattggctcagtgaccgcaaaagattttgggcgtgtttcgggtctgacgatgaaagacatcattaatgaagcagcacgcgaaggccatgatctgttgttcgctgataacccgtcggcggtgctgaaggagctgactggcctcatccagaacacgattcgctccaaatggcacgaagttctggag

SEQ ID NO: 1596 - protein, 346 aa, synthetic construct
  REGION 1..346: note = variant of RNA ligase 2 from Klebsiella phage KP179
MHHHHHHGGSNMFAYYSSLENHYNGKFIEKIRGAGFLMHTVEWVAREKIHGTNFSVIITPTEIVPAKRTGPILEGEMFFGHEIIMKKYMDSFVKVQNMLNAMDLVSVQIFGEFAGGGIQKGVDYGDKDFYVFDILSDSGNEKVYWDDYRVESFCTTVGLKLAPLLGRGSFAELSQYPNDFKSLVNRYNELVDTVGLEMANKHVFGPQASSETGLAEGYVLKPVYPRFFNTGTRVAIKCKNSKFSEKAKLDSPISSKVELTENDKRLLEIFSEYVTWNRVSNVLSHIGSVTAKDFGRVSGLTMKDIINEAAREGHDLLFADNPSAVLKELTGLIQNTIRSKWHEVLE

SEQ ID NO: 1597 - DNA, 1038 bp, synthetic construct
  misc_feature 1..1038: note = variant of RNA ligase 2 from Klebsiella phage KP179
  source 1..1038: mol_type = other DNA
atgcatcaccatcaccatcacggtggcagcaacatgtttgcgtattattcaagtctggaaaaccattataatggcaagttcattgaaaagatccgtggtgcaggcttcctgatgcacaccgtggaatgggtagctcgcgagaagattcatggaacgaactttagcgttatcattactccgaccgaaatcgtcccagccaaacgcacagggccgatcttggaaggcgagtcgttctttggtcacgaaattatcatgaaaaaatatatggactccttcgtgaaggtgcagaacatgctgaatgccatggatcttgttagcgtgcaaatctttggcgaatttgcgggtggtggcattcagaaaggcgtcgattacggagacaaagatttctatgtgtttgacatcctgtctgatagcgggaacgagaaagtttactgggatgactatcgcgtcgaatcgttttgcaccactgtgggtctgaaattagcgcctctgctgggacgtggtagtttcgctgaactgtcccagtacccaaacgatttcaaaagcctggtgaaccgttataatgaattggttgacacggtcggcctggagatggccaataaacacgtctttggtccgcaagcgtcttctgaaactggcctggcagaaggctacgttcttaaacccgtctatccgattttctttaatgtgggtacgcgcgtggcgattaaatgcaagaactccaaattttcggagaaagccaagctggactcgccaattagtgcgaaggttgaactgacggagaacgataaacgtctgctcgaaatctttagcgagtatgttacctggaatcgcgtcagtaacgtactgtcacatattggctcagtgaccgcaaaagattttgggcgtgtttcgggtctgacgatgaaagacatcattaatgaagcagcacgcgaaggccatgatctgttgttcgctgataacccgtcggcggtgctgaaggagctgactggcctcatccagaacacgattcgctccaaatggcacgaagttctggag

SEQ ID NO: 1598 - protein, 346 aa, synthetic construct
  REGION 1..346: note = variant of RNA ligase 2 from Klebsiella phage KP179
MHHHHHHGGSNMFAYYSSLENHYNGKFIEKIRGAGFLMHTVEWVAREKIHGTNFSVIITPTEIVPAKRTGPILEGESFFGHEIIMKKYMDSFVKVQNMLNAMDLVSVQIFGEFAGGGIQKGVDYGDKDFYVFDILSDSGNEKVYWDDYRVESFCTTVGLKLAPLLGRGSFAELSQYPNDFKSLVNRYNELVDTVGLEMANKHVFGPQASSETGLAEGYVLKPVYPIFFNVGTRVAIKCKNSKFSEKAKLDSPISAKVELTENDKRLLEIFSEYVTWNRVSNVLSHIGSVTAKDFGRVSGLTMKDIINEAAREGHDLLFADNPSAVLKELTGLIQNTIRSKWHEVLE

SEQ ID NO: 1599 - DNA, 1038 bp, synthetic construct
  misc_feature 1..1038: note = variant of RNA ligase 2 from Klebsiella phage KP179
  source 1..1038: mol_type = other DNA
atgcatcaccatcaccatcacggtggcagcaacatgtttgcgtattattcaagtctggaaaaccattacaatgctaagttcattgagaagatccgtggtgcaggcttcctgatgcacaccgtggaatgggtagctcgcgagaagattcatggaacgaactttagcgttatcattactccgaccgaaatcgtcccagccaaacgcacagggccgatcttggaaggcgagtcgttctttggtcacgaaattatcatgaaaaaatatatggactccttcgtgaaggtgcagaacatgctgaatgccatggatcttgttagcgtgcaaatctttggcgaatttgcgggtggtggcattcagaaaggcgtcgattacggagacaaagatttctatgtgtttgacatcctgtctgatagcgggaacgagaaagtttactgggatgactatcgcgtcgaatcgttttgcaccactgtgggtctgaaattagcgcctctgctgggacgtggtagtttcgctgaactgtcccagtacccaaacgatttcaaaagcctggtgaaccgttataatgaattggttgacacggtcggcctggagatggccaataaacacgtctttggtccgcaagcgtcttctgaaactggcctggcagaaggctacgttcttaaacccgtctatccgattttctttaataccggtacgcgcgtggcgattaaatgcaagaactccaaattttcggagaaagccaagctgagctcgccaattagttcgaaggttgaactgacggagaacgataaacgtctgctcgaaatctttagcgagtatgttacctggaatcgcgtcagtaacgtactgtcacatattggctcagtgaccgcaaaagattttgggcgtgtttcgggtctgacgatgaaagacatcattaatgaagcagcacgcgaaggccatgatctgttgttcgctgataacccgtcggcggtgctgaaggagctgactggcctcatccagaacacgattcgctccaaatggcacgaagttctggag

SEQ ID NO: 1600 - protein, 346 aa, synthetic construct
  REGION 1..346: note = variant of RNA ligase 2 from Klebsiella phage KP179
MHHHHHHGGSNMFAYYSSLENHYNAKFIEKIRGAGFLMHTVEWVAREKIHGTNFSVIITPTEIVPAKRTGPILEGESFFGHEIIMKKYMDSFVKVQNMLNAMDLVSVQIFGEFAGGGIQKGVDYGDKDFYVFDILSDSGNEKVYWDDYRVESFCTTVGLKLAPLLGRGSFAELSQYPNDFKSLVNRYNELVDTVGLEMANKHVFGPQASSETGLAEGYVLKPVYPIFFNTGTRVAIKCKNSKFSEKAKLSSPISSKVELTENDKRLLEIFSEYVTWNRVSNVLSHIGSVTAKDFGRVSGLTMKDIINEAAREGHDLLFADNPSAVLKELTGLIQNTIRSKWHEVLE

SEQ ID NO: 1601 - DNA, 1038 bp, synthetic construct
  misc_feature 1..1038: note = variant of RNA ligase 2 from Klebsiella phage KP179
  source 1..1038: mol_type = other DNA
atgcatcaccatcaccatcacggtggcagcaacatgtttgcgtattattcaagtctggaaaaccattataatgccaagttcattagcaagatccgtggtgcaggcttcctgatgcacaccgtggaatgggtagctcgcgagaagattcatggaacgaactttagcgttatcattactccgaccgaaatcgtcccagccaaacgcacagggccgatcttggaagatgagagcttctttggtcacgaaattatcatgaaaaaatatatggactccttcgtgaaggtgcagaacatgctgaatgccatggatcttgttagcgtgcaaatctttggcgaatttgcgggtggtggcattcagaaaggcgtcgattacggagacaaagatttctatgtgtttgacatcctgtctgatagcgggaacgagaaagtttactgggatgactatcgcgtcgaatcgttttgcaccactgtgggtctgaaattagcgcctctgctgggacgtggtagtttcgctgaactgtcccagtacccaaacgatttcaaaagcctggtgaaccgttataatgaattggttgacacggtcggcctggagatggccaataaacacgtctttggtccgcaagcgtcttctgaaactggcctggcagaaggctacgttcttaaacccgtctatccgcgcttctttaatgtgggtacgcgcgtggcgattaaatgcaagaactccaaattttcggagaaagccaagctggattcgccaattagttcgaaggttgaactgacggagaacgataaacgtctgctcgaaatctttagcgagtatgttacctggaatcgcgtcagtaacgtactgtcacatattggctcagtgaccgcaaaagattttgggcgtgtttcgggtctgacgatgaaagacatcattaatgaagcagcacgcgaaggccatgatctgttgttcgctgataacccgtcggcggtgctgaaggagctgactggcctcatccagaacacgattcgctccaaatggcacgaagttctggag

SEQ ID NO: 1602 - protein, 346 aa, synthetic construct
  REGION 1..346: note = variant of RNA ligase 2 from Klebsiella phage KP179
MHHHHHHGGSNMFAYYSSLENHYNAKFISKIRGAGFLMHTVEWVAREKIHGTNFSVIITPTEIVPAKRTGPILEDESFFGHEIIMKKYMDSFVKVQNMLNAMDLVSVQIFGEFAGGGIQKGVDYGDKDFYVFDILSDSGNEKVYWDDYRVESFCTTVGLKLAPLLGRGSFAELSQYPNDFKSLVNRYNELVDTVGLEMANKHVFGPQASSETGLAEGYVLKPVYPRFFNVGTRVAIKCKNSKFSEKAKLDSPISSKVELTENDKRLLEIFSEYVTWNRVSNVLSHIGSVTAKDFGRVSGLTMKDIINEAAREGHDLLFADNPSAVLKELTGLIQNTIRSKWHEVLE

SEQ ID NO: 1603 - DNA, 1038 bp, synthetic construct
  misc_feature 1..1038: note = variant of RNA ligase 2 from Klebsiella phage KP179
  source 1..1038: mol_type = other DNA
atgcatcaccatcaccatcacggtggcagcaacatgtttgcgtattattcaagtctggaaaaccattataatgccaagttcattagcaagatccgtggtgcaggcttcctgatgcacaccgtggaatgggtagctcgcgagaagattcatggaacgaactttagcgttatcattactccgaccgaaatcgtcccagccaaacgcacagggccgatcttggaagatgagatgttctttggtcacgaaattatcatgaaaaaatatatggactccttcgtgaaggtgcagaacatgctgaatgccatggatcttgttagcgtgcaaatctttggcgaatttgcgggtggtggcattcagaaaggcgtcgattacggagacaaagatttctatgtgtttgacatcctgtctgatagcgggaacgagaaagtttactgggatgactatcgcgtcgaatcgttttgcaccactgtgggtctgaaattagcgcctctgctgggacgtggtagtttcgctgaactgtcccagtacccaaacgatttcaaaagcctggtgaaccgttataatgaattggttgacacggtcggcctggagatggccaataaacacgtctttggtccgcaagcgtcttctgaaactggcctggcagaaggctacgttcttaaacccgtctatccgattttctttaataccggtacgcgcgtggcgattaaatgcaagaactccaaattttcggagaaagccaagctggactcgccaattagtgcgaaggttgaactgacggagaacgataaacgtctgctcgaaatctttagcgagtatgttacctggaatcgcgtcagtaacgtactgtcacatattggctcagtgaccgcaaaagattttgggcgtgtttcgggtctgacgatgaaagacatcattaatgaagcagcacgcgaaggccatgatctgttgttcgctgataacccgtcggcggtgctgaaggagctgactggcctcatccagaacacgattcgctccaaatggcacgaagttctggag

SEQ ID NO: 1604 - protein, 346 aa, synthetic construct
  REGION 1..346: note = variant of RNA ligase 2 from Klebsiella phage KP179
MHHHHHHGGSNMFAYYSSLENHYNAKFISKIRGAGFLMHTVEWVAREKIHGTNFSVIITPTEIVPAKRTGPILEDEMFFGHEIIMKKYMDSFVKVQNMLNAMDLVSVQIFGEFAGGGIQKGVDYGDKDFYVFDILSDSGNEKVYWDDYRVESFCTTVGLKLAPLLGRGSFAELSQYPNDFKSLVNRYNELVDTVGLEMANKHVFGPQASSETGLAEGYVLKPVYPIFFNTGTRVAIKCKNSKFSEKAKLDSPISAKVELTENDKRLLEIFSEYVTWNRVSNVLSHIGSVTAKDFGRVSGLTMKDIINEAAREGHDLLFADNPSAVLKELTGLIQNTIRSKWHEVLE

SEQ ID NO: 1605 - DNA, 1038 bp, synthetic construct
  misc_feature 1..1038: note = variant of RNA ligase 2 from Klebsiella phage KP179
  source 1..1038: mol_type = other DNA
atgcatcaccatcaccatcacggtggcagcaacatgtttgcgtattattcaagtctggaaaaccattacaatgctaagttcattagcaagatccgtggtgcaggcttcctgatgcacaccgtggaatgggtagctcgcgagaagattcatggaacgaactttagcgttatcattactccgaccgaaatcgtcccagccaaacgcacagggccgatcttggaagatgagatgttctttggtcacgaaattatcatgaaaaaatatatggactccttcgtgaaggtgcagaacatgctgaatgccatggatcttgttagcgtgcaaatctttggcgaatttgcgggtggtggcattcagaaaggcgtcgattacggagacaaagatttctatgtgtttgacatcctgtctgatagcgggaacgagaaagtttactgggatgactatcgcgtcgaatcgttttgcaccactgtgggtctgaaattagcgcctctgctgggacgtggtagtttcgctgaactgtcccagtacccaaacgatttcaaaagcctggtgaaccgttataatgaattggttgacacggtcggcctggagatggccaataaacacgtctttggtccgcaagcgtcttctgaaactggcctggcagaaggctacgttcttaaacccgtctatccgcgcttctttaataccggtacgcgcgtggcgattaaatgcaagaactccaaattttcggagaaagccaagctggattcgccaattagtgcgaaggttgaactgacggagaacgataaacgtctgctcgaaatctttagcgagtatgttacctggaatcgcgtcagtaacgtactgtcacatattggctcagtgaccgcaaaagattttgggcgtgtttcgggtctgacgatgaaagacatcattaatgaagcagcacgcgaaggccatgatctgttgttcgctgataacccgtcggcggtgctgaaggagctgactggcctcatccagaacacgattcgctccaaatggcacgaagttctggag

SEQ ID NO: 1606 - protein, 346 aa, synthetic construct
  REGION 1..346: note = variant of RNA ligase 2 from Klebsiella phage KP179
MHHHHHHGGSNMFAYYSSLENHYNAKFISKIRGAGFLMHTVEWVAREKIHGTNFSVIITPTEIVPAKRTGPILEDEMFFGHEIIMKKYMDSFVKVQNMLNAMDLVSVQIFGEFAGGGIQKGVDYGDKDFYVFDILSDSGNEKVYWDDYRVESFCTTVGLKLAPLLGRGSFAELSQYPNDFKSLVNRYNELVDTVGLEMANKHVFGPQASSETGLAEGYVLKPVYPRFFNTGTRVAIKCKNSKFSEKAKLDSPISAKVELTENDKRLLEIFSEYVTWNRVSNVLSHIGSVTAKDFGRVSGLTMKDIINEAAREGHDLLFADNPSAVLKELTGLIQNTIRSKWHEVLE

SEQ ID NO: 1607 - DNA, 1038 bp, synthetic construct
  misc_feature 1..1038: note = variant of RNA ligase 2 from Klebsiella phage KP179
  source 1..1038: mol_type = other DNA
atgcatcaccatcaccatcacggtggcagcaacatgtttgcgtattattcaagtctggaaaaccattataatgccaagttcattagcaagatccgtggtgcaggcttcctgatgcacaccgtggaatgggtagctcgcgagaagattcatggaacgaactttagcgttatcattactccgaccgaaatcgtcccagccaaacgcacagggccgatcttggaagatgagatgttctttggtcacgaaattatcatgaaaaaatatatggactccttcgtgaaggtgcagaacatgctgaatgccatggatcttgttagcgtgcaaatctttggcgaatttgcgggtggtggcattcagaaaggcgtcgattacggagacaaagatttctatgtgtttgacatcctgtctgatagcgggaacgagaaagtttactgggatgactatcgcgtcgaatcgttttgcaccactgtgggtctgaaattagcgcctctgctgggacgtggtagtttcgctgaactgtcccagtacccaaacgatttcaaaagcctggtgaaccgttataatgaattggttgacacggtcggcctggagatggccaataaacacgtctttggtccgcaagcgtcttctgaaactggcctggcagaaggctacgttcttaaacccgtctatccgattttctttaatgtgggtacgcgcgtggcgattaaatgcaagaactccaaattttcggagaaagccaagctggattcgccaattagttcgaaggttgaactgacggagaacgataaacgtctgctcgaaatctttagcgagtatgttacctggaatcgcgtcagtaacgtactgtcacatattggctcagtgaccgcaaaagattttgggcgtgtttcgggtctgacgatgaaagacatcattaatgaagcagcacgcgaaggccatgatctgttgttcgctgataacccgtcggcggtgctgaaggagctgactggcctcatccagaacacgattcgctccaaatggcacgaagttctggag

SEQ ID NO: 1608 - protein, 346 aa, synthetic construct
  REGION 1..346: note = variant of RNA ligase 2 from Klebsiella phage KP179
MHHHHHHGGSNMFAYYSSLENHYNAKFISKIRGAGFLMHTVEWVAREKIHGTNFSVIITPTEIVPAKRTGPILEDEMFFGHEIIMKKYMDSFVKVQNMLNAMDLVSVQIFGEFAGGGIQKGVDYGDKDFYVFDILSDSGNEKVYWDDYRVESFCTTVGLKLAPLLGRGSFAELSQYPNDFKSLVNRYNELVDTVGLEMANKHVFGPQASSETGLAEGYVLKPVYPIFFNVGTRVAIKCKNSKFSEKAKLDSPISSKVELTENDKRLLEIFSEYVTWNRVSNVLSHIGSVTAKDFGRVSGLTMKDIINEAAREGHDLLFADNPSAVLKELTGLIQNTIRSKWHEVLE

SEQ ID NO: 1609 - DNA, 1038 bp, synthetic construct
  misc_feature 1..1038: note = variant of RNA ligase 2 from Klebsiella phage KP179
  source 1..1038: mol_type = other DNA
atgcatcaccatcaccatcacggtggcagcaacatgtttgcgtattattcaagtctggaaaaccattataatgccaagttcattagcaagatccgtggtgcaggcttcctgatgcacaccgtggaatgggtagctcgcgagaagattcatggaacgaactttagcgttatcattactccgaccgaaatcgtcccagccaaacgcacagggccgatcttggaaggtgagagcttctttggtcacgaaattatcatgaaaaaatatatggactccttcgtgaaggtgcagaacatgctgaatgccatggatcttgttagcgtgcaaatctttggcgaatttgcgggtggtggcattcagaaaggcgtcgattacggagacaaagatttctatgtgtttgacatcctgtctgatagcgggaacgagaaagtttactgggatgactatcgcgtcgaatcgttttgcaccactgtgggtctgaaattagcgcctctgctgggacgtggtagtttcgctgaactgtcccagtacccaaacgatttcaaaagcctggtgaaccgttataatgaattggttgacacggtcggcctggagatggccaataaacacgtctttggtccgcaagcgtcttctgaaactggcctggcagaaggctacgttcttaaacccgtctatccgcgcttctttaataccggtacgcgcgtggcgattaaatgcaagaactccaaattttcggagaaagccaagctggactcgccaattagtgcgaaggttgaactgacggagaacgataaacgtctgctcgaaatctttagcgagtatgttacctggaatcgcgtcagtaacgtactgtcacatattggctcagtgaccgcaaaagattttgggcgtgtttcgggtctgacgatgaaagacatcattaatgaagcagcacgcgaaggccatgatctgttgttcgctgataacccgtcggcggtgctgaaggagctgactggcctcatccagaacacgattcgctccaaatggcacgaagttctggag

SEQ ID NO: 1610 - protein, 346 aa, synthetic construct
  REGION 1..346: note = variant of RNA ligase 2 from Klebsiella phage KP179
MHHHHHHGGSNMFAYYSSLENHYNAKFISKIRGAGFLMHTVEWVAREKIHGTNFSVIITPTEIVPAKRTGPILEGESFFGHEIIMKKYMDSFVKVQNMLNAMDLVSVQIFGEFAGGGIQKGVDYGDKDFYVFDILSDSGNEKVYWDDYRVESFCTTVGLKLAPLLGRGSFAELSQYPNDFKSLVNRYNELVDTVGLEMANKHVFGPQASSETGLAEGYVLKPVYPRFFNTGTRVAIKCKNSKFSEKAKLDSPISAKVELTENDKRLLEIFSEYVTWNRVSNVLSHIGSVTAKDFGRVSGLTMKDIINEAAREGHDLLFADNPSAVLKELTGLIQNTIRSKWHEVLE

SEQ ID NO: 1611 - DNA, 1038 bp, synthetic construct
  misc_feature 1..1038: note = variant of RNA ligase 2 from Klebsiella phage KP179
  source 1..1038: mol_type = other DNA
atgcatcaccatcaccatcacggtggcagcaacatgtttgcgtattattcaagtctggaaaaccattataatgccaagttcattagcaagatccgtggtgcaggcttcctgatgcacaccgtggaatgggtagctcgcgagaagattcatggaacgaactttagcgttatcattactccgaccgaaatcgtcccagccaaacgcacagggccgatcttggaaggcgagtcgttctttggtcacgaaattatcatgaaaaaatatatggactccttcgtgaaggtgcagaacatgctgaatgccatggatcttgttagcgtgcaaatctttggcgaatttgcgggtggtggcattcagaaaggcgtcgattacggagacaaagatttctatgtgtttgacatcctgtctgatagcgggaacgagaaagtttactgggatgactatcgcgtcgaatcgttttgcaccactgtgggtctgaaattagcgcctctgctgggacgtggtagtttcgctgaactgtcccagtacccaaacgatttcaaaagcctggtgaaccgttataatgaattggttgacacggtcggcctggagatggccaataaacacgtctttggtccgcaagcgtcttctgaaactggcctggcagaaggctacgttcttaaacccgtctatccgcgcttctttaatgtgggtacgcgcgtggcgattaaatgcaagaactccaaattttcggagaaagccaagctggactcgccaattagtgcgaaggttgaactgacggagaacgataaacgtctgctcgaaatctttagcgagtatgttacctggaatcgcgtcagtaacgtactgtcacatattggctcagtgaccgcaaaagattttgggcgtgtttcgggtctgacgatgaaagacatcattaatgaagcagcacgcgaaggccatgatctgttgttcgctgataacccgtcggcggtgctgaaggagctgactggcctcatccagaacacgattcgctccaaatggcacgaagttctggag

SEQ ID NO: 1612 - protein, 346 aa, synthetic construct
  REGION 1..346: note = variant of RNA ligase 2 from Klebsiella phage KP179
MHHHHHHGGSNMFAYYSSLENHYNAKFISKIRGAGFLMHTVEWVAREKIHGTNFSVIITPTEIVPAKRTGPILEGESFFGHEIIMKKYMDSFVKVQNMLNAMDLVSVQIFGEFAGGGIQKGVDYGDKDFYVFDILSDSGNEKVYWDDYRVESFCTTVGLKLAPLLGRGSFAELSQYPNDFKSLVNRYNELVDTVGLEMANKHVFGPQASSETGLAEGYVLKPVYPRFFNVGTRVAIKCKNSKFSEKAKLDSPISAKVELTENDKRLLEIFSEYVTWNRVSNVLSHIGSVTAKDFGRVSGLTMKDIINEAAREGHDLLFADNPSAVLKELTGLIQNTIRSKWHEVLE

SEQ ID NO: 1613 - DNA, 1038 bp, synthetic construct
  misc_feature 1..1038: note = variant of RNA ligase 2 from Klebsiella phage KP179
  source 1..1038: mol_type = other DNA
atgcatcaccatcaccatcacggtggcagcaacatgtttgcgtattattcaagtctggaaaaccattacaatgctaagttcattagcaagatccgtggtgcaggcttcctgatgcacaccgtggaatgggtagctcgcgagaagattcatggaacgaactttagcgttatcattactccgaccgaaatcgtcccagccaaacgcacagggccgatcttggaaggcgagtcgttctttggtcacgaaattatcatgaaaaaatatatggactccttcgtgaaggtgcagaacatgctgaatgccatggatcttgttagcgtgcaaatctttggcgaatttgcgggtggtggcattcagaaaggcgtcgattacggagacaaagatttctatgtgtttgacatcctgtctgatagcgggaacgagaaagtttactgggatgactatcgcgtcgaatcgttttgcaccactgtgggtctgaaattagcgcctctgctgggacgtggtagtttcgctgaactgtcccagtacccaaacgatttcaaaagcctggtgaaccgttataatgaattggttgacacggtcggcctggagatggccaataaacacgtctttggtccgcaagcgtcttctgaaactggcctggcagaaggctacgttcttaaacccgtctatccgattttctttaatgtgggtacgcgcgtggcgattaaatgcaagaactccaaattttcggagaaagccaagctggattcgccaattagttcgaaggttgaactgacggagaacgataaacgtctgctcgaaatctttagcgagtatgttacctggaatcgcgtcagtaacgtactgtcacatattggctcagtgaccgcaaaagattttgggcgtgtttcgggtctgacgatgaaagacatcattaatgaagcagcacgcgaaggccatgatctgttgttcgctgataacccgtcggcggtgctgaaggagctgactggcctcatccagaacacgattcgctccaaatggcacgaagttctggag

SEQ ID NO: 1614 - protein, 346 aa, synthetic construct
  REGION 1..346: note = variant of RNA ligase 2 from Klebsiella phage KP179
MHHHHHHGGSNMFAYYSSLENHYNAKFISKIRGAGFLMHTVEWVAREKIHGTNFSVIITPTEIVPAKRTGPILEGESFFGHEIIMKKYMDSFVKVQNMLNAMDLVSVQIFGEFAGGGIQKGVDYGDKDFYVFDILSDSGNEKVYWDDYRVESFCTTVGLKLAPLLGRGSFAELSQYPNDFKSLVNRYNELVDTVGLEMANKHVFGPQASSETGLAEGYVLKPVYPIFFNVGTRVAIKCKNSKFSEKAKLDSPISSKVELTENDKRLLEIFSEYVTWNRVSNVLSHIGSVTAKDFGRVSGLTMKDIINEAAREGHDLLFADNPSAVLKELTGLIQNTIRSKWHEVLE

SEQ ID NO: 1615 - DNA, 1038 bp, synthetic construct
  misc_feature 1..1038: note = variant of RNA ligase 2 from Klebsiella phage KP179
  source 1..1038: mol_type = other DNA
atgcatcaccatcaccatcacggtggcagcaacatgtttgcgtattattcaagtctggaaaaccattacaatgctaagttcattgagaagatccgtgtcgcaggcttcctgatgcacaccgtggaatgggtagctcgcgagaagattcatggaacgaactttagcgttatcattactccgaccgaaatcgtcccagccaaacgcacagggccgatcttggaaggcgagtcgttctttggtcacgaaattatcatgaaaaaatatatggactccttcgtgaaggtgcagaacatgctgaatgccatggatcttgttagcgtgcaaatctttggcgaatttgcgggtggtggcattcagaaaggcgtcgattacggagacaaagatttctatgtgtttgacatcctgtctgatagcgggaacgagaaagtttactgggatgactatcgcgtcgaatcgttttgcaccactgtgggtctgaaattagcgcctctgctgggacgtggtagtttcgctgaactgtcccagtacccaaacgatttcaaaagcctggtgaaccgttataatgaattggttgacacggtcggcctggagatggccaataaacacgtctttggtccgcaagcgtcttctgaaactggcctggcagaaggctacgttcttaaacccgtctatccgatcttcttaaataccggtacgcgcgtggcgattaaatgcaagaactccaaattttcggagaaagccaagctggactcgccaattagtgcgaaggttgaactgacggagaacgataaacgtctgctcgaaatctttagcgagtatgttacctggaatcgcgtcagtaacgtactgtcacatattggctcagtgaccgcaaaagattttgggcgtgtttcgggtctgacgatgaaagacatcattaatgaagcagcacgcgaaggccatgatctgttgttcgctgataacccgtcggcggtgctgaaggagctgactggcctcatccagaacacgattcgctccaaatggcacgaagttctggag

SEQ ID NO: 1616 - protein, 346 aa, synthetic construct
  REGION 1..346: note = variant of RNA ligase 2 from Klebsiella phage KP179
MHHHHHHGGSNMFAYYSSLENHYNAKFIEKIRVAGFLMHTVEWVAREKIHGTNFSVIITPTEIVPAKRTGPILEGESFFGHEIIMKKYMDSFVKVQNMLNAMDLVSVQIFGEFAGGGIQKGVDYGDKDFYVFDILSDSGNEKVYWDDYRVESFCTTVGLKLAPLLGRGSFAELSQYPNDFKSLVNRYNELVDTVGLEMANKHVFGPQASSETGLAEGYVLKPVYPIFLNTGTRVAIKCKNSKFSEKAKLDSPISAKVELTENDKRLLEIFSEYVTWNRVSNVLSHIGSVTAKDFGRVSGLTMKDIINEAAREGHDLLFADNPSAVLKELTGLIQNTIRSKWHEVLE

SEQ ID NO: 1617 - DNA, 1038 bp, synthetic construct
  misc_feature 1..1038: note = variant of RNA ligase 2 from Klebsiella phage KP179
  source 1..1038: mol_type = other DNA
atgcatcaccatcaccatcacggtggcagcaacatgtttgcgtattattcaagtctggaaaaccattacaatgctaagttcattgagaagatccgtgtcgcaggcttcctgatgcacaccgtggaatgggtagctcgcgagaagattcatggaacgaactttagcgttatcattactccgaccgaaatcgtcccagccaaacgcacagggccgatcttggaaggcgagtcgttctttggtcacgaaattatcatgaaaaaatatatggactccttcgtgaaggtgcagaacatgctgaatgccatggatcttgttagcgtgcaaatctttggcgaatttgcgggtggtggcattcagaaaggcgtcgattacggagacaaagatttctatgtgtttgacatcctgtctgatagcgggaacgagaaagtttactgggatgactatcgcgtcgaatcgttttgcaccactgtgggtctgaaattagcgcctctgctgggacgtggtagtttcgctgaactgtcccagtacccaaacgatttcaaaagcctggtgaaccgttataatgaattggttgacacggtcggcctggagatggccaataaacacgtctttggtccgcaagcgtcttctgaaactggcctggcagaaggctacgttcttaaacccgtctatccgatcttctttaataccggtacgcgcgtggcgattaaatgcaagaactccaaattttcggagaaagccaagaaagacagcccaattagtgcgaaggttgaactgacggagaacgataaacgtctgctcgaaatctttagcgagtatgttacctggaatcgcgtcagtaacgtactgtcacatattggctcagtgaccgcaaaagattttgggcgtgtttcgggtctgacgatgaaagacatcattaatgaagcagcacgcgaaggccatgatctgttgttcgctgataacccgtcggcggtgctgaaggagctgactggcctcatccagaacacgattcgctccaaatggcacgaagttctggag

SEQ ID NO: 1618 - protein, 346 aa, synthetic construct
  REGION 1..346: note = variant of RNA ligase 2 from Klebsiella phage KP179
MHHHHHHGGSNMFAYYSSLENHYNAKFIEKIRVAGFLMHTVEWVAREKIHGTNFSVIITPTEIVPAKRTGPILEGESFFGHEIIMKKYMDSFVKVQNMLNAMDLVSVQIFGEFAGGGIQKGVDYGDKDFYVFDILSDSGNEKVYWDDYRVESFCTTVGLKLAPLLGRGSFAELSQYPNDFKSLVNRYNELVDTVGLEMANKHVFGPQASSETGLAEGYVLKPVYPIFFNTGTRVAIKCKNSKFSEKAKKDSPISAKVELTENDKRLLEIFSEYVTWNRVSNVLSHIGSVTAKDFGRVSGLTMKDIINEAAREGHDLLFADNPSAVLKELTGLIQNTIRSKWHEVLE

SEQ ID NO: 1619 - DNA, 1038 bp, synthetic construct
  misc_feature 1..1038: note = variant of RNA ligase 2 from Klebsiella phage KP179
  source 1..1038: mol_type = other DNA
atgcatcaccatcaccatcacggtggcagcaacatgtttgcgtattattcaagtctggaaaaccattacaatgctaagttcattgagaagatccgtgtcgcaggcttcctgatgcacaccgtggaatgggtagctcgcgagaagattcatggaacgaactttagcgttatcattactccgaccgaaatcgtcccagccaaacgcacagggccgatcttggaaggcgagtcgttctttggtcacgaaattatcatgaaaaaatatatggactccttcgtgaaggtgcagaacatgctgaatgccatggatcttgttagcgtgcaaatctttggcgaatttgcgggtggtggcattcagaaaggcgtcgattacggagacaaagatttctatgtgtttgacatcctgtctgatagcgggaacgagaaagtttactgggatgactatcgcgtcgaatcgttttgcaccactgtgggtctgaaattagcgcctctgctgggacgtggtagtttcgctgaactgtcccagtacccaaacgatttcaaaagcctggtgaaccgttataatgaattggttgacacggtcggcctggagatggccaataaacacgtctttggtccgcaagcgtcttctgaaactggcctggcagaaggctacgttcttaaacccgtctatccgatcttctttaataccggtacgcgcgtggcgattaaatgcaagaactccaaattttcggagaaagccaagtcggacagcccaattagtgcgaaggttgaactgacggagaacgataaacgtctgctcgaaatctttagcgagtatgttacctggaatcgcgtcagtaacgtactgtcacatattggctcagtgaccgcaaaagattttgggcgtgtttcgggtctgacgatgaaagacatcattaatgaagcagcacgcgaaggccatgatctgttgttcgctgataacccgtcggcggtgctgaaggagctgactggcctcatccagaacacgattcgctccaaatggcacgaagttctggag

SEQ ID NO: 1620 - protein, 346 aa, synthetic construct
  REGION 1..346: note = variant of RNA ligase 2 from Klebsiella phage KP179
MHHHHHHGGSNMFAYYSSLENHYNAKFIEKIRVAGFLMHTVEWVAREKIHGTNFSVIITPTEIVPAKRTGPILEGESFFGHEIIMKKYMDSFVKVQNMLNAMDLVSVQIFGEFAGGGIQKGVDYGDKDFYVFDILSDSGNEKVYWDDYRVESFCTTVGLKLAPLLGRGSFAELSQYPNDFKSLVNRYNELVDTVGLEMANKHVFGPQASSETGLAEGYVLKPVYPIFFNTGTRVAIKCKNSKFSEKAKSDSPISAKVELTENDKRLLEIFSEYVTWNRVSNVLSHIGSVTAKDFGRVSGLTMKDIINEAAREGHDLLFADNPSAVLKELTGLIQNTIRSKWHEVLE

SEQ ID NO: 1621 - DNA, 1038 bp, synthetic construct
  misc_feature 1..1038: note = variant of RNA ligase 2 from Klebsiella phage KP179
  source 1..1038: mol_type = other DNA
atgcatcaccatcaccatcacggtggctctaacatgtttgcgtattattcaagtctggaaaaccattacaatgctaagttcattgagaagatccgtgtcgcaggcttcatgatgcacaccgtggaatgggtagctcgcgagaagattcatggaacgaactttagcgttatcattactccgaccgaaatcgtcccagccaaacgcacagggccgatcttggaaggcgagtcgttctttggtcacgaaattatcatgaaaaaatatatggactccttcgtgaaggtgcagaacatgctgaatgccatggatcttgttagcgtgcaaatctttggcgaatttgcgggtggtggcattcagaaaggcgtcgattacggagacaaagatttctatgtgtttgacatcctgtctgatagcgggaacgagaaagtttactgggatgactatcgcgtcgaatcgttttgcaccactgtgggtctgaaattagcgcctctgctgggacgtggtagtttcgctgaactgtcccagtacccaaacgatttcaaaagcctggtgaaccgttataatgaattggttgacacggtcggcctggagatggccaataaacacgtctttggtccgcaagcgtcttctgaaactggcctggcagaaggctacgttcttaaacccgtctatccgatcttcttaaataccggtacgcgcgtggcgattaaatgcaagaactccaaattttcggagaaagccaagctggactcgccaattagtgcgaaggttgaactgacggagaacgataaacgtctgctcgaaatctttagcgagtatgttacctggaatcgcgtcagtaacgtactgtcacatattggctcagtgaccgcaaaagattttgggcgtgtttcgggtctgacgatgaaagacatcattaatgaagcagcacgcgaaggccatgatctgttgttcgctgataacccgtcggcggtgctgaaggagctgactggcctcatccagaacacgattcgctccaaatggcacgaagttctggag

SEQ ID NO: 1622 - protein, 346 aa, synthetic construct
  REGION 1..346: note = variant of RNA ligase 2 from Klebsiella phage KP179
MHHHHHHGGSNMFAYYSSLENHYNAKFIEKIRVAGFMMHTVEWVAREKIHGTNFSVIITPTEIVPAKRTGPILEGESFFGHEIIMKKYMDSFVKVQNMLNAMDLVSVQIFGEFAGGGIQKGVDYGDKDFYVFDILSDSGNEKVYWDDYRVESFCTTVGLKLAPLLGRGSFAELSQYPNDFKSLVNRYNELVDTVGLEMANKHVFGPQASSETGLAEGYVLKPVYPIFLNTGTRVAIKCKNSKFSEKAKLDSPISAKVELTENDKRLLEIFSEYVTWNRVSNVLSHIGSVTAKDFGRVSGLTMKDIINEAAREGHDLLFADNPSAVLKELTGLIQNTIRSKWHEVLE

SEQ ID NO: 1623 - DNA, 1038 bp, synthetic construct
  misc_feature 1..1038: note = variant of RNA ligase 2 from Klebsiella phage KP179
  source 1..1038: mol_type = other DNA
atgcatcaccatcaccatcacggtggctctaacatgtttgcgtattattcaagtctggaaaaccattacaatgctaagttcattgagaagatccgtgtcgcaggcttcatggcgcacaccgtggaatgggtagctcgcgagaagattcatggaacgaactttagcgttatcattactccgaccgaaatcgtcccagccaaacgcacagggccgatcttggaaggcgagtcgttctttggtcacgaaattatcatgaaaaaatatatggactccttcgtgaaggtgcagaacatgctgaatgccatggatcttgttagcgtgcaaatctttggcgaatttgcgggtggtggcattcagaaaggcgtcgattacggagacaaagatttctatgtgtttgacatcctgtctgatagcgggaacgagaaagtttactgggatgactatcgcgtcgaatcgttttgcaccactgtgggtctgaaattagcgcctctgctgggacgtggtagtttcgctgaactgtcccagtacccaaacgatttcaaaagcctggtgaaccgttataatgaattggttgacacggtcggcctggagatggccaataaacacgtctttggtccgcaagcgtcttctgaaactggcctggcagaaggctacgttcttaaacccgtctatccgatcttcttaaataccggtacgcgcgtggcgattaaatgcaagaactccaaattttcggagaaagccaagttggacagcccaattagtgcgaaggttgaactgacggagaacgataaacgtctgctcgaaatctttagcgagtatgttacctggaatcgcgtcagtaacgtactgtcacatattggctcagtgaccgcaaaagattttgggcgtgtttcgggtctgacgatgaaagacatcattaatgaagcagcacgcgaaggccatgatctgttgttcgctgataacccgtcggcggtgctgaaggagctgactggcctcatccagaacacgattcgctccaaatggcacgaagttctggag

SEQ ID NO: 1624 - protein, 346 aa, synthetic construct
  REGION 1..346: note = variant of RNA ligase 2 from Klebsiella phage KP179
MHHHHHHGGSNMFAYYSSLENHYNAKFIEKIRVAGFMAHTVEWVAREKIHGTNFSVIITPTEIVPAKRTGPILEGESFFGHEIIMKKYMDSFVKVQNMLNAMDLVSVQIFGEFAGGGIQKGVDYGDKDFYVFDILSDSGNEKVYWDDYRVESFCTTVGLKLAPLLGRGSFAELSQYPNDFKSLVNRYNELVDTVGLEMANKHVFGPQASSETGLAEGYVLKPVYPIFLNTGTRVAIKCKNSKFSEKAKLDSPISAKVELTENDKRLLEIFSEYVTWNRVSNVLSHIGSVTAKDFGRVSGLTMKDIINEAAREGHDLLFADNPSAVLKELTGLIQNTIRSKWHEVLE

SEQ ID NO: 1625 - DNA, 1038 bp, synthetic construct
  misc_feature 1..1038: note = variant of RNA ligase 2 from Klebsiella phage KP179
  source 1..1038: mol_type = other DNA
atgcatcaccatcaccatcacggtggctctaacatgtttgcgtattattcaagtctggaaaaccattacaatgctaagttcattgagaagatccgtgtcgcaggcttcatggcgcacaccgtggaatgggtagctcgcgagaagattcatggaacgaactttagcgttatcattactccgaccgaaatcgtcccagccaaacgcacagggccgatcttggaaggcgagtcgttctttggtcacgaaattatcatgaaaaaatatatggactccttcgtgaaggtgcagaacatgctgaatgccatggatcttgttagcgtgcaaatctttggcgaatttgcgggtggtggcattcagaaaggcgtcgattacggagacaaagatttctatgtgtttgacatcctgtctgatagcgggaacgagaaagtttactgggatgactatcgcgtcgaatcgttttgcaccactgtgggtctgaaattagcgcctctgctgggacgtggtagtttcgctgaactgtcccagtacccaaacgatttcaaaagcctggtgaaccgttataatgaattggttgacacggtcggcctggagatggccaataaacacgtctttggtccgcaagcgtcttctgaaactggcctggcagaaggctacgttcttaaacccgtctatccgatcttcttaaataccggtacgcgcgtggcgattaaatgcaagaactccaaattttcggagaaagccaagaaagacagcccaattagtgcgaaggttgaactgacggagaacgataaacgtctgctcgaaatctttagcgagtatgttacctggaatcgcgtcagtaacgtactgtcacatattggctcagtgaccgcaaaagattttgggcgtgtttcgggtctgacgatgaaagacatcattaatgaagcagcacgcgaaggccatgatctgttgttcgctgataacccgtcggcggtgctgaaggagctgactggcctcatccagaacacgattcgctccaaatggcacgaagttctggag

SEQ ID NO: 1626 - protein, 346 aa, synthetic construct
  REGION 1..346: note = variant of RNA ligase 2 from Klebsiella phage KP179
MHHHHHHGGSNMFAYYSSLENHYNAKFIEKIRVAGFMAHTVEWVAREKIHGTNFSVIITPTEIVPAKRTGPILEGESFFGHEIIMKKYMDSFVKVQNMLNAMDLVSVQIFGEFAGGGIQKGVDYGDKDFYVFDILSDSGNEKVYWDDYRVESFCTTVGLKLAPLLGRGSFAELSQYPNDFKSLVNRYNELVDTVGLEMANKHVFGPQASSETGLAEGYVLKPVYPIFLNTGTRVAIKCKNSKFSEKAKKDSPISAKVELTENDKRLLEIFSEYVTWNRVSNVLSHIGSVTAKDFGRVSGLTMKDIINEAAREGHDLLFADNPSAVLKELTGLIQNTIRSKWHEVLE

SEQ ID NO: 1627 - DNA, 1038 bp, synthetic construct
  misc_feature 1..1038: note = variant of RNA ligase 2 from Klebsiella phage KP179
  source 1..1038: mol_type = other DNA
atgcatcaccatcaccatcacggtggctctaacatgtttgcgtattattcaagtctggaaaaccattacaatgctaagttcattgagaagatccgtgtcgcaggcttcctggtgcacaccgtggaatgggtagctcgcgagaagattcatggaacgaactttagcgttatcattactccgaccgaaatcgtcccagccaaacgcacagggccgatcttggaaggcgagtcgttctttggtcacgaaattatcatgaaaaaatatatggactccttcgtgaaggtgcagaacatgctgaatgccatggatcttgttagcgtgcaaatctttggcgaatttgcgggtggtggcattcagaaaggcgtcgattacggagacaaagatttctatgtgtttgacatcctgtctgatagcgggaacgagaaagtttactgggatgactatcgcgtcgaatcgttttgcaccactgtgggtctgaaattagcgcctctgctgggacgtggtagtttcgctgaactgtcccagtacccaaacgatttcaaaagcctggtgaaccgttataatgaattggttgacacggtcggcctggagatggccaataaacacgtctttggtccgcaagcgtcttctgaaactggcctggcagaaggctacgttcttaaacccgtctatccgatcttctttaataccggtacgcgcgtggcgattaaatgcaagaactccaaattttcggagaaagccaagctggactcgccaattagtgcgaaggttgaactgacggagaacgataaacgtctgctcgaaatctttagcgagtatgttacctggaatcgcgtcagtaacgtactgtcacatattggctcagtgaccgcaaaagattttgggcgtgtttcgggtctgacgatgaaagacatcattaatgaagcagcacgcgaaggccatgatctgttgttcgctgataacccgtcggcggtgctgaaggagctgactggcctcatccagaacacgattcgctccaaatggcacgaagttctggag

SEQ ID NO: 1628 - protein, 346 aa, synthetic construct
  REGION 1..346: note = variant of RNA ligase 2 from Klebsiella phage KP179
MHHHHHHGGSNMFAYYSSLENHYNAKFIEKIRVAGFLVHTVEWVAREKIHGTNFSVIITPTEIVPAKRTGPILEGESFFGHEIIMKKYMDSFVKVQNMLNAMDLVSVQIFGEFAGGGIQKGVDYGDKDFYVFDILSDSGNEKVYWDDYRVESFCTTVGLKLAPLLGRGSFAELSQYPNDFKSLVNRYNELVDTVGLEMANKHVFGPQASSETGLAEGYVLKPVYPIFFNTGTRVAIKCKNSKFSEKAKLDSPISAKVELTENDKRLLEIFSEYVTWNRVSNVLSHIGSVTAKDFGRVSGLTMKDIINEAAREGHDLLFADNPSAVLKELTGLIQNTIRSKWHEVLE

SEQ ID NO: 1629 - DNA, 1038 bp, synthetic construct
  misc_feature 1..1038: note = variant of RNA ligase 2 from Klebsiella phage KP179
  source 1..1038: mol_type = other DNA
atgcatcaccatcaccatcacggtggcagcaacatgtttgcgtattattcaagtctggaaaaccattacaatgctaagttcattgagaagatccgtggtgcaggcttcctgatgcacaccgtggaatgggtagctcgcgagaagattcatggaacgaactttagcgttatcattactccgaccgaaatcgtcccagccaaacgcacagggccgatcttggaagatgagagcttctttggtcacgaaattatcatgaaaaaatatatggactccttcgtgaaggtgcagaacatgctgaatgccatggatcttgttagcgtgcaaatctttggcgaatttgcgggtggtggcattcagaaaggcgtcgattacggagacaaagatttctatgtgtttgacatcctgtctgatagcgggaacgagaaagtttactgggatgactatcgcgtcgaatcgttttgcaccactgtgggtctgaaattagcgcctctgctgggacgtggtagtttcgctgaactgtcccagtacccaaacgatttcaaaagcctggtgaaccgttataatgaattggttgacacggtcggcctggagatggccaataaacacgtctttggtccgcaagcgtcttctgaaactggcctggcagaaggctacgttcttaaacccgtctatccgattttctttaataccggtacgcgcgtggcgattaaatgcaagaactccaaattttcggagaaagccaagctgagctcgccaattagttcgaaggttgaactgacggagaacgataaacgtctgctcgaaatctttagcgagtatgttacctggaatcgcgtcagtaacgtactgtcacatattggctcagtgaccgcaaaagattttgggcgtgtttcgggtctgacgatgaaagacatcattaatgaagcagcacgcgaaggccatgatctgttgttcgctgataacccgtcggcggtgctgaaggagctgactggcctcatccagaacacgattcgctccaaatggcacgaagttctggag

SEQ ID NO: 1630 - protein, 346 aa, synthetic construct
  REGION 1..346: note = variant of RNA ligase 2 from Klebsiella phage KP179
MHHHHHHGGSNMFAYYSSLENHYNAKFIEKIRGAGFLMHTVEWVAREKIHGTNFSVIITPTEIVPAKRTGPILEDESFFGHEIIMKKYMDSFVKVQNMLNAMDLVSVQIFGEFAGGGIQKGVDYGDKDFYVFDILSDSGNEKVYWDDYRVESFCTTVGLKLAPLLGRGSFAELSQYPNDFKSLVNRYNELVDTVGLEMANKHVFGPQASSETGLAEGYVLKPVYPIFFNTGTRVAIKCKNSKFSEKAKLSSPISSKVELTENDKRLLEIFSEYVTWNRVSNVLSHIGSVTAKDFGRVSGLTMKDIINEAAREGHDLLFADNPSAVLKELTGLIQNTIRSKWHEVLE

SEQ ID NO: 1631 - DNA, 1038 bp, synthetic construct
  misc_feature 1..1038: note = variant of RNA ligase 2 from Klebsiella phage KP179
  source 1..1038: mol_type = other DNA
atgcatcaccatcaccatcacggtggcagcaacatgtttgcgtattattcaagtctggaaaaccattacaatgctaagttcattgagaagatccgtggtgcaggcttcctgatgcacaccgtggaatgggtagctcgcgagaagattcatggaacgaactttagcgttatcattactccgaccgaaatcgtcccagccaaacgcacagggccgatcttggaagatgagagcttctttggtcacgaaattatcatgaaaaaatatatggactccttcgtgaaggtgcagaacatgctgaatgccatggatcttgttagcgtgcaaatctttggcgaatttgcgggtggtggcattcagaaaggcgtcgattacggagacaaagatttctatgtgtttgacatcctgtctgatagcgggaacgagaaagtttactgggatgactatcgcgtcgaatcgttttgcaccactgtgggtctgaaattagcgcctctgctgggacgtggtagtttcgctgaactgtcccagtacccaaacgatttcaaaagcctggtgaaccgttataatgaattggttgacacggtcggcctggagatggccaataaacacgtctttggtccgcaagcgtcttctgaaactggcctggcagaaggctacgttcttaaacccgtctatccgcgcttctttaataccggtacgcgcgtggcgattaaatgcaagaactccaaattttcggagaaagccaagctggattcgccaattagtgcgaaggttgaactgacggagaacgataaacgtctgctcgaaatctttagcgagtatgttacctggaatcgcgtcagtaacgtactgtcacatattggctcagtgaccgcaaaagattttgggcgtgtttcgggtctgacgatgaaagacatcattaatgaagcagcacgcgaaggccatgatctgttgttcgctgataacccgtcggcggtgctgaaggagctgactggcctcatccagaacacgattcgctccaaatggcacgaagttctggag

SEQ ID NO: 1632 - protein, 346 aa, synthetic construct
  REGION 1..346: note = variant of RNA ligase 2 from Klebsiella phage KP179
MHHHHHHGGSNMFAYYSSLENHYNAKFIEKIRGAGFLMHTVEWVAREKIHGTNFSVIITPTEIVPAKRTGPILEDESFFGHEIIMKKYMDSFVKVQNMLNAMDLVSVQIFGEFAGGGIQKGVDYGDKDFYVFDILSDSGNEKVYWDDYRVESFCTTVGLKLAPLLGRGSFAELSQYPNDFKSLVNRYNELVDTVGLEMANKHVFGPQASSETGLAEGYVLKPVYPRFFNTGTRVAIKCKNSKFSEKAKLDSPISAKVELTENDKRLLEIFSEYVTWNRVSNVLSHIGSVTAKDFGRVSGLTMKDIINEAAREGHDLLFADNPSAVLKELTGLIQNTIRSKWHEVLE

SEQ ID NO: 1633 - DNA, 1038 bp, synthetic construct
  misc_feature 1..1038: note = variant of RNA ligase 2 from Klebsiella phage KP179
  source 1..1038: mol_type = other DNA
atgcatcaccatcaccatcacggtggcagcaacatgtttgcgtattattcaagtctggaaaaccattacaatgctaagttcattgagaagatccgtggtgcaggcttcctgatgcacaccgtggaatgggtagctcgcgagaagattcatggaacgaactttagcgttatcattactccgaccgaaatcgtcccagccaaacgcacagggccgatcttggaagatgagagcttctttggtcacgaaattatcatgaaaaaatatatggactccttcgtgaaggtgcagaacatgctgaatgccatggatcttgttagcgtgcaaatctttggcgaatttgcgggtggtggcattcagaaaggcgtcgattacggagacaaagatttctatgtgtttgacatcctgtctgatagcgggaacgagaaagtttactgggatgactatcgcgtcgaatcgttttgcaccactgtgggtctgaaattagcgcctctgctgggacgtggtagtttcgctgaactgtcccagtacccaaacgatttcaaaagcctggtgaaccgttataatgaattggttgacacggtcggcctggagatggccaataaacacgtctttggtccgcaagcgtcttctgaaactggcctggcagaaggctacgttcttaaacccgtctatccgcgcttctttaataccggtacgcgcgtggcgattaaatgcaagaactccaaattttcggagaaagccaagctgagctcgccaattagttcgaaggttgaactgacggagaacgataaacgtctgctcgaaatctttagcgagtatgttacctggaatcgcgtcagtaacgtactgtcacatattggctcagtgaccgcaaaagattttgggcgtgtttcgggtctgacgatgaaagacatcattaatgaagcagcacgcgaaggccatgatctgttgttcgctgataacccgtcggcggtgctgaaggagctgactggcctcatccagaacacgattcgctccaaatggcacgaagttctggag

SEQ ID NO: 1634 - protein, 346 aa, synthetic construct
  REGION 1..346: note = variant of RNA ligase 2 from Klebsiella phage KP179
MHHHHHHGGSNMFAYYSSLENHYNAKFIEKIRGAGFLMHTVEWVAREKIHGTNFSVIITPTEIVPAKRTGPILEDESFFGHEIIMKKYMDSFVKVQNMLNAMDLVSVQIFGEFAGGGIQKGVDYGDKDFYVFDILSDSGNEKVYWDDYRVESFCTTVGLKLAPLLGRGSFAELSQYPNDFKSLVNRYNELVDTVGLEMANKHVFGPQASSETGLAEGYVLKPVYPRFFNTGTRVAIKCKNSKFSEKAKLSSPISSKVELTENDKRLLEIFSEYVTWNRVSNVLSHIGSVTAKDFGRVSGLTMKDIINEAAREGHDLLFADNPSAVLKELTGLIQNTIRSKWHEVLE

SEQ ID NO: 1635 - DNA, 1038 bp, synthetic construct
  misc_feature 1..1038: note = variant of RNA ligase 2 from Klebsiella phage KP179
  source 1..1038: mol_type = other DNA
atgcatcaccatcaccatcacggtggcagcaacatgtttgcgtattattcaagtctggaaaaccattacaatgctaagttcattgaaaagatccgtggtgcaggcttcctgatgcacaccgtggaatgggtagctcgcgagaagattcatggaacgaactttagcgttatcattactccgaccgaaatcgtcccagccaaacgcacagggccgatcttggaagatgagagcttctttggtcacgaaattatcatgaaaaaatatatggactccttcgtgaaggtgcagaacatgctgaatgccatggatcttgttagcgtgcaaatctttggcgaatttgcgggtggtggcattcagaaaggcgtcgattacggagacaaagatttctatgtgtttgacatcctgtctgatagcgggaacgagaaagtttactgggatgactatcgcgtcgaatcgttttgcaccactgtgggtctgaaattagcgcctctgctgggacgtggtagtttcgctgaactgtcccagtacccaaacgatttcaaaagcctggtgaaccgttataatgaattggttgacacggtcggcctggagatggccaataaacacgtctttggtccgcaagcgtcttctgaaactggcctggcagaaggctacgttcttaaacccgtctatccgcgcttctttaatgtgggtacgcgcgtggcgattaaatgcaagaactccaaattttcggagaaagccaagctgagctcgccaattagttcgaaggttgaactgacggagaacgataaacgtctgctcgaaatctttagcgagtatgttacctggaatcgcgtcagtaacgtactgtcacatattggctcagtgaccgcaaaagattttgggcgtgtttcgggtctgacgatgaaagacatcattaatgaagcagcacgcgaaggccatgatctgttgttcgctgataacccgtcggcggtgctgaaggagctgactggcctcatccagaacacgattcgctccaaatggcacgaagttctggag

SEQ ID NO: 1636 - protein, 346 aa, synthetic construct
  REGION 1..346: note = variant of RNA ligase 2 from Klebsiella phage KP179
MHHHHHHGGSNMFAYYSSLENHYNAKFIEKIRGAGFLMHTVEWVAREKIHGTNFSVIITPTEIVPAKRTGPILEDESFFGHEIIMKKYMDSFVKVQNMLNAMDLVSVQIFGEFAGGGIQKGVDYGDKDFYVFDILSDSGNEKVYWDDYRVESFCTTVGLKLAPLLGRGSFAELSQYPNDFKSLVNRYNELVDTVGLEMANKHVFGPQASSETGLAEGYVLKPVYPRFFNVGTRVAIKCKNSKFSEKAKLSSPISSKVELTENDKRLLEIFSEYVTWNRVSNVLSHIGSVTAKDFGRVSGLTMKDIINEAAREGHDLLFADNPSAVLKELTGLIQNTIRSKWHEVLE

SEQ ID NO: 1637 - DNA, 1038 bp, synthetic construct
  misc_feature 1..1038: note = variant of RNA ligase 2 from Klebsiella phage KP179
  source 1..1038: mol_type = other DNA
atgcatcaccatcaccatcacggtggcagcaacatgtttgcgtattattcaagtctggaaaaccattacaatgctaagttcattgagaagatccgtggtgcaggcttcctgatgcacaccgtggaatgggtagctcgcgagaagattcatggaacgaactttagcgttatcattactccgaccgaaatcgtcccagccaaacgcacagggccgatcttggaagatgagatgttctttggtcacgaaattatcatgaaaaaatatatggactccttcgtgaaggtgcagaacatgctgaatgccatggatcttgttagcgtgcaaatctttggcgaatttgcgggtggtggcattcagaaaggcgtcgattacggagacaaagatttctatgtgtttgacatcctgtctgatagcgggaacgagaaagtttactgggatgactatcgcgtcgaatcgttttgcaccactgtgggtctgaaattagcgcctctgctgggacgtggtagtttcgctgaactgtcccagtacccaaacgatttcaaaagcctggtgaaccgttataatgaattggttgacacggtcggcctggagatggccaataaacacgtctttggtccgcaagcgtcttctgaaactggcctggcagaaggctacgttcttaaacccgtctatccgatcttctttaataccggtacgcgcgtggcgattaaatgcaagaactccaaattttcggagaaagccaagctggactcgccaattagtgcgaaggttgaactgacggagaacgataaacgtctgctcgaaatctttagcgagtatgttacctggaatcgcgtcagtaacgtactgtcacatattggctcagtgaccgcaaaagattttgggcgtgtttcgggtctgacgatgaaagacatcattaatgaagcagcacgcgaaggccatgatctgttgttcgctgataacccgtcggcggtgctgaaggagctgactggcctcatccagaacacgattcgctccaaatggcacgaagttctggag

SEQ ID NO: 1638 - protein, 346 aa, synthetic construct
  REGION 1..346: note = variant of RNA ligase 2 from Klebsiella phage KP179
MHHHHHHGGSNMFAYYSSLENHYNAKFIEKIRGAGFLMHTVEWVAREKIHGTNFSVIITPTEIVPAKRTGPILEDEMFFGHEIIMKKYMDSFVKVQNMLNAMDLVSVQIFGEFAGGGIQKGVDYGDKDFYVFDILSDSGNEKVYWDDYRVESFCTTVGLKLAPLLGRGSFAELSQYPNDFKSLVNRYNELVDTVGLEMANKHVFGPQASSETGLAEGYVLKPVYPIFFNTGTRVAIKCKNSKFSEKAKLDSPISAKVELTENDKRLLEIFSEYVTWNRVSNVLSHIGSVTAKDFGRVSGLTMKDIINEAAREGHDLLFADNPSAVLKELTGLIQNTIRSKWHEVLE

SEQ ID NO: 1639 - DNA, 1038 bp, synthetic construct
  misc_feature 1..1038: note = variant of RNA ligase 2 from Klebsiella phage KP179
  source 1..1038: mol_type = other DNA
atgcatcaccatcaccatcacggtggcagcaacatgtttgcgtattattcaagtctggaaaaccattacaatgctaagttcattgagaagatccgtggtgcaggcttcctgatgcacaccgtggaatgggtagctcgcgagaagattcatggaacgaactttagcgttatcattactccgaccgaaatcgtcccagccaaacgcacagggccgatcttggaagatgagatgttctttggtcacgaaattatcatgaaaaaatatatggactccttcgtgaaggtgcagaacatgctgaatgccatggatcttgttagcgtgcaaatctttggcgaatttgcgggtggtggcattcagaaaggcgtcgattacggagacaaagatttctatgtgtttgacatcctgtctgatagcgggaacgagaaagtttactgggatgactatcgcgtcgaatcgttttgcaccactgtgggtctgaaattagcgcctctgctgggacgtggtagtttcgctgaactgtcccagtacccaaacgatttcaaaagcctggtgaaccgttataatgaattggttgacacggtcggcctggagatggccaataaacacgtctttggtccgcaagcgtcttctgaaactggcctggcagaaggctacgttcttaaacccgtctatccgatcttctttaataccggtacgcgcgtggcgattaaatgcaagaactccaaattttcggagaaagccaagctggattcgccaattagttcgaaggttgaactgacggagaacgataaacgtctgctcgaaatctttagcgagtatgttacctggaatcgcgtcagtaacgtactgtcacatattggctcagtgaccgcaaaagattttgggcgtgtttcgggtctgacgatgaaagacatcattaatgaagcagcacgcgaaggccatgatctgttgttcgctgataacccgtcggcggtgctgaaggagctgactggcctcatccagaacacgattcgctccaaatggcacgaagttctggag

SEQ ID NO: 1640 - protein, 346 aa, synthetic construct
  REGION 1..346: note = variant of RNA ligase 2 from Klebsiella phage KP179
MHHHHHHGGSNMFAYYSSLENHYNAKFIEKIRGAGFLMHTVEWVAREKIHGTNFSVIITPTEIVPAKRTGPILEDEMFFGHEIIMKKYMDSFVKVQNMLNAMDLVSVQIFGEFAGGGIQKGVDYGDKDFYVFDILSDSGNEKVYWDDYRVESFCTTVGLKLAPLLGRGSFAELSQYPNDFKSLVNRYNELVDTVGLEMANKHVFGPQASSETGLAEGYVLKPVYPIFFNTGTRVAIKCKNSKFSEKAKLDSPISSKVELTENDKRLLEIFSEYVTWNRVSNVLSHIGSVTAKDFGRVSGLTMKDIINEAAREGHDLLFADNPSAVLKELTGLIQNTIRSKWHEVLE

SEQ ID NO: 1641 - DNA, 1038 bp, synthetic construct
  misc_feature 1..1038: note = variant of RNA ligase 2 from Klebsiella phage KP179
  source 1..1038: mol_type = other DNA
atgcatcaccatcaccatcacggtggcagcaacatgtttgcgtattattcaagtctggaaaaccattacaatgctaagttcattgagaagatccgtggtgcaggcttcctgatgcacaccgtggaatgggtagctcgcgagaagattcatggaacgaactttagcgttatcattactccgaccgaaatcgtcccagccaaacgcacagggccgatcttggaagatgagatgttctttggtcacgaaattatcatgaaaaaatatatggactccttcgtgaaggtgcagaacatgctgaatgccatggatcttgttagcgtgcaaatctttggcgaatttgcgggtggtggcattcagaaaggcgtcgattacggagacaaagatttctatgtgtttgacatcctgtctgatagcgggaacgagaaagtttactgggatgactatcgcgtcgaatcgttttgcaccactgtgggtctgaaattagcgcctctgctgggacgtggtagtttcgctgaactgtcccagtacccaaacgatttcaaaagcctggtgaaccgttataatgaattggttgacacggtcggcctggagatggccaataaacacgtctttggtccgcaagcgtcttctgaaactggcctggcagaaggctacgttcttaaacccgtctatccgattttctttaataccggtacgcgcgtggcgattaaatgcaagaactccaaattttcggagaaagccaagctgagctcgccaattagttcgaaggttgaactgacggagaacgataaacgtctgctcgaaatctttagcgagtatgttacctggaatcgcgtcagtaacgtactgtcacatattggctcagtgaccgcaaaagattttgggcgtgtttcgggtctgacgatgaaagacatcattaatgaagcagcacgcgaaggccatgatctgttgttcgctgataacccgtcggcggtgctgaaggagctgactggcctcatccagaacacgattcgctccaaatggcacgaagttctggag

SEQ ID NO: 1642 - protein, 346 aa, synthetic construct
  REGION 1..346: note = variant of RNA ligase 2 from Klebsiella phage KP179
MHHHHHHGGSNMFAYYSSLENHYNAKFIEKIRGAGFLMHTVEWVAREKIHGTNFSVIITPTEIVPAKRTGPILEDEMFFGHEIIMKKYMDSFVKVQNMLNAMDLVSVQIFGEFAGGGIQKGVDYGDKDFYVFDILSDSGNEKVYWDDYRVESFCTTVGLKLAPLLGRGSFAELSQYPNDFKSLVNRYNELVDTVGLEMANKHVFGPQASSETGLAEGYVLKPVYPIFFNTGTRVAIKCKNSKFSEKAKLSSPISSKVELTENDKRLLEIFSEYVTWNRVSNVLSHIGSVTAKDFGRVSGLTMKDIINEAAREGHDLLFADNPSAVLKELTGLIQNTIRSKWHEVLE

SEQ ID NO: 1643 - DNA, 1038 bp, synthetic construct
  misc_feature 1..1038: note = variant of RNA ligase 2 from Klebsiella phage KP179
  source 1..1038: mol_type = other DNA
atgcatcaccatcaccatcacggtggcagcaacatgtttgcgtattattcaagtctggaaaaccattacaatgctaagttcattgagaagatccgtggtgcaggcttcctgatgcacaccgtggaatgggtagctcgcgagaagattcatggaacgaactttagcgttatcattactccgaccgaaatcgtcccagccaaacgcacagggccgatcttggaagatgagatgttctttggtcacgaaattatcatgaaaaaatatatggactccttcgtgaaggtgcagaacatgctgaatgccatggatcttgttagcgtgcaaatctttggcgaatttgcgggtggtggcattcagaaaggcgtcgattacggagacaaagatttctatgtgtttgacatcctgtctgatagcgggaacgagaaagtttactgggatgactatcgcgtcgaatcgttttgcaccactgtgggtctgaaattagcgcctctgctgggacgtggtagtttcgctgaactgtcccagtacccaaacgatttcaaaagcctggtgaaccgttataatgaattggttgacacggtcggcctggagatggccaataaacacgtctttggtccgcaagcgtcttctgaaactggcctggcagaaggctacgttcttaaacccgtctatccgcgcttctttaataccggtacgcgcgtggcgattaaatgcaagaactccaaattttcggagaaagccaagctggactcgccaattagttcgaaggttgaactgacggagaacgataaacgtctgctcgaaatctttagcgagtatgttacctggaatcgcgtcagtaacgtactgtcacatattggctcagtgaccgcaaaagattttgggcgtgtttcgggtctgacgatgaaagacatcattaatgaagcagcacgcgaaggccatgatctgttgttcgctgataacccgtcggcggtgctgaaggagctgactggcctcatccagaacacgattcgctccaaatggcacgaagttctggag

SEQ ID NO: 1644 - protein, 346 aa, synthetic construct
  REGION 1..346: note = variant of RNA ligase 2 from Klebsiella phage KP179
MHHHHHHGGSNMFAYYSSLENHYNAKFIEKIRGAGFLMHTVEWVAREKIHGTNFSVIITPTEIVPAKRTGPILEDEMFFGHEIIMKKYMDSFVKVQNMLNAMDLVSVQIFGEFAGGGIQKGVDYGDKDFYVFDILSDSGNEKVYWDDYRVESFCTTVGLKLAPLLGRGSFAELSQYPNDFKSLVNRYNELVDTVGLEMANKHVFGPQASSETGLAEGYVLKPVYPRFFNTGTRVAIKCKNSKFSEKAKLDSPISSKVELTENDKRLLEIFSEYVTWNRVSNVLSHIGSVTAKDFGRVSGLTMKDIINEAAREGHDLLFADNPSAVLKELTGLIQNTIRSKWHEVLE

SEQ ID NO: 1645 - DNA, 1038 bp, synthetic construct
  misc_feature 1..1038: note = variant of RNA ligase 2 from Klebsiella phage KP179
  source 1..1038: mol_type = other DNA
atgcatcaccatcaccatcacggtggcagcaacatgtttgcgtattattcaagtctggaaaaccattacaatgctaagttcattgagaagatccgtggtgcaggcttcctgatgcacaccgtggaatgggtagctcgcgagaagattcatggaacgaactttagcgttatcattactccgaccgaaatcgtcccagccaaacgcacagggccgatcttggaagatgagatgttctttggtcacgaaattatcatgaaaaaatatatggactccttcgtgaaggtgcagaacatgctgaatgccatggatcttgttagcgtgcaaatctttggcgaatttgcgggtggtggcattcagaaaggcgtcgattacggagacaaagatttctatgtgtttgacatcctgtctgatagcgggaacgagaaagtttactgggatgactatcgcgtcgaatcgttttgcaccactgtgggtctgaaattagcgcctctgctgggacgtggtagtttcgctgaactgtcccagtacccaaacgatttcaaaagcctggtgaaccgttataatgaattggttgacacggtcggcctggagatggccaataaacacgtctttggtccgcaagcgtcttctgaaactggcctggcagaaggctacgttcttaaacccgtctatccgcgcttctttaataccggtacgcgcgtggcgattaaatgcaagaactccaaattttcggagaaagccaagctgagctcgccaattagttcgaaggttgaactgacggagaacgataaacgtctgctcgaaatctttagcgagtatgttacctggaatcgcgtcagtaacgtactgtcacatattggctcagtgaccgcaaaagattttgggcgtgtttcgggtctgacgatgaaagacatcattaatgaagcagcacgcgaaggccatgatctgttgttcgctgataacccgtcggcggtgctgaaggagctgactggcctcatccagaacacgattcgctccaaatggcacgaagttctggag

SEQ ID NO: 1646 - protein, 346 aa, synthetic construct
  REGION 1..346: note = variant of RNA ligase 2 from Klebsiella phage KP179
MHHHHHHGGSNMFAYYSSLENHYNAKFIEKIRGAGFLMHTVEWVAREKIHGTNFSVIITPTEIVPAKRTGPILEDEMFFGHEIIMKKYMDSFVKVQNMLNAMDLVSVQIFGEFAGGGIQKGVDYGDKDFYVFDILSDSGNEKVYWDDYRVESFCTTVGLKLAPLLGRGSFAELSQYPNDFKSLVNRYNELVDTVGLEMANKHVFGPQASSETGLAEGYVLKPVYPRFFNTGTRVAIKCKNSKFSEKAKLSSPISSKVELTENDKRLLEIFSEYVTWNRVSNVLSHIGSVTAKDFGRVSGLTMKDIINEAAREGHDLLFADNPSAVLKELTGLIQNTIRSKWHEVLE

SEQ ID NO: 1647 - DNA, 1038 bp, synthetic construct
  misc_feature 1..1038: note = variant of RNA ligase 2 from Klebsiella phage KP179
  source 1..1038: mol_type = other DNA
atgcatcaccatcaccatcacggtggcagcaacatgtttgcgtattattcaagtctggaaaaccattacaatgctaagttcattgagaagatccgtggtgcaggcttcctgatgcacaccgtggaatgggtagctcgcgagaagattcatggaacgaactttagcgttatcattactccgaccgaaatcgtcccagccaaacgcacagggccgatcttggaagatgagatgttctttggtcacgaaattatcatgaaaaaatatatggactccttcgtgaaggtgcagaacatgctgaatgccatggatcttgttagcgtgcaaatctttggcgaatttgcgggtggtggcattcagaaaggcgtcgattacggagacaaagatttctatgtgtttgacatcctgtctgatagcgggaacgagaaagtttactgggatgactatcgcgtcgaatcgttttgcaccactgtgggtctgaaattagcgcctctgctgggacgtggtagtttcgctgaactgtcccagtacccaaacgatttcaaaagcctggtgaaccgttataatgaattggttgacacggtcggcctggagatggccaataaacacgtctttggtccgcaagcgtcttctgaaactggcctggcagaaggctacgttcttaaacccgtctatccgattttctttaatgtgggtacgcgcgtggcgattaaatgcaagaactccaaattttcggagaaagccaagctggactcgccaattagtgcgaaggttgaactgacggagaacgataaacgtctgctcgaaatctttagcgagtatgttacctggaatcgcgtcagtaacgtactgtcacatattggctcagtgaccgcaaaagattttgggcgtgtttcgggtctgacgatgaaagacatcattaatgaagcagcacgcgaaggccatgatctgttgttcgctgataacccgtcggcggtgctgaaggagctgactggcctcatccagaacacgattcgctccaaatggcacgaagttctggag

SEQ ID NO: 1648 - protein, 346 aa, synthetic construct
  REGION 1..346: note = variant of RNA ligase 2 from Klebsiella phage KP179
MHHHHHHGGSNMFAYYSSLENHYNAKFIEKIRGAGFLMHTVEWVAREKIHGTNFSVIITPTEIVPAKRTGPILEDEMFFGHEIIMKKYMDSFVKVQNMLNAMDLVSVQIFGEFAGGGIQKGVDYGDKDFYVFDILSDSGNEKVYWDDYRVESFCTTVGLKLAPLLGRGSFAELSQYPNDFKSLVNRYNELVDTVGLEMANKHVFGPQASSETGLAEGYVLKPVYPIFFNVGTRVAIKCKNSKFSEKAKLDSPISAKVELTENDKRLLEIFSEYVTWNRVSNVLSHIGSVTAKDFGRVSGLTMKDIINEAAREGHDLLFADNPSAVLKELTGLIQNTIRSKWHEVLE

SEQ ID NO: 1649 - DNA, 1038 bp, synthetic construct
  misc_feature 1..1038: note = variant of RNA ligase 2 from Klebsiella phage KP179
  source 1..1038: mol_type = other DNA
atgcatcaccatcaccatcacggtggcagcaacatgtttgcgtattattcaagtctggaaaaccattacaatgctaagttcattgagaagatccgtggtgcaggcttcctgatgcacaccgtggaatgggtagctcgcgagaagattcatggaacgaactttagcgttatcattactccgaccgaaatcgtcccagccaaacgcacagggccgatcttggaagatgagatgttctttggtcacgaaattatcatgaaaaaatatatggactccttcgtgaaggtgcagaacatgctgaatgccatggatcttgttagcgtgcaaatctttggcgaatttgcgggtggtggcattcagaaaggcgtcgattacggagacaaagatttctatgtgtttgacatcctgtctgatagcgggaacgagaaagtttactgggatgactatcgcgtcgaatcgttttgcaccactgtgggtctgaaattagcgcctctgctgggacgtggtagtttcgctgaactgtcccagtacccaaacgatttcaaaagcctggtgaaccgttataatgaattggttgacacggtcggcctggagatggccaataaacacgtctttggtccgcaagcgtcttctgaaactggcctggcagaaggctacgttcttaaacccgtctatccgattttctttaatgtgggtacgcgcgtggcgattaaatgcaagaactccaaattttcggagaaagccaagctgagctcgccaattagtgcgaaggttgaactgacggagaacgataaacgtctgctcgaaatctttagcgagtatgttacctggaatcgcgtcagtaacgtactgtcacatattggctcagtgaccgcaaaagattttgggcgtgtttcgggtctgacgatgaaagacatcattaatgaagcagcacgcgaaggccatgatctgttgttcgctgataacccgtcggcggtgctgaaggagctgactggcctcatccagaacacgattcgctccaaatggcacgaagttctggag

SEQ ID NO: 1650 - protein, 346 aa, synthetic construct
  REGION 1..346: note = variant of RNA ligase 2 from Klebsiella phage KP179
MHHHHHHGGSNMFAYYSSLENHYNAKFIEKIRGAGFLMHTVEWVAREKIHGTNFSVIITPTEIVPAKRTGPILEDEMFFGHEIIMKKYMDSFVKVQNMLNAMDLVSVQIFGEFAGGGIQKGVDYGDKDFYVFDILSDSGNEKVYWDDYRVESFCTTVGLKLAPLLGRGSFAELSQYPNDFKSLVNRYNELVDTVGLEMANKHVFGPQASSETGLAEGYVLKPVYPIFFNVGTRVAIKCKNSKFSEKAKLSSPISAKVELTENDKRLLEIFSEYVTWNRVSNVLSHIGSVTAKDFGRVSGLTMKDIINEAAREGHDLLFADNPSAVLKELTGLIQNTIRSKWHEVLE

SEQ ID NO: 1651 - DNA, 1038 bp, synthetic construct
  misc_feature 1..1038: note = variant of RNA ligase 2 from Klebsiella phage KP179
  source 1..1038: mol_type = other DNA
atgcatcaccatcaccatcacggtggcagcaacatgtttgcgtattattcaagtctggaaaaccattacaatgccaagttcattgaaaagatccgtggtgcaggcttcctgatgcacaccgtggaatgggtagctcgcgagaagattcatggaacgaactttagcgttatcattactccgaccgaaatcgtcccagccaaacgcacagggccgatcttggaagatgagagcttctttggtcacgaaattatcatgaaaaaatatatggactccttcgtgaaggtgcagaacatgctgaatgccatggatcttgttagcgtgcaaatctttggcgaatttgcgggtggtggcattcagaaaggcgtcgattacggagacaaagatttctatgtgtttgacatcctgtctgatagcgggaacgagaaagtttactgggatgactatcgcgtcgaatcgttttgcaccactgtgggtctgaaattagcgcctctgctgggacgtggtagtttcgctgaactgtcccagtacccaaacgatttcaaaagcctggtgaaccgttataatgaattggttgacacggtcggcctggagatggccaataaacacgtctttggtccgcaagcgtcttctgaaactggcctggcagaaggctacgttcttaaacccgtctatccgattttctttaatgtgggtacgcgcgtggcgattaaatgcaagaactccaaattttcggagaaagccaagctggactcgccaattagtgcgaaggttgaactgacggagaacgataaacgtctgctcgaaatctttagcgagtatgttacctggaatcgcgtcagtaacgtactgtcacatattggctcagtgaccgcaaaagattttgggcgtgtttcgggtctgacgatgaaagacatcattaatgaagcagcacgcgaaggccatgatctgttgttcgctgataacccgtcggcggtgctgaaggagctgactggcctcatccagaacacgattcgctccaaatggcacgaagttctggag

SEQ ID NO: 1652 - protein, 346 aa, synthetic construct
  REGION 1..346: note = variant of RNA ligase 2 from Klebsiella phage KP179
MHHHHHHGGSNMFAYYSSLENHYNAKFIEKIRGAGFLMHTVEWVAREKIHGTNFSVIITPTEIVPAKRTGPILEDESFFGHEIIMKKYMDSFVKVQNMLNAMDLVSVQIFGEFAGGGIQKGVDYGDKDFYVFDILSDSGNEKVYWDDYRVESFCTTVGLKLAPLLGRGSFAELSQYPNDFKSLVNRYNELVDTVGLEMANKHVFGPQASSETGLAEGYVLKPVYPIFFNVGTRVAIKCKNSKFSEKAKLDSPISAKVELTENDKRLLEIFSEYVTWNRVSNVLSHIGSVTAKDFGRVSGLTMKDIINEAAREGHDLLFADNPSAVLKELTGLIQNTIRSKWHEVLE

SEQ ID NO: 1653 - DNA, 1038 bp, synthetic construct
  misc_feature 1..1038: note = variant of RNA ligase 2 from Klebsiella phage KP179
  source 1..1038: mol_type = other DNA
atgcatcaccatcaccatcacggtggcagcaacatgtttgcgtattattcaagtctggaaaaccattacaatgctaagttcattgaaaagatccgtggtgcaggcttcctgatgcacaccgtggaatgggtagctcgcgagaagattcatggaacgaactttagcgttatcattactccgaccgaaatcgtcccagccaaacgcacagggccgatcttggaagatgagagcttctttggtcacgaaattatcatgaaaaaatatatggactccttcgtgaaggtgcagaacatgctgaatgccatggatcttgttagcgtgcaaatctttggcgaatttgcgggtggtggcattcagaaaggcgtcgattacggagacaaagatttctatgtgtttgacatcctgtctgatagcgggaacgagaaagtttactgggatgactatcgcgtcgaatcgttttgcaccactgtgggtctgaaattagcgcctctgctgggacgtggtagtttcgctgaactgtcccagtacccaaacgatttcaaaagcctggtgaaccgttataatgaattggttgacacggtcggcctggagatggccaataaacacgtctttggtccgcaagcgtcttctgaaactggcctggcagaaggctacgttcttaaacccgtctatccgattttctttaatgtgggtacgcgcgtggcgattaaatgcaagaactccaaattttcggagaaagccaagctggattcgccaattagttcgaaggttgaactgacggagaacgataaacgtctgctcgaaatctttagcgagtatgttacctggaatcgcgtcagtaacgtactgtcacatattggctcagtgaccgcaaaagattttgggcgtgtttcgggtctgacgatgaaagacatcattaatgaagcagcacgcgaaggccatgatctgttgttcgctgataacccgtcggcggtgctgaaggagctgactggcctcatccagaacacgattcgctccaaatggcacgaagttctggag

SEQ ID NO: 1654 - protein, 346 aa, synthetic construct
  REGION 1..346: note = variant of RNA ligase 2 from Klebsiella phage KP179
MHHHHHHGGSNMFAYYSSLENHYNAKFIEKIRGAGFLMHTVEWVAREKIHGTNFSVIITPTEIVPAKRTGPILEDESFFGHEIIMKKYMDSFVKVQNMLNAMDLVSVQIFGEFAGGGIQKGVDYGDKDFYVFDILSDSGNEKVYWDDYRVESFCTTVGLKLAPLLGRGSFAELSQYPNDFKSLVNRYNELVDTVGLEMANKHVFGPQASSETGLAEGYVLKPVYPIFFNVGTRVAIKCKNSKFSEKAKLDSPISSKVELTENDKRLLEIFSEYVTWNRVSNVLSHIGSVTAKDFGRVSGLTMKDIINEAAREGHDLLFADNPSAVLKELTGLIQNTIRSKWHEVLE

SEQ ID NO: 1655 - DNA, 1038 bp, synthetic construct
  misc_feature 1..1038: note = variant of RNA ligase 2 from Klebsiella phage KP179
  source 1..1038: mol_type = other DNA
atgcatcaccatcaccatcacggtggcagcaacatgtttgcgtattattcaagtctggaaaaccattacaatgctaagttcattgagaagatccgtggtgcaggcttcctgatgcacaccgtggaatgggtagctcgcgagaagattcatggaacgaactttagcgttatcattactccgaccgaaatcgtcccagccaaacgcacagggccgatcttggaagatgagagcttctttggtcacgaaattatcatgaaaaaatatatggactccttcgtgaaggtgcagaacatgctgaatgccatggatcttgttagcgtgcaaatctttggcgaatttgcgggtggtggcattcagaaaggcgtcgattacggagacaaagatttctatgtgtttgacatcctgtctgatagcgggaacgagaaagtttactgggatgactatcgcgtcgaatcgttttgcaccactgtgggtctgaaattagcgcctctgctgggacgtggtagtttcgctgaactgtcccagtacccaaacgatttcaaaagcctggtgaaccgttataatgaattggttgacacggtcggcctggagatggccaataaacacgtctttggtccgcaagcgtcttctgaaactggcctggcagaaggctacgttcttaaacccgtctatccgattttctttaatgtgggtacgcgcgtggcgattaaatgcaagaactccaaattttcggagaaagccaagctgagctcgccaattagtgcgaaggttgaactgacggagaacgataaacgtctgctcgaaatctttagcgagtatgttacctggaatcgcgtcagtaacgtactgtcacatattggctcagtgaccgcaaaagattttgggcgtgtttcgggtctgacgatgaaagacatcattaatgaagcagcacgcgaaggccatgatctgttgttcgctgataacccgtcggcggtgctgaaggagctgactggcctcatccagaacacgattcgctccaaatggcacgaagttctggag

SEQ ID NO: 1656 - protein, 346 aa, synthetic construct
  REGION 1..346: note = variant of RNA ligase 2 from Klebsiella phage KP179
MHHHHHHGGSNMFAYYSSLENHYNAKFIEKIRGAGFLMHTVEWVAREKIHGTNFSVIITPTEIVPAKRTGPILEDESFFGHEIIMKKYMDSFVKVQNMLNAMDLVSVQIFGEFAGGGIQKGVDYGDKDFYVFDILSDSGNEKVYWDDYRVESFCTTVGLKLAPLLGRGSFAELSQYPNDFKSLVNRYNELVDTVGLEMANKHVFGPQASSETGLAEGYVLKPVYPIFFNVGTRVAIKCKNSKFSEKAKLSSPISAKVELTENDKRLLEIFSEYVTWNRVSNVLSHIGSVTAKDFGRVSGLTMKDIINEAAREGHDLLFADNPSAVLKELTGLIQNTIRSKWHEVLE

SEQ ID NO: 1657 - DNA, 1038 bp, synthetic construct
  misc_feature 1..1038: note = variant of RNA ligase 2 from Klebsiella phage KP179
  source 1..1038: mol_type = other DNA
atgcatcaccatcaccatcacggtggcagcaacatgtttgcgtattattcaagtctggaaaaccattacaatgctaagttcattgagaagatccgtggtgcaggcttcctgatgcacaccgtggaatgggtagctcgcgagaagattcatggaacgaactttagcgttatcattactccgaccgaaatcgtcccagccaaacgcacagggccgatcttggaaggtgagagcttctttggtcacgaaattatcatgaaaaaatatatggactccttcgtgaaggtgcagaacatgctgaatgccatggatcttgttagcgtgcaaatctttggcgaatttgcgggtggtggcattcagaaaggcgtcgattacggagacaaagatttctatgtgtttgacatcctgtctgatagcgggaacgagaaagtttactgggatgactatcgcgtcgaatcgttttgcaccactgtgggtctgaaattagcgcctctgctgggacgtggtagtttcgctgaactgtcccagtacccaaacgatttcaaaagcctggtgaaccgttataatgaattggttgacacggtcggcctggagatggccaataaacacgtctttggtccgcaagcgtcttctgaaactggcctggcagaaggctacgttcttaaacccgtctatccgcgcttctttaataccggtacgcgcgtggcgattaaatgcaagaactccaaattttcggagaaagccaagctggactcgccaattagttcgaaggttgaactgacggagaacgataaacgtctgctcgaaatctttagcgagtatgttacctggaatcgcgtcagtaacgtactgtcacatattggctcagtgaccgcaaaagattttgggcgtgtttcgggtctgacgatgaaagacatcattaatgaagcagcacgcgaaggccatgatctgttgttcgctgataacccgtcggcggtgctgaaggagctgactggcctcatccagaacacgattcgctccaaatggcacgaagttctggag

SEQ ID NO: 1658 - protein, 346 aa, synthetic construct
  REGION 1..346: note = variant of RNA ligase 2 from Klebsiella phage KP179
MHHHHHHGGSNMFAYYSSLENHYNAKFIEKIRGAGFLMHTVEWVAREKIHGTNFSVIITPTEIVPAKRTGPILEGESFFGHEIIMKKYMDSFVKVQNMLNAMDLVSVQIFGEFAGGGIQKGVDYGDKDFYVFDILSDSGNEKVYWDDYRVESFCTTVGLKLAPLLGRGSFAELSQYPNDFKSLVNRYNELVDTVGLEMANKHVFGPQASSETGLAEGYVLKPVYPRFFNTGTRVAIKCKNSKFSEKAKLDSPISSKVELTENDKRLLEIFSEYVTWNRVSNVLSHIGSVTAKDFGRVSGLTMKDIINEAAREGHDLLFADNPSAVLKELTGLIQNTIRSKWHEVLE

SEQ ID NO: 1659 - DNA, 1038 bp, synthetic construct
  misc_feature 1..1038: note = variant of RNA ligase 2 from Klebsiella phage KP179
  source 1..1038: mol_type = other DNA
atgcatcaccatcaccatcacggtggcagcaacatgtttgcgtattattcaagtctggaaaaccattacaatgctaagttcattgagaagatccgtggtgcaggcttcctgatgcacaccgtggaatgggtagctcgcgagaagattcatggaacgaactttagcgttatcattactccgaccgaaatcgtcccagccaaacgcacagggccgatcttggaaggtgagagcttctttggtcacgaaattatcatgaaaaaatatatggactccttcgtgaaggtgcagaacatgctgaatgccatggatcttgttagcgtgcaaatctttggcgaatttgcgggtggtggcattcagaaaggcgtcgattacggagacaaagatttctatgtgtttgacatcctgtctgatagcgggaacgagaaagtttactgggatgactatcgcgtcgaatcgttttgcaccactgtgggtctgaaattagcgcctctgctgggacgtggtagtttcgctgaactgtcccagtacccaaacgatttcaaaagcctggtgaaccgttataatgaattggttgacacggtcggcctggagatggccaataaacacgtctttggtccgcaagcgtcttctgaaactggcctggcagaaggctacgttcttaaacccgtctatccgcgcttctttaataccggtacgcgcgtggcgattaaatgcaagaactccaaattttcggagaaagccaagctgagctcgccaattagtgcgaaggttgaactgacggagaacgataaacgtctgctcgaaatctttagcgagtatgttacctggaatcgcgtcagtaacgtactgtcacatattggctcagtgaccgcaaaagattttgggcgtgtttcgggtctgacgatgaaagacatcattaatgaagcagcacgcgaaggccatgatctgttgttcgctgataacccgtcggcggtgctgaaggagctgactggcctcatccagaacacgattcgctccaaatggcacgaagttctggag

SEQ ID NO: 1660 - protein, 346 aa, synthetic construct
  REGION 1..346: note = variant of RNA ligase 2 from Klebsiella phage KP179
MHHHHHHGGSNMFAYYSSLENHYNAKFIEKIRGAGFLMHTVEWVAREKIHGTNFSVIITPTEIVPAKRTGPILEGESFFGHEIIMKKYMDSFVKVQNMLNAMDLVSVQIFGEFAGGGIQKGVDYGDKDFYVFDILSDSGNEKVYWDDYRVESFCTTVGLKLAPLLGRGSFAELSQYPNDFKSLVNRYNELVDTVGLEMANKHVFGPQASSETGLAEGYVLKPVYPRFFNTGTRVAIKCKNSKFSEKAKLSSPISAKVELTENDKRLLEIFSEYVTWNRVSNVLSHIGSVTAKDFGRVSGLTMKDIINEAAREGHDLLFADNPSAVLKELTGLIQNTIRSKWHEVLE

SEQ ID NO: 1661 - DNA, 1038 bp, synthetic construct
  misc_feature 1..1038: note = variant of RNA ligase 2 from Klebsiella phage KP179
  source 1..1038: mol_type = other DNA
atgcatcaccatcaccatcacggtggcagcaacatgtttgcgtattattcaagtctggaaaaccattacaatgctaagttcattgagaagatccgtggtgcaggcttcctgatgcacaccgtggaatgggtagctcgcgagaagattcatggaacgaactttagcgttatcattactccgaccgaaatcgtcccagccaaacgcacagggccgatcttggaaggcgagtcgttctttggtcacgaaattatcatgaaaaaatatatggactccttcgtgaaggtgcagaacatgctgaatgccatggatcttgttagcgtgcaaatctttggcgaatttgcgggtggtggcattcagaaaggcgtcgattacggagacaaagatttctatgtgtttgacatcctgtctgatagcgggaacgagaaagtttactgggatgactatcgcgtcgaatcgttttgcaccactgtgggtctgaaattagcgcctctgctgggacgtggtagtttcgctgaactgtcccagtacccaaacgatttcaaaagcctggtgaaccgttataatgaattggttgacacggtcggcctggagatggccaataaacacgtctttggtccgcaagcgtcttctgaaactggcctggcagaaggctacgttcttaaacccgtctatccgcgcttctttaatgtgggtacgcgcgtggcgattaaatgcaagaactccaaattttcggagaaagccaagctggactcgccaattagtgcgaaggttgaactgacggagaacgataaacgtctgctcgaaatctttagcgagtatgttacctggaatcgcgtcagtaacgtactgtcacatattggctcagtgaccgcaaaagattttgggcgtgtttcgggtctgacgatgaaagacatcattaatgaagcagcacgcgaaggccatgatctgttgttcgctgataacccgtcggcggtgctgaaggagctgactggcctcatccagaacacgattcgctccaaatggcacgaagttctggag

SEQ ID NO: 1662 - protein, 346 aa, synthetic construct
  REGION 1..346: note = variant of RNA ligase 2 from Klebsiella phage KP179
MHHHHHHGGSNMFAYYSSLENHYNAKFIEKIRGAGFLMHTVEWVAREKIHGTNFSVIITPTEIVPAKRTGPILEGESFFGHEIIMKKYMDSFVKVQNMLNAMDLVSVQIFGEFAGGGIQKGVDYGDKDFYVFDILSDSGNEKVYWDDYRVESFCTTVGLKLAPLLGRGSFAELSQYPNDFKSLVNRYNELVDTVGLEMANKHVFGPQASSETGLAEGYVLKPVYPRFFNVGTRVAIKCKNSKFSEKAKLDSPISAKVELTENDKRLLEIFSEYVTWNRVSNVLSHIGSVTAKDFGRVSGLTMKDIINEAAREGHDLLFADNPSAVLKELTGLIQNTIRSKWHEVLE

SEQ ID NO: 1663 - DNA, 1038 bp, synthetic construct
  misc_feature 1..1038: note = variant of RNA ligase 2 from Klebsiella phage KP179
  source 1..1038: mol_type = other DNA
atgcatcaccatcaccatcacggtggcagcaacatgtttgcgtattattcaagtctggaaaaccattacaatgctaagttcattgagaagatccgtggtgcaggcttcctgatgcacaccgtggaatgggtagctcgcgagaagattcatggaacgaactttagcgttatcattactccgaccgaaatcgtcccagccaaacgcacagggccgatcttggaaggcgagtcgttctttggtcacgaaattatcatgaaaaaatatatggactccttcgtgaaggtgcagaacatgctgaatgccatggatcttgttagcgtgcaaatctttggcgaatttgcgggtggtggcattcagaaaggcgtcgattacggagacaaagatttctatgtgtttgacatcctgtctgatagcgggaacgagaaagtttactgggatgactatcgcgtcgaatcgttttgcaccactgtgggtctgaaattagcgcctctgctgggacgtggtagtttcgctgaactgtcccagtacccaaacgatttcaaaagcctggtgaaccgttataatgaattggttgacacggtcggcctggagatggccaataaacacgtctttggtccgcaagcgtcttctgaaactggcctggcagaaggctacgttcttaaacccgtctatccgcgcttctttaatgtgggtacgcgcgtggcgattaaatgcaagaactccaaattttcggagaaagccaagctggattcgccaattagttcgaaggttgaactgacggagaacgataaacgtctgctcgaaatctttagcgagtatgttacctggaatcgcgtcagtaacgtactgtcacatattggctcagtgaccgcaaaagattttgggcgtgtttcgggtctgacgatgaaagacatcattaatgaagcagcacgcgaaggccatgatctgttgttcgctgataacccgtcggcggtgctgaaggagctgactggcctcatccagaacacgattcgctccaaatggcacgaagttctggag

SEQ ID NO: 1664 - protein, 346 aa, synthetic construct
  REGION 1..346: note = variant of RNA ligase 2 from Klebsiella phage KP179
MHHHHHHGGSNMFAYYSSLENHYNAKFIEKIRGAGFLMHTVEWVAREKIHGTNFSVIITPTEIVPAKRTGPILEGESFFGHEIIMKKYMDSFVKVQNMLNAMDLVSVQIFGEFAGGGIQKGVDYGDKDFYVFDILSDSGNEKVYWDDYRVESFCTTVGLKLAPLLGRGSFAELSQYPNDFKSLVNRYNELVDTVGLEMANKHVFGPQASSETGLAEGYVLKPVYPRFFNVGTRVAIKCKNSKFSEKAKLDSPISSKVELTENDKRLLEIFSEYVTWNRVSNVLSHIGSVTAKDFGRVSGLTMKDIINEAAREGHDLLFADNPSAVLKELTGLIQNTIRSKWHEVLE

SEQ ID NO: 1665 - DNA, 1038 bp, synthetic construct
  misc_feature 1..1038: note = variant of RNA ligase 2 from Klebsiella phage KP179
  source 1..1038: mol_type = other DNA
atgcatcaccatcaccatcacggtggcagcaacatgtttgcgtattattcaagtctggaaaaccattacaatgctaagttcattgagaagatccgtggtgcaggcttcatgatgcacaccgtggaatgggtagctcgcgagaagattcatggaacgaactttagcgttatcattactccgaccgaaatcgtcccagccaaacgcacagggccgatcttggaaggcgagtcgttctttggtcacgaaattatcatgaaaaaatatatggactccttcgtgaaggtgcagaacatgctgaatgccatggatcttgttagcgtgcaaatctttggcgaatttgcgggtggtggcattcagaaaggcgtcgattacggagacaaagatttctatgtgtttgacatcctgtctgatagcgggaacgagaaagtttactgggatgactatcgcgtcgaatcgttttgcaccactgtgggtctgaaattagcgcctctgctgggacgtggtagtttcgctgaactgtcccagtacccaaacgatttcaaaagcctggtgaaccgttataatgaattggttgacacggtcggcctggagatggccaataaacacgtctttggtccgcaagcgtcttctgaaactggcctggcagaaggctacgttcttaaacccgtctatccgatcttcttaaataccggtacgcgcgtggcgattaaatgcaagaactccaaattttcggagaaagccaagttggacagcccaattagtgcgaaggttgaactgacggagaacgataaacgtctgctcgaaatctttagcgagtatgttacctggaatcgcgtcagtaacgtactgtcacatattggctcagtgaccgcaaaagattttgggcgtgtttcgggtctgacgatgaaagacatcattaatgaagcagcacgcgaaggccatgatctgttgttcgctgataacccgtcggcggtgctgaaggagctgactggcctcatccagaacacgattcgctccaaatggcacgaagttctggag

SEQ ID NO: 1666 - protein, 346 aa, synthetic construct
  REGION 1..346: note = variant of RNA ligase 2 from Klebsiella phage KP179
MHHHHHHGGSNMFAYYSSLENHYNAKFIEKIRGAGFMMHTVEWVAREKIHGTNFSVIITPTEIVPAKRTGPILEGESFFGHEIIMKKYMDSFVKVQNMLNAMDLVSVQIFGEFAGGGIQKGVDYGDKDFYVFDILSDSGNEKVYWDDYRVESFCTTVGLKLAPLLGRGSFAELSQYPNDFKSLVNRYNELVDTVGLEMANKHVFGPQASSETGLAEGYVLKPVYPIFLNTGTRVAIKCKNSKFSEKAKLDSPISAKVELTENDKRLLEIFSEYVTWNRVSNVLSHIGSVTAKDFGRVSGLTMKDIINEAAREGHDLLFADNPSAVLKELTGLIQNTIRSKWHEVLE

SEQ ID NO: 1667 - DNA, 1038 bp, synthetic construct
  misc_feature 1..1038: note = variant of RNA ligase 2 from Klebsiella phage KP179
  source 1..1038: mol_type = other DNA
atgcatcaccatcaccatcacggtggctctaacatgtttgcgtattattcaagtctggaaaaccattacaatgctaagttcattgagaagatccgtggtgcaggcttcatgatgcacaccgtggaatgggtagctcgcgagaagattcatggaacgaactttagcgttatcattactccgaccgaaatcgtcccagccaaacgcacagggccgatcttggaaggcgagtcgttctttggtcacgaaattatcatgaaaaaatatatggactccttcgtgaaggtgcagaacatgctgaatgccatggatcttgttagcgtgcaaatctttggcgaatttgcgggtggtggcattcagaaaggcgtcgattacggagacaaagatttctatgtgtttgacatcctgtctgatagcgggaacgagaaagtttactgggatgactatcgcgtcgaatcgttttgcaccactgtgggtctgaaattagcgcctctgctgggacgtggtagtttcgctgaactgtcccagtacccaaacgatttcaaaagcctggtgaaccgttataatgaattggttgacacggtcggcctggagatggccaataaacacgtctttggtccgcaagcgtcttctgaaactggcctggcagaaggctacgttcttaaacccgtctatccgatcttcttaaataccggtacgcgcgtggcgattaaatgcaagaactccaaattttcggagaaagccaagtcggacagcccaattagtgcgaaggttgaactgacggagaacgataaacgtctgctcgaaatctttagcgagtatgttacctggaatcgcgtcagtaacgtactgtcacatattggctcagtgaccgcaaaagattttgggcgtgtttcgggtctgacgatgaaagacatcattaatgaagcagcacgcgaaggccatgatctgttgttcgctgataacccgtcggcggtgctgaaggagctgactggcctcatccagaacacgattcgctccaaatggcacgaagttctggag

SEQ ID NO: 1668 - protein, 346 aa, synthetic construct
  REGION 1..346: note = variant of RNA ligase 2 from Klebsiella phage KP179
MHHHHHHGGSNMFAYYSSLENHYNAKFIEKIRGAGFMMHTVEWVAREKIHGTNFSVIITPTEIVPAKRTGPILEGESFFGHEIIMKKYMDSFVKVQNMLNAMDLVSVQIFGEFAGGGIQKGVDYGDKDFYVFDILSDSGNEKVYWDDYRVESFCTTVGLKLAPLLGRGSFAELSQYPNDFKSLVNRYNELVDTVGLEMANKHVFGPQASSETGLAEGYVLKPVYPIFLNTGTRVAIKCKNSKFSEKAKSDSPISAKVELTENDKRLLEIFSEYVTWNRVSNVLSHIGSVTAKDFGRVSGLTMKDIINEAAREGHDLLFADNPSAVLKELTGLIQNTIRSKWHEVLE

SEQ ID NO: 1669 - DNA, 1038 bp, synthetic construct
  misc_feature 1..1038: note = variant of RNA ligase 2 from Klebsiella phage KP179
  source 1..1038: mol_type = other DNA
atgcatcaccatcaccatcacggtggcagcaacatgtttgcgtattattcaagtctggaaaaccattacaatgctaagttcattgagaagatccgtggtgcaggcttcatggcgcacaccgtggaatgggtagctcgcgagaagattcatggaacgaactttagcgttatcattactccgaccgaaatcgtcccagccaaacgcacagggccgatcttggaaggcgagtcgttctttggtcacgaaattatcatgaaaaaatatatggactccttcgtgaaggtgcagaacatgctgaatgccatggatcttgttagcgtgcaaatctttggcgaatttgcgggtggtggcattcagaaaggcgtcgattacggagacaaagatttctatgtgtttgacatcctgtctgatagcgggaacgagaaagtttactgggatgactatcgcgtcgaatcgttttgcaccactgtgggtctgaaattagcgcctctgctgggacgtggtagtttcgctgaactgtcccagtacccaaacgatttcaaaagcctggtgaaccgttataatgaattggttgacacggtcggcctggagatggccaataaacacgtctttggtccgcaagcgtcttctgaaactggcctggcagaaggctacgttcttaaacccgtctatccgatcttctttaataccggtacgcgcgtggcgattaaatgcaagaactccaaattttcggagaaagccaagttggacagcccaattagtgcgaaggttgaactgacggagaacgataaacgtctgctcgaaatctttagcgagtatgttacctggaatcgcgtcagtaacgtactgtcacatattggctcagtgaccgcaaaagattttgggcgtgtttcgggtctgacgatgaaagacatcattaatgaagcagcacgcgaaggccatgatctgttgttcgctgataacccgtcggcggtgctgaaggagctgactggcctcatccagaacacgattcgctccaaatggcacgaagttctggag

SEQ ID NO: 1670 - protein, 346 aa, synthetic construct
  REGION 1..346: note = variant of RNA ligase 2 from Klebsiella phage KP179
MHHHHHHGGSNMFAYYSSLENHYNAKFIEKIRGAGFMAHTVEWVAREKIHGTNFSVIITPTEIVPAKRTGPILEGESFFGHEIIMKKYMDSFVKVQNMLNAMDLVSVQIFGEFAGGGIQKGVDYGDKDFYVFDILSDSGNEKVYWDDYRVESFCTTVGLKLAPLLGRGSFAELSQYPNDFKSLVNRYNELVDTVGLEMANKHVFGPQASSETGLAEGYVLKPVYPIFFNTGTRVAIKCKNSKFSEKAKLDSPISAKVELTENDKRLLEIFSEYVTWNRVSNVLSHIGSVTAKDFGRVSGLTMKDIINEAAREGHDLLFADNPSAVLKELTGLIQNTIRSKWHEVLE

SEQ ID NO: 1671 - DNA, 1038 bp, synthetic construct
  misc_feature 1..1038: note = variant of RNA ligase 2 from Klebsiella phage KP179
  source 1..1038: mol_type = other DNA
atgcatcaccatcaccatcacggtggcagcaacatgtttgcgtattattcaagtctggaaaaccattacaatgctaagttcattgagaagatccgtggtgcaggcttcatggcgcacaccgtggaatgggtagctcgcgagaagattcatggaacgaactttagcgttatcattactccgaccgaaatcgtcccagccaaacgcacagggccgatcttggaaggcgagtcgttctttggtcacgaaattatcatgaaaaaatatatggactccttcgtgaaggtgcagaacatgctgaatgccatggatcttgttagcgtgcaaatctttggcgaatttgcgggtggtggcattcagaaaggcgtcgattacggagacaaagatttctatgtgtttgacatcctgtctgatagcgggaacgagaaagtttactgggatgactatcgcgtcgaatcgttttgcaccactgtgggtctgaaattagcgcctctgctgggacgtggtagtttcgctgaactgtcccagtacccaaacgatttcaaaagcctggtgaaccgttataatgaattggttgacacggtcggcctggagatggccaataaacacgtctttggtccgcaagcgtcttctgaaactggcctggcagaaggctacgttcttaaacccgtctatccgatcttcttaaataccggtacgcgcgtggcgattaaatgcaagaactccaaattttcggagaaagccaagctggactcgccaattagtgcgaaggttgaactgacggagaacgataaacgtctgctcgaaatctttagcgagtatgttacctggaatcgcgtcagtaacgtactgtcacatattggctcagtgaccgcaaaagattttgggcgtgtttcgggtctgacgatgaaagacatcattaatgaagcagcacgcgaaggccatgatctgttgttcgctgataacccgtcggcggtgctgaaggagctgactggcctcatccagaacacgattcgctccaaatggcacgaagttctggag

SEQ ID NO: 1672 - protein, 346 aa, synthetic construct
  REGION 1..346: note = variant of RNA ligase 2 from Klebsiella phage KP179
MHHHHHHGGSNMFAYYSSLENHYNAKFIEKIRGAGFMAHTVEWVAREKIHGTNFSVIITPTEIVPAKRTGPILEGESFFGHEIIMKKYMDSFVKVQNMLNAMDLVSVQIFGEFAGGGIQKGVDYGDKDFYVFDILSDSGNEKVYWDDYRVESFCTTVGLKLAPLLGRGSFAELSQYPNDFKSLVNRYNELVDTVGLEMANKHVFGPQASSETGLAEGYVLKPVYPIFLNTGTRVAIKCKNSKFSEKAKLDSPISAKVELTENDKRLLEIFSEYVTWNRVSNVLSHIGSVTAKDFGRVSGLTMKDIINEAAREGHDLLFADNPSAVLKELTGLIQNTIRSKWHEVLE

SEQ ID NO: 1673 - DNA, 1038 bp, synthetic construct
  misc_feature 1..1038: note = variant of RNA ligase 2 from Klebsiella phage KP179
  source 1..1038: mol_type = other DNA
atgcatcaccatcaccatcacggtggctctaacatgtttgcgtattattcaagtctggaaaaccattacaatgctaagttcattgagaagatccgtggtgcaggcttcatggtgcacaccgtggaatgggtagctcgcgagaagattcatggaacgaactttagcgttatcattactccgaccgaaatcgtcccagccaaacgcacagggccgatcttggaaggcgagtcgttctttggtcacgaaattatcatgaaaaaatatatggactccttcgtgaaggtgcagaacatgctgaatgccatggatcttgttagcgtgcaaatctttggcgaatttgcgggtggtggcattcagaaaggcgtcgattacggagacaaagatttctatgtgtttgacatcctgtctgatagcgggaacgagaaagtttactgggatgactatcgcgtcgaatcgttttgcaccactgtgggtctgaaattagcgcctctgctgggacgtggtagtttcgctgaactgtcccagtacccaaacgatttcaaaagcctggtgaaccgttataatgaattggttgacacggtcggcctggagatggccaataaacacgtctttggtccgcaagcgtcttctgaaactggcctggcagaaggctacgttcttaaacccgtctatccgatcttcttaaataccggtacgcgcgtggcgattaaatgcaagaactccaaattttcggagaaagccaagaaagacagcccaattagtgcgaaggttgaactgacggagaacgataaacgtctgctcgaaatctttagcgagtatgttacctggaatcgcgtcagtaacgtactgtcacatattggctcagtgaccgcaaaagattttgggcgtgtttcgggtctgacgatgaaagacatcattaatgaagcagcacgcgaaggccatgatctgttgttcgctgataacccgtcggcggtgctgaaggagctgactggcctcatccagaacacgattcgctccaaatggcacgaagttctggag

SEQ ID NO: 1674 - protein, 346 aa, synthetic construct
  REGION 1..346: note = variant of RNA ligase 2 from Klebsiella phage KP179
MHHHHHHGGSNMFAYYSSLENHYNAKFIEKIRGAGFMVHTVEWVAREKIHGTNFSVIITPTEIVPAKRTGPILEGESFFGHEIIMKKYMDSFVKVQNMLNAMDLVSVQIFGEFAGGGIQKGVDYGDKDFYVFDILSDSGNEKVYWDDYRVESFCTTVGLKLAPLLGRGSFAELSQYPNDFKSLVNRYNELVDTVGLEMANKHVFGPQASSETGLAEGYVLKPVYPIFLNTGTRVAIKCKNSKFSEKAKKDSPISAKVELTENDKRLLEIFSEYVTWNRVSNVLSHIGSVTAKDFGRVSGLTMKDIINEAAREGHDLLFADNPSAVLKELTGLIQNTIRSKWHEVLE

SEQ ID NO: 1675 - DNA, 1038 bp, synthetic construct
  misc_feature 1..1038: note = variant of RNA ligase 2 from Klebsiella phage KP179
  source 1..1038: mol_type = other DNA
atgcatcaccatcaccatcacggtggctctaacatgtttgcgtattattcaagtctggaaaaccattacaatgctaagttcattgagaagatccgtggtgcaggcttcatggtgcacaccgtggaatgggtagctcgcgagaagattcatggaacgaactttagcgttatcattactccgaccgaaatcgtcccagccaaacgcacagggccgatcttggaaggcgagtcgttctttggtcacgaaattatcatgaaaaaatatatggactccttcgtgaaggtgcagaacatgctgaatgccatggatcttgttagcgtgcaaatctttggcgaatttgcgggtggtggcattcagaaaggcgtcgattacggagacaaagatttctatgtgtttgacatcctgtctgatagcgggaacgagaaagtttactgggatgactatcgcgtcgaatcgttttgcaccactgtgggtctgaaattagcgcctctgctgggacgtggtagtttcgctgaactgtcccagtacccaaacgatttcaaaagcctggtgaaccgttataatgaattggttgacacggtcggcctggagatggccaataaacacgtctttggtccgcaagcgtcttctgaaactggcctggcagaaggctacgttcttaaacccgtctatccgatcttctttaataccggtacgcgcgtggcgattaaatgcaagaactccaaattttcggagaaagccaagaaagacagcccaattagtgcgaaggttgaactgacggagaacgataaacgtctgctcgaaatctttagcgagtatgttacctggaatcgcgtcagtaacgtactgtcacatattggctcagtgaccgcaaaagattttgggcgtgtttcgggtctgacgatgaaagacatcattaatgaagcagcacgcgaaggccatgatctgttgttcgctgataacccgtcggcggtgctgaaggagctgactggcctcatccagaacacgattcgctccaaatggcacgaagttctggag

SEQ ID NO: 1676 - protein, 346 aa, synthetic construct
  REGION 1..346: note = variant of RNA ligase 2 from Klebsiella phage KP179
MHHHHHHGGSNMFAYYSSLENHYNAKFIEKIRGAGFMVHTVEWVAREKIHGTNFSVIITPTEIVPAKRTGPILEGESFFGHEIIMKKYMDSFVKVQNMLNAMDLVSVQIFGEFAGGGIQKGVDYGDKDFYVFDILSDSGNEKVYWDDYRVESFCTTVGLKLAPLLGRGSFAELSQYPNDFKSLVNRYNELVDTVGLEMANKHVFGPQASSETGLAEGYVLKPVYPIFFNTGTRVAIKCKNSKFSEKAKKDSPISAKVELTENDKRLLEIFSEYVTWNRVSNVLSHIGSVTAKDFGRVSGLTMKDIINEAAREGHDLLFADNPSAVLKELTGLIQNTIRSKWHEVLE

SEQ ID NO: 1677 - DNA, 1038 bp, synthetic construct
  misc_feature 1..1038: note = variant of RNA ligase 2 from Klebsiella phage KP179
  source 1..1038: mol_type = other DNA
atgcatcaccatcaccatcacggtggctctaacatgtttgcgtattattcaagtctggaaaaccattacaatgctaagttcattgagaagatccgtggcgcaggcttcctggcgcacaccgtggaatgggtagctcgcgagaagattcatggaacgaactttagcgttatcattactccgaccgaaatcgtcccagccaaacgcacagggccgatcttggaaggcgagtcgttctttggtcacgaaattatcatgaaaaaatatatggactccttcgtgaaggtgcagaacatgctgaatgccatggatcttgttagcgtgcaaatctttggcgaatttgcgggtggtggcattcagaaaggcgtcgattacggagacaaagatttctatgtgtttgacatcctgtctgatagcgggaacgagaaagtttactgggatgactatcgcgtcgaatcgttttgcaccactgtgggtctgaaattagcgcctctgctgggacgtggtagtttcgctgaactgtcccagtacccaaacgatttcaaaagcctggtgaaccgttataatgaattggttgacacggtcggcctggagatggccaataaacacgtctttggtccgcaagcgtcttctgaaactggcctggcagaaggctacgttcttaaacccgtctatccgatcttctttaataccggtacgcgcgtggcgattaaatgcaagaactccaaattttcggagaaagccaagtcggacagcccaattagtgcgaaggttgaactgacggagaacgataaacgtctgctcgaaatctttagcgagtatgttacctggaatcgcgtcagtaacgtactgtcacatattggctcagtgaccacaaaagattttgggcgtgtttcgggtctgacgatgaaagacatcattaatgaagcagcacgcgaaggccatgatctgttgttcgctgataacccgtcggcggtgctgaaggagctgactggcctcatccagaacacgattcgctccaaatggcacgaagttctggag

SEQ ID NO: 1678 - protein, 346 aa, synthetic construct
  REGION 1..346: note = variant of RNA ligase 2 from Klebsiella phage KP179
MHHHHHHGGSNMFAYYSSLENHYNAKFIEKIRGAGFLAHTVEWVAREKIHGTNFSVIITPTEIVPAKRTGPILEGESFFGHEIIMKKYMDSFVKVQNMLNAMDLVSVQIFGEFAGGGIQKGVDYGDKDFYVFDILSDSGNEKVYWDDYRVESFCTTVGLKLAPLLGRGSFAELSQYPNDFKSLVNRYNELVDTVGLEMANKHVFGPQASSETGLAEGYVLKPVYPIFFNTGTRVAIKCKNSKFSEKAKSDSPISAKVELTENDKRLLEIFSEYVTWNRVSNVLSHIGSVTTKDFGRVSGLTMKDIINEAAREGHDLLFADNPSAVLKELTGLIQNTIRSKWHEVLE

SEQ ID NO: 1679 - DNA, 1038 bp, synthetic construct
  misc_feature 1..1038: note = variant of RNA ligase 2 from Klebsiella phage KP179
  source 1..1038: mol_type = other DNA
atgcatcaccatcaccatcacggtggctttaacatgtttgcgtattattcaagtctggaaaaccattacaatgctaagttcattgagaagatccgtggtgcaggcttcctgatgcacaccgtggaatgggtagctcgcgagaagattcatggaacgaactttagcgttatcattactccgaccgaaatcgtcccagccaaacgcacagggccgatcttggaaggcgagtcgttctttggtcacgaaattatcatgaaaaaatatatggactccttcgtgaaggtgcagaacatgctgaatgccatggatcttgttagcgtgcaaatctttggcgaatttgcgggtggtggcattcagaaaggcgtcgattacggagacaaagatttctatgtgtttgacatcctgtctgatagcgggaacgagaaagtttactgggatgactatcgcgtcgaatcgttttgcaccactgtgggtctgaaattagcgcctctgctgggacgtggtagtttcgctgaactgtcccagtacccaaacgatttcaaaagcctggtgaaccgttataatgaattggttgacacggtcggcctggagatggccaataaacacgtctttggtccgcaagcgtcttctgaaactggcctggcagaaggctacgttcttaaacccgtctatccgatcttcttaaataccggtacgcgcgtggcgattaaatgcaagaactccaaattttcggagaaagccaagctggactcgccaattagtgcgaaggttgaactgacggagaacgataaacgtctgctcgaaatctttagcgagtatgttacctggaatcgcgtcagtaacgtactgtcacatattggctcagtgaccgcaaaagattttgggcgtgtttcgggtctgacgatgaaagacatcattaatgaagcagcacgcgaaggccatgatctgttgttcgctgataacccgtcggcggtgctgaaggagctgactggcctcatccagaacacgattcgctccaaatggcacgaagttctggag

SEQ ID NO: 1680 - protein, 346 aa, synthetic construct
  REGION 1..346: note = variant of RNA ligase 2 from Klebsiella phage KP179
MHHHHHHGGFNMFAYYSSLENHYNAKFIEKIRGAGFLMHTVEWVAREKIHGTNFSVIITPTEIVPAKRTGPILEGESFFGHEIIMKKYMDSFVKVQNMLNAMDLVSVQIFGEFAGGGIQKGVDYGDKDFYVFDILSDSGNEKVYWDDYRVESFCTTVGLKLAPLLGRGSFAELSQYPNDFKSLVNRYNELVDTVGLEMANKHVFGPQASSETGLAEGYVLKPVYPIFLNTGTRVAIKCKNSKFSEKAKLDSPISAKVELTENDKRLLEIFSEYVTWNRVSNVLSHIGSVTAKDFGRVSGLTMKDIINEAAREGHDLLFADNPSAVLKELTGLIQNTIRSKWHEVLE

SEQ ID NO: 1681 - DNA, 1038 bp, synthetic construct
  misc_feature 1..1038: note = variant of RNA ligase 2 from Klebsiella phage KP179
  source 1..1038: mol_type = other DNA
atgcatcaccatcaccatcacggtggctttaacatgtttgcgtattattcaagtctggaaaaccattacaatgctaagttcattgagaagatccgtggtgcaggcttcctgatgcacaccgtggaatgggtagctcgcgagaagattcatggaacgaactttagcgttatcattactccgaccgaaatcgtcccagccaaacgcacagggccgatcttggaaggcgagtcgttctttggtcacgaaattatcatgaaaaaatatatggactccttcgtgaaggtgcagaacatgctgaatgccatggatcttgttagcgtgcaaatctttggcgaatttgcgggtggtggcattcagaaaggcgtcgattacggagacaaagatttctatgtgtttgacatcctgtctgatagcgggaacgagaaagtttactgggatgactatcgcgtcgaatcgttttgcaccactgtgggtctgaaattagcgcctctgctgggacgtggtagtttcgctgaactgtcccagtacccaaacgatttcaaaagcctggtgaaccgttataatgaattggttgacacggtcggcctggagatggccaataaacacgtctttggtccgcaagcgtcttctgaaactggcctggcagaaggctacgttcttaaacccgtctatccgatcttcttaaataccggtacgcgcgtggcgattaaatgcaagaactccaaattttcggagaaagccaagaaagacagcccaattagtgcgaaggttgaactgacggagaacgataaacgtctgctcgaaatctttagcgagtatgttacctggaatcgcgtcagtaacgtactgtcacatattggctcagtgaccgcaaaagattttgggcgtgtttcgggtctgacgatgaaagacatcattaatgaagcagcacgcgaaggccatgatctgttgttcgctgataacccgtcggcggtgctgaaggagctgactggcctcatccagaacacgattcgctccaaatggcacgaagttctggag

SEQ ID NO: 1682 - protein, 346 aa, synthetic construct
  REGION 1..346: note = variant of RNA ligase 2 from Klebsiella phage KP179
MHHHHHHGGFNMFAYYSSLENHYNAKFIEKIRGAGFLMHTVEWVAREKIHGTNFSVIITPTEIVPAKRTGPILEGESFFGHEIIMKKYMDSFVKVQNMLNAMDLVSVQIFGEFAGGGIQKGVDYGDKDFYVFDILSDSGNEKVYWDDYRVESFCTTVGLKLAPLLGRGSFAELSQYPNDFKSLVNRYNELVDTVGLEMANKHVFGPQASSETGLAEGYVLKPVYPIFLNTGTRVAIKCKNSKFSEKAKKDSPISAKVELTENDKRLLEIFSEYVTWNRVSNVLSHIGSVTAKDFGRVSGLTMKDIINEAAREGHDLLFADNPSAVLKELTGLIQNTIRSKWHEVLE

SEQ ID NO: 1683 - DNA, 1038 bp, synthetic construct
  misc_feature 1..1038: note = variant of RNA ligase 2 from Klebsiella phage KP179
  source 1..1038: mol_type = other DNA
atgcatcaccatcaccatcacggtggctttaacatgtttgcgtattattcaagtctggaaaaccattacaatgctaagttcattgagaagatccgtctggcaggcttcctgatgcacaccgtggaatgggtagctcgcgagaagattcatggaacgaactttagcgttatcattactccgaccgaaatcgtcccagccaaacgcacagggccgatcttggaaggcgagtcgttctttggtcacgaaattatcatgaaaaaatatatggactccttcgtgaaggtgcagaacatgctgaatgccatggatcttgttagcgtgcaaatctttggcgaatttgcgggtggtggcattcagaaaggcgtcgattacggagacaaagatttctatgtgtttgacatcctgtctgatagcgggaacgagaaagtttactgggatgactatcgcgtcgaatcgttttgcaccactgtgggtctgaaattagcgcctctgctgggacgtggtagtttcgctgaactgtcccagtacccaaacgatttcaaaagcctggtgaaccgttataatgaattggttgacacggtcggcctggagatggccaataaacacgtctttggtccgcaagcgtcttctgaaactggcctggcagaaggctacgttcttaaacccgtctatccgatcttctttaataccggtacgcgcgtggcgattaaatgcaagaactccaaattttcggagaaagccaagaaagacagcccaattagtgcgaaggttgaactgacggagaacgataaacgtctgctcgaaatctttagcgagtatgttacctggaatcgcgtcagtaacgtactgtcacatattggctcagtgaccgcaaaagattttgggcgtgtttcgggtctgacgatgaaagacatcattaatgaagcagcacgcgaaggccatgatctgttgttcgctgataacccgtcggcggtgctgaaggagctgactggcctcatccagaacacgattcgctccaaatggcacgaagttctggag

SEQ ID NO: 1684 - protein, 346 aa, synthetic construct
  REGION 1..346: note = variant of RNA ligase 2 from Klebsiella phage KP179
MHHHHHHGGFNMFAYYSSLENHYNAKFIEKIRLAGFLMHTVEWVAREKIHGTNFSVIITPTEIVPAKRTGPILEGESFFGHEIIMKKYMDSFVKVQNMLNAMDLVSVQIFGEFAGGGIQKGVDYGDKDFYVFDILSDSGNEKVYWDDYRVESFCTTVGLKLAPLLGRGSFAELSQYPNDFKSLVNRYNELVDTVGLEMANKHVFGPQASSETGLAEGYVLKPVYPIFFNTGTRVAIKCKNSKFSEKAKKDSPISAKVELTENDKRLLEIFSEYVTWNRVSNVLSHIGSVTAKDFGRVSGLTMKDIINEAAREGHDLLFADNPSAVLKELTGLIQNTIRSKWHEVLE

SEQ ID NO: 1685 - DNA, 1038 bp, synthetic construct
  misc_feature 1..1038: note = variant of RNA ligase 2 from Klebsiella phage KP179
  source 1..1038: mol_type = other DNA
atgcatcaccatcaccatcacggtggctttaacatgtttgcgtattattcaagtctggaaaaccattacaatgctaagttcattgagaagatccgtctggcaggcttcatgatgcacaccgtggaatgggtagctcgcgagaagattcatggaacgaactttagcgttatcattactccgaccgaaatcgtcccagccaaacgcacagggccgatcttggaaggcgagtcgttctttggtcacgaaattatcatgaaaaaatatatggactccttcgtgaaggtgcagaacatgctgaatgccatggatcttgttagcgtgcaaatctttggcgaatttgcgggtggtggcattcagaaaggcgtcgattacggagacaaagatttctatgtgtttgacatcctgtctgatagcgggaacgagaaagtttactgggatgactatcgcgtcgaatcgttttgcaccactgtgggtctgaaattagcgcctctgctgggacgtggtagtttcgctgaactgtcccagtacccaaacgatttcaaaagcctggtgaaccgttataatgaattggttgacacggtcggcctggagatggccaataaacacgtctttggtccgcaagcgtcttctgaaactggcctggcagaaggctacgttcttaaacccgtctatccgatcttctttaataccggtacgcgcgtggcgattaaatgcaagaactccaaattttcggagaaagccaagttggacagcccaattagtgcgaaggttgaactgacggagaacgataaacgtctgctcgaaatctttagcgagtatgttacctggaatcgcgtcagtaacgtactgtcacatattggctcagtgaccgcaaaagattttgggcgtgtttcgggtctgacgatgaaagacatcattaatgaagcagcacgcgaaggccatgatctgttgttcgctgataacccgtcggcggtgctgaaggagctgactggcctcatccagaacacgattcgctccaaatggcacgaagttctggag

SEQ ID NO: 1686 - protein, 346 aa, synthetic construct
  REGION 1..346: note = variant of RNA ligase 2 from Klebsiella phage KP179
MHHHHHHGGFNMFAYYSSLENHYNAKFIEKIRLAGFMMHTVEWVAREKIHGTNFSVIITPTEIVPAKRTGPILEGESFFGHEIIMKKYMDSFVKVQNMLNAMDLVSVQIFGEFAGGGIQKGVDYGDKDFYVFDILSDSGNEKVYWDDYRVESFCTTVGLKLAPLLGRGSFAELSQYPNDFKSLVNRYNELVDTVGLEMANKHVFGPQASSETGLAEGYVLKPVYPIFFNTGTRVAIKCKNSKFSEKAKLDSPISAKVELTENDKRLLEIFSEYVTWNRVSNVLSHIGSVTAKDFGRVSGLTMKDIINEAAREGHDLLFADNPSAVLKELTGLIQNTIRSKWHEVLE

SEQ ID NO: 1687 - DNA, 1038 bp, synthetic construct
  misc_feature 1..1038: note = variant of RNA ligase 2 from Klebsiella phage KP179
  source 1..1038: mol_type = other DNA
atgcatcaccatcaccatcacggtggctttaacatgtttgcgtattattcaagtctggaaaaccattacaatgctaagttcattgagaagatccgtctggcaggcttcatggcgcacaccgtggaatgggtagctcgcgagaagattcatggaacgaactttagcgttatcattactccgaccgaaatcgtcccagccaaacgcacagggccgatcttggaaggcgagtcgttctttggtcacgaaattatcatgaaaaaatatatggactccttcgtgaaggtgcagaacatgctgaatgccatggatcttgttagcgtgcaaatctttggcgaatttgcgggtggtggcattcagaaaggcgtcgattacggagacaaagatttctatgtgtttgacatcctgtctgatagcgggaacgagaaagtttactgggatgactatcgcgtcgaatcgttttgcaccactgtgggtctgaaattagcgcctctgctgggacgtggtagtttcgctgaactgtcccagtacccaaacgatttcaaaagcctggtgaaccgttataatgaattggttgacacggtcggcctggagatggccaataaacacgtctttggtccgcaagcgtcttctgaaactggcctggcagaaggctacgttcttaaacccgtctatccgatcttctttaataccggtacgcgcgtggcgattaaatgcaagaactccaaattttcggagaaagccaagaaagacagcccaattagtgcgaaggttgaactgacggagaacgataaacgtctgctcgaaatctttagcgagtatgttacctggaatcgcgtcagtaacgtactgtcacatattggctcagtgaccgcaaaagattttgggcgtgtttcgggtctgacgatgaaagacatcattaatgaagcagcacgcgaaggccatgatctgttgttcgctgataacccgtcggcggtgctgaaggagctgactggcctcatccagaacacgattcgctccaaatggcacgaagttctggag

SEQ ID NO: 1688 - protein, 346 aa, synthetic construct
  REGION 1..346: note = variant of RNA ligase 2 from Klebsiella phage KP179
MHHHHHHGGFNMFAYYSSLENHYNAKFIEKIRLAGFMAHTVEWVAREKIHGTNFSVIITPTEIVPAKRTGPILEGESFFGHEIIMKKYMDSFVKVQNMLNAMDLVSVQIFGEFAGGGIQKGVDYGDKDFYVFDILSDSGNEKVYWDDYRVESFCTTVGLKLAPLLGRGSFAELSQYPNDFKSLVNRYNELVDTVGLEMANKHVFGPQASSETGLAEGYVLKPVYPIFFNTGTRVAIKCKNSKFSEKAKKDSPISAKVELTENDKRLLEIFSEYVTWNRVSNVLSHIGSVTAKDFGRVSGLTMKDIINEAAREGHDLLFADNPSAVLKELTGLIQNTIRSKWHEVLE

SEQ ID NO: 1689 - DNA, 1038 bp, synthetic construct
  misc_feature 1..1038: note = variant of RNA ligase 2 from Klebsiella phage KP179
  source 1..1038: mol_type = other DNA
atgcatcaccatcaccatcacggtggctttaacatgtttgcgtattattcaagtctggaaaaccattacaatgctaagttcattgagaagatccgtctggcaggcttcctggcgcacaccgtggaatgggtagctcgcgagaagattcatggaacgaactttagcgttatcattactccgaccgaaatcgtcccagccaaacgcacagggccgatcttggaaggcgagtcgttctttggtcacgaaattatcatgaaaaaatatatggactccttcgtgaaggtgcagaacatgctgaatgccatggatcttgttagcgtgcaaatctttggcgaatttgcgggtggtggcattcagaaaggcgtcgattacggagacaaagatttctatgtgtttgacatcctgtctgatagcgggaacgagaaagtttactgggatgactatcgcgtcgaatcgttttgcaccactgtgggtctgaaattagcgcctctgctgggacgtggtagtttcgctgaactgtcccagtacccaaacgatttcaaaagcctggtgaaccgttataatgaattggttgacacggtcggcctggagatggccaataaacacgtctttggtccgcaagcgtcttctgaaactggcctggcagaaggctacgttcttaaacccgtctatccgatcttctttaataccggtacgcgcgtggcgattaaatgcaagaactccaaattttcggagaaagccaagtcggacagcccaattagtgcgaaggttgaactgacggagaacgataaacgtctgctcgaaatctttagcgagtatgttacctggaatcgcgtcagtaacgtactgtcacatattggctcagtgaccgcaaaagattttgggcgtgtttcgggtctgacgatgaaagacatcattaatgaagcagcacgcgaaggccatgatctgttgttcgctgataacccgtcggcggtgctgaaggagctgactggcctcatccagaacacgattcgctccaaatggcacgaagttctggag

SEQ ID NO: 1690 - protein, 346 aa, synthetic construct
  REGION 1..346: note = variant of RNA ligase 2 from Klebsiella phage KP179
MHHHHHHGGFNMFAYYSSLENHYNAKFIEKIRLAGFLAHTVEWVAREKIHGTNFSVIITPTEIVPAKRTGPILEGESFFGHEIIMKKYMDSFVKVQNMLNAMDLVSVQIFGEFAGGGIQKGVDYGDKDFYVFDILSDSGNEKVYWDDYRVESFCTTVGLKLAPLLGRGSFAELSQYPNDFKSLVNRYNELVDTVGLEMANKHVFGPQASSETGLAEGYVLKPVYPIFFNTGTRVAIKCKNSKFSEKAKSDSPISAKVELTENDKRLLEIFSEYVTWNRVSNVLSHIGSVTAKDFGRVSGLTMKDIINEAAREGHDLLFADNPSAVLKELTGLIQNTIRSKWHEVLE

SEQ ID NO: 1691 - DNA, 1038 bp, synthetic construct
  misc_feature 1..1038: note = variant of RNA ligase 2 from Klebsiella phage KP179
  source 1..1038: mol_type = other DNA
atgcatcaccatcaccatcacggtggctttaacatgtttgcgtattattcaagtctggaaaaccattacaatgctaagttcattgagaagatccgtctggcaggcttcctggtgcacaccgtggaatgggtagctcgcgagaagattcatggaacgaactttagcgttatcattactccgaccgaaatcgtcccagccaaacgcacagggccgatcttggaaggcgagtcgttctttggtcacgaaattatcatgaaaaaatatatggactccttcgtgaaggtgcagaacatgctgaatgccatggatcttgttagcgtgcaaatctttggcgaatttgcgggtggtggcattcagaaaggcgtcgattacggagacaaagatttctatgtgtttgacatcctgtctgatagcgggaacgagaaagtttactgggatgactatcgcgtcgaatcgttttgcaccactgtgggtctgaaattagcgcctctgctgggacgtggtagtttcgctgaactgtcccagtacccaaacgatttcaaaagcctggtgaaccgttataatgaattggttgacacggtcggcctggagatggccaataaacacgtctttggtccgcaagcgtcttctgaaactggcctggcagaaggctacgttcttaaacccgtctatccgatcttctttaataccggtacgcgcgtggcgattaaatgcaagaactccaaattttcggagaaagccaagttggacagcccaattagtgcgaaggttgaactgacggagaacgataaacgtctgctcgaaatctttagcgagtatgttacctggaatcgcgtcagtaacgtactgtcacatattggctcagtgaccgcaaaagattttgggcgtgtttcgggtctgacgatgaaagacatcattaatgaagcagcacgcgaaggccatgatctgttgttcgctgataacccgtcggcggtgctgaaggagctgactggcctcatccagaacacgattcgctccaaatggcacgaagttctggag

SEQ ID NO: 1692 - protein, 346 aa, synthetic construct
  REGION 1..346: note = variant of RNA ligase 2 from Klebsiella phage KP179
MHHHHHHGGFNMFAYYSSLENHYNAKFIEKIRLAGFLVHTVEWVAREKIHGTNFSVIITPTEIVPAKRTGPILEGESFFGHEIIMKKYMDSFVKVQNMLNAMDLVSVQIFGEFAGGGIQKGVDYGDKDFYVFDILSDSGNEKVYWDDYRVESFCTTVGLKLAPLLGRGSFAELSQYPNDFKSLVNRYNELVDTVGLEMANKHVFGPQASSETGLAEGYVLKPVYPIFFNTGTRVAIKCKNSKFSEKAKLDSPISAKVELTENDKRLLEIFSEYVTWNRVSNVLSHIGSVTAKDFGRVSGLTMKDIINEAAREGHDLLFADNPSAVLKELTGLIQNTIRSKWHEVLE

SEQ ID NO: 1693 - DNA, 1038 bp, synthetic construct
  misc_feature 1..1038: note = variant of RNA ligase 2 from Klebsiella phage KP179
  source 1..1038: mol_type = other DNA
atgcatcaccatcaccatcacggtggctttaacatgtttgcgtattattcaagtctggaaaaccattacaatgctaagttcattgagaagatccgtgtcgcaggcttcctgatgcacaccgtggaatgggtagctcgcgagaagattcatggaacgaactttagcgttatcattactccgaccgaaatcgtcccagccaaacgcacagggccgatcttggaaggcgagtcgttctttggtcacgaaattatcatgaaaaaatatatggactccttcgtgaaggtgcagaacatgctgaatgccatggatcttgttagcgtgcaaatctttggcgaatttgcgggtggtggcattcagaaaggcgtcgattacggagacaaagatttctatgtgtttgacatcctgtctgatagcgggaacgagaaagtttactgggatgactatcgcgtcgaatcgttttgcaccactgtgggtctgaaattagcgcctctgctgggacgtggtagtttcgctgaactgtcccagtacccaaacgatttcaaaagcctggtgaaccgttataatgaattggttgacacggtcggcctggagatggccaataaacacgtctttggtccgcaagcgtcttctgaaactggcctggcagaaggctacgttcttaaacccgtctatccgatcttctttaataccggtacgcgcgtggcgattaaatgcaagaactccaaattttcggagaaagccaagaaagacgaaccaattagtgcgaaggttgaactgacggagaacgataaacgtctgctcgaaatctttagcgagtatgttacctggaatcgcgtcagtaacgtactgtcacatattggctcagtgaccgcaaaagattttgggcgtgtttcgggtctgacgatgaaagacatcattaatgaagcagcacgcgaaggccatgatctgttgttcgctgataacccgtcggcggtgctgaaggagctgactggcctcatccagaacacgattcgctccaaatggcacgaagttctggag

SEQ ID NO: 1694 - protein, 346 aa, synthetic construct
  REGION 1..346: note = variant of RNA ligase 2 from Klebsiella phage KP179
MHHHHHHGGFNMFAYYSSLENHYNAKFIEKIRVAGFLMHTVEWVAREKIHGTNFSVIITPTEIVPAKRTGPILEGESFFGHEIIMKKYMDSFVKVQNMLNAMDLVSVQIFGEFAGGGIQKGVDYGDKDFYVFDILSDSGNEKVYWDDYRVESFCTTVGLKLAPLLGRGSFAELSQYPNDFKSLVNRYNELVDTVGLEMANKHVFGPQASSETGLAEGYVLKPVYPIFFNTGTRVAIKCKNSKFSEKAKKDEPISAKVELTENDKRLLEIFSEYVTWNRVSNVLSHIGSVTAKDFGRVSGLTMKDIINEAAREGHDLLFADNPSAVLKELTGLIQNTIRSKWHEVLE

SEQ ID NO: 1695 - DNA, 1038 bp, synthetic construct
  misc_feature 1..1038: note = variant of RNA ligase 2 from Klebsiella phage KP179
  source 1..1038: mol_type = other DNA
atgcatcaccatcaccatcacggtggctttaacatgtttgcgtattattcaagtctggaaaaccattacaatgctaagttcattgagaagatccgtgtcgcaggcttcatgatgcacaccgtggaatgggtagctcgcgagaagattcatggaacgaactttagcgttatcattactccgaccgaaatcgtcccagccaaacgcacagggccgatcttggaaggcgagtcgttctttggtcacgaaattatcatgaaaaaatatatggactccttcgtgaaggtgcagaacatgctgaatgccatggatcttgttagcgtgcaaatctttggcgaatttgcgggtggtggcattcagaaaggcgtcgattacggagacaaagatttctatgtgtttgacatcctgtctgatagcgggaacgagaaagtttactgggatgactatcgcgtcgaatcgttttgcaccactgtgggtctgaaattagcgcctctgctgggacgtggtagtttcgctgaactgtcccagtacccaaacgatttcaaaagcctggtgaaccgttataatgaattggttgacacggtcggcctggagatggccaataaacacgtctttggtccgcaagcgtcttctgaaactggcctggcagaaggctacgttcttaaacccgtctatccgatcttctttaataccggtacgcgcgtggcgattaaatgcaagaactccaaattttcggagaaagccaagctggactcgccaattagtgcgaaggttgaactgacggagaacgataaacgtctgctcgaaatctttagcgagtatgttacctggaatcgcgtcagtaacgtactgtcacatattggctcagtgaccgcaaaagattttgggcgtgtttcgggtctgacgatgaaagacatcattaatgaagcagcacgcgaaggccatgatctgttgttcgctgataacccgtcggcggtgctgaaggagctgactggcctcatccagaacacgattcgctccaaatggcacgaagttctggag

SEQ ID NO: 1696 - protein, 346 aa, synthetic construct
  REGION 1..346: note = variant of RNA ligase 2 from Klebsiella phage KP179
MHHHHHHGGFNMFAYYSSLENHYNAKFIEKIRVAGFMMHTVEWVAREKIHGTNFSVIITPTEIVPAKRTGPILEGESFFGHEIIMKKYMDSFVKVQNMLNAMDLVSVQIFGEFAGGGIQKGVDYGDKDFYVFDILSDSGNEKVYWDDYRVESFCTTVGLKLAPLLGRGSFAELSQYPNDFKSLVNRYNELVDTVGLEMANKHVFGPQASSETGLAEGYVLKPVYPIFFNTGTRVAIKCKNSKFSEKAKLDSPISAKVELTENDKRLLEIFSEYVTWNRVSNVLSHIGSVTAKDFGRVSGLTMKDIINEAAREGHDLLFADNPSAVLKELTGLIQNTIRSKWHEVLE

SEQ ID NO: 1697 - DNA, 1038 bp, synthetic construct
  misc_feature 1..1038: note = variant of RNA ligase 2 from Klebsiella phage KP179
  source 1..1038: mol_type = other DNA
atgcatcaccatcaccatcacggtggctttaacatgtttgcgtattattcaagtctggaaaaccattacaatgctaagttcattgagaagatccgtgtcgcaggcttcatgatgcacaccgtggaatgggtagctcgcgagaagattcatggaacgaactttagcgttatcattactccgaccgaaatcgtcccagccaaacgcacagggccgatcttggaaggcgagtcgttctttggtcacgaaattatcatgaaaaaatatatggactccttcgtgaaggtgcagaacatgctgaatgccatggatcttgttagcgtgcaaatctttggcgaatttgcgggtggtggcattcagaaaggcgtcgattacggagacaaagatttctatgtgtttgacatcctgtctgatagcgggaacgagaaagtttactgggatgactatcgcgtcgaatcgttttgcaccactgtgggtctgaaattagcgcctctgctgggacgtggtagtttcgctgaactgtcccagtacccaaacgatttcaaaagcctggtgaaccgttataatgaattggttgacacggtcggcctggagatggccaataaacacgtctttggtccgcaagcgtcttctgaaactggcctggcagaaggctacgttcttaaacccgtctatccgatcttcttaaataccggtacgcgcgtggcgattaaatgcaagaactccaaattttcggagaaagccaagttggacagcccaattagtgcgaaggttgaactgacggagaacgataaacgtctgctcgaaatctttagcgagtatgttacctggaatcgcgtcagtaacgtactgtcacatattggctcagtgaccgcaaaagattttgggcgtgtttcgggtctgacgatgaaagacatcattaatgaagcagcacgcgaaggccatgatctgttgttcgctgataacccgtcggcggtgctgaaggagctgactggcctcatccagaacacgattcgctccaaatggcacgaagttctggag

SEQ ID NO: 1698 - protein, 346 aa, synthetic construct
  REGION 1..346: note = variant of RNA ligase 2 from Klebsiella phage KP179
MHHHHHHGGFNMFAYYSSLENHYNAKFIEKIRVAGFMMHTVEWVAREKIHGTNFSVIITPTEIVPAKRTGPILEGESFFGHEIIMKKYMDSFVKVQNMLNAMDLVSVQIFGEFAGGGIQKGVDYGDKDFYVFDILSDSGNEKVYWDDYRVESFCTTVGLKLAPLLGRGSFAELSQYPNDFKSLVNRYNELVDTVGLEMANKHVFGPQASSETGLAEGYVLKPVYPIFLNTGTRVAIKCKNSKFSEKAKLDSPISAKVELTENDKRLLEIFSEYVTWNRVSNVLSHIGSVTAKDFGRVSGLTMKDIINEAAREGHDLLFADNPSAVLKELTGLIQNTIRSKWHEVLE

SEQ ID NO: 1699 - DNA, 1038 bp, synthetic construct
  misc_feature 1..1038: note = variant of RNA ligase 2 from Klebsiella phage KP179
  source 1..1038: mol_type = other DNA
atgcatcaccatcaccatcacggtggctttaacatgtttgcgtattattcaagtctggaaaaccattacaatgctaagttcattgagaagatccgtgtcgcaggcttcatgatgcacaccgtggaatgggtagctcgcgagaagattcatggaacgaactttagcgttatcattactccgaccgaaatcgtcccagccaaacgcacagggccgatcttggaaggcgagtcgttctttggtcacgaaattatcatgaaaaaatatatggactccttcgtgaaggtgcagaacatgctgaatgccatggatcttgttagcgtgcaaatctttggcgaatttgcgggtggtggcattcagaaaggcgtcgattacggagacaaagatttctatgtgtttgacatcctgtctgatagcgggaacgagaaagtttactgggatgactatcgcgtcgaatcgttttgcaccactgtgggtctgaaattagcgcctctgctgggacgtggtagtttcgctgaactgtcccagtacccaaacgatttcaaaagcctggtgaaccgttataatgaattggttgacacggtcggcctggagatggccaataaacacgtctttggtccgcaagcgtcttctgaaactggcctggcagaaggctacgttcttaaacccgtctatccgatcttctttaataccggtacgcgcgtggcgattaaatgcaagaactccaaattttcggagaaagccaagaaagacagcccaattagtgcgaaggttgaactgacggagaacgataaacgtctgctcgaaatctttagcgagtatgttacctggaatcgcgtcagtaacgtactgtcacatattggctcagtgaccgcaaaagattttgggcgtgtttcgggtctgacgatgaaagacatcattaatgaagcagcacgcgaaggccatgatctgttgttcgctgataacccgtcggcggtgctgaaggagctgactggcctcatccagaacacgattcgctccaaatggcacgaagttctggag

SEQ ID NO: 1700 - protein, 346 aa, synthetic construct
  REGION 1..346: note = variant of RNA ligase 2 from Klebsiella phage KP179
MHHHHHHGGFNMFAYYSSLENHYNAKFIEKIRVAGFMMHTVEWVAREKIHGTNFSVIITPTEIVPAKRTGPILEGESFFGHEIIMKKYMDSFVKVQNMLNAMDLVSVQIFGEFAGGGIQKGVDYGDKDFYVFDILSDSGNEKVYWDDYRVESFCTTVGLKLAPLLGRGSFAELSQYPNDFKSLVNRYNELVDTVGLEMANKHVFGPQASSETGLAEGYVLKPVYPIFFNTGTRVAIKCKNSKFSEKAKKDSPISAKVELTENDKRLLEIFSEYVTWNRVSNVLSHIGSVTAKDFGRVSGLTMKDIINEAAREGHDLLFADNPSAVLKELTGLIQNTIRSKWHEVLE

SEQ ID NO: 1701 - DNA, 1038 bp, synthetic construct
  misc_feature 1..1038: note = variant of RNA ligase 2 from Klebsiella phage KP179
  source 1..1038: mol_type = other DNA
atgcatcaccatcaccatcacggtggctttaacatgtttgcgtattattcaagtctggaaaaccattacaatgctaagttcattgagaagatccgtgtcgcaggcttcatgatgcacaccgtggaatgggtagctcgcgagaagattcatggaacgaactttagcgttatcattactccgaccgaaatcgtcccagccaaacgcacagggccgatcttggaaggcgagtcgttctttggtcacgaaattatcatgaaaaaatatatggactccttcgtgaaggtgcagaacatgctgaatgccatggatcttgttagcgtgcaaatctttggcgaatttgcgggtggtggcattcagaaaggcgtcgattacggagacaaagatttctatgtgtttgacatcctgtctgatagcgggaacgagaaagtttactgggatgactatcgcgtcgaatcgttttgcaccactgtgggtctgaaattagcgcctctgctgggacgtggtagtttcgctgaactgtcccagtacccaaacgatttcaaaagcctggtgaaccgttataatgaattggttgacacggtcggcctggagatggccaataaacacgtctttggtccgcaagcgtcttctgaaactggcctggcagaaggctacgttcttaaacccgtctatccgatcttctttaataccggtacgcgcgtggcgattaaatgcaagaactccaaattttcggagaaagccaagtcggacagcccaattagtgcgaaggttgaactgacggagaacgataaacgtctgctcgaaatctttagcgagtatgttacctggaatcgcgtcagtaacgtactgtcacatattggctcagtgaccgcaaaagattttgggcgtgtttcgggtctgacgatgaaagacatcattaatgaagcagcacgcgaaggccatgatctgttgttcgctgataacccgtcggcggtgctgaaggagctgactggcctcatccagaacacgattcgctccaaatggcacgaagttctggag

SEQ ID NO: 1702 - protein, 346 aa, synthetic construct
  REGION 1..346: note = variant of RNA ligase 2 from Klebsiella phage KP179
MHHHHHHGGFNMFAYYSSLENHYNAKFIEKIRVAGFMMHTVEWVAREKIHGTNFSVIITPTEIVPAKRTGPILEGESFFGHEIIMKKYMDSFVKVQNMLNAMDLVSVQIFGEFAGGGIQKGVDYGDKDFYVFDILSDSGNEKVYWDDYRVESFCTTVGLKLAPLLGRGSFAELSQYPNDFKSLVNRYNELVDTVGLEMANKHVFGPQASSETGLAEGYVLKPVYPIFFNTGTRVAIKCKNSKFSEKAKSDSPISAKVELTENDKRLLEIFSEYVTWNRVSNVLSHIGSVTAKDFGRVSGLTMKDIINEAAREGHDLLFADNPSAVLKELTGLIQNTIRSKWHEVLE

SEQ ID NO: 1703 - DNA, 1038 bp, synthetic construct
  misc_feature 1..1038: note = variant of RNA ligase 2 from Klebsiella phage KP179
  source 1..1038: mol_type = other DNA
atgcatcaccatcaccatcacggtggctttaacatgtttgcgtattattcaagtctggaaaaccattacaatgctaagttcattgagaagatccgtgtcgcaggcttcatggcgcacaccgtggaatgggtagctcgcgagaagattcatggaacgaactttagcgttatcattactccgaccgaaatcgtcccagccaaacgcacagggccgatcttggaaggcgagtcgttctttggtcacgaaattatcatgaaaaaatatatggactccttcgtgaaggtgcagaacatgctgaatgccatggatcttgttagcgtgcaaatctttggcgaatttgcgggtggtggcattcagaaaggcgtcgattacggagacaaagatttctatgtgtttgacatcctgtctgatagcgggaacgagaaagtttactgggatgactatcgcgtcgaatcgttttgcaccactgtgggtctgaaattagcgcctctgctgggacgtggtagtttcgctgaactgtcccagtacccaaacgatttcaaaagcctggtgaaccgttataatgaattggttgacacggtcggcctggagatggccaataaacacgtctttggtccgcaagcgtcttctgaaactggcctggcagaaggctacgttcttaaacccgtctatccgatcttcttaaataccggtacgcgcgtggcgattaaatgcaagaactccaaattttcggagaaagccaagaaagacagcccaattagtgcgaaggttgaactgacggagaacgataaacgtctgctcgaaatctttagcgagtatgttacctggaatcgcgtcagtaacgtactgtcacatattggctcagtgaccgcaaaagattttgggcgtgtttcgggtctgacgatgaaagacatcattaatgaagcagcacgcgaaggccatgatctgttgttcgctgataacccgtcggcggtgctgaaggagctgactggcctcatccagaacacgattcgctccaaatggcacgaagttctggag

SEQ ID NO: 1704 - protein, 346 aa, synthetic construct
  REGION 1..346: note = variant of RNA ligase 2 from Klebsiella phage KP179
MHHHHHHGGFNMFAYYSSLENHYNAKFIEKIRVAGFMAHTVEWVAREKIHGTNFSVIITPTEIVPAKRTGPILEGESFFGHEIIMKKYMDSFVKVQNMLNAMDLVSVQIFGEFAGGGIQKGVDYGDKDFYVFDILSDSGNEKVYWDDYRVESFCTTVGLKLAPLLGRGSFAELSQYPNDFKSLVNRYNELVDTVGLEMANKHVFGPQASSETGLAEGYVLKPVYPIFLNTGTRVAIKCKNSKFSEKAKKDSPISAKVELTENDKRLLEIFSEYVTWNRVSNVLSHIGSVTAKDFGRVSGLTMKDIINEAAREGHDLLFADNPSAVLKELTGLIQNTIRSKWHEVLE

SEQ ID NO: 1705 - DNA, 1038 bp, synthetic construct
  misc_feature 1..1038: note = variant of RNA ligase 2 from Klebsiella phage KP179
  source 1..1038: mol_type = other DNA
atgcatcaccatcaccatcacggtggctttaacatgtttgcgtattattcaagtctggaaaaccattacaatgctaagttcattgagaagatccgtgtcgcaggcttcatggtgcacaccgtggaatgggtagctcgcgagaagattcatggaacgaactttagcgttatcattactccgaccgaaatcgtcccagccaaacgcacagggccgatcttggaaggcgagtcgttctttggtcacgaaattatcatgaaaaaatatatggactccttcgtgaaggtgcagaacatgctgaatgccatggatcttgttagcgtgcaaatctttggcgaatttgcgggtggtggcattcagaaaggcgtcgattacggagacaaagatttctatgtgtttgacatcctgtctgatagcgggaacgagaaagtttactgggatgactatcgcgtcgaatcgttttgcaccactgtgggtctgaaattagcgcctctgctgggacgtggtagtttcgctgaactgtcccagtacccaaacgatttcaaaagcctggtgaaccgttataatgaattggttgacacggtcggcctggagatggccaataaacacgtctttggtccgcaagcgtcttctgaaactggcctggcagaaggctacgttcttaaacccgtctatccgatcttctttaataccggtacgcgcgtggcgattaaatgcaagaactccaaattttcggagaaagccaagttggacagcccaattagtgcgaaggttgaactgacggagaacgataaacgtctgctcgaaatctttagcgagtatgttacctggaatcgcgtcagtaacgtactgtcacatattggctcagtgaccgcaaaagattttgggcgtgtttcgggtctgacgatgaaagacatcattaatgaagcagcacgcgaaggccatgatctgttgttcgctgataacccgtcggcggtgctgaaggagctgactggcctcatccagaacacgattcgctccaaatggcacgaagttctggag

SEQ ID NO: 1706 - protein, 346 aa, synthetic construct
  REGION 1..346: note = variant of RNA ligase 2 from Klebsiella phage KP179
MHHHHHHGGFNMFAYYSSLENHYNAKFIEKIRVAGFMVHTVEWVAREKIHGTNFSVIITPTEIVPAKRTGPILEGESFFGHEIIMKKYMDSFVKVQNMLNAMDLVSVQIFGEFAGGGIQKGVDYGDKDFYVFDILSDSGNEKVYWDDYRVESFCTTVGLKLAPLLGRGSFAELSQYPNDFKSLVNRYNELVDTVGLEMANKHVFGPQASSETGLAEGYVLKPVYPIFFNTGTRVAIKCKNSKFSEKAKLDSPISAKVELTENDKRLLEIFSEYVTWNRVSNVLSHIGSVTAKDFGRVSGLTMKDIINEAAREGHDLLFADNPSAVLKELTGLIQNTIRSKWHEVLE

SEQ ID NO: 1707 - DNA, 1038 bp, synthetic construct
  misc_feature 1..1038: note = variant of RNA ligase 2 from Klebsiella phage KP179
  source 1..1038: mol_type = other DNA
atgcatcaccatcaccatcacggtggctttaacatgtttgcgtattattcaagtctggaaaaccattacaatgctaagttcattgagaagatccgtgtcgcaggcttcatggtgcacaccgtggaatgggtagctcgcgagaagattcatggaacgaactttagcgttatcattactccgaccgaaatcgtcccagccaaacgcacagggccgatcttggaaggcgagtcgttctttggtcacgaaattatcatgaaaaaatatatggactccttcgtgaaggtgcagaacatgctgaatgccatggatcttgttagcgtgcaaatctttggcgaatttgcgggtggtggcattcagaaaggcgtcgattacggagacaaagatttctatgtgtttgacatcctgtctgatagcgggaacgagaaagtttactgggatgactatcgcgtcgaatcgttttgcaccactgtgggtctgaaattagcgcctctgctgggacgtggtagtttcgctgaactgtcccagtacccaaacgatttcaaaagcctggtgaaccgttataatgaattggttgacacggtcggcctggagatggccaataaacacgtctttggtccgcaagcgtcttctgaaactggcctggcagaaggctacgttcttaaacccgtctatccgatcttcttaaataccggtacgcgcgtggcgattaaatgcaagaactccaaattttcggagaaagccaagaaagacagcccaattagtgcgaaggttgaactgacggagaacgataaacgtctgctcgaaatctttagcgagtatgttacctggaatcgcgtcagtaacgtactgtcacatattggctcagtgaccgcaaaagattttgggcgtgtttcgggtctgacgatgaaagacatcattaatgaagcagcacgcgaaggccatgatctgttgttcgctgataacccgtcggcggtgctgaaggagctgactggcctcatccagaacacgattcgctccaaatggcacgaagttctggag

SEQ ID NO: 1708 - protein, 346 aa, synthetic construct
  REGION 1..346: note = variant of RNA ligase 2 from Klebsiella phage KP179
MHHHHHHGGFNMFAYYSSLENHYNAKFIEKIRVAGFMVHTVEWVAREKIHGTNFSVIITPTEIVPAKRTGPILEGESFFGHEIIMKKYMDSFVKVQNMLNAMDLVSVQIFGEFAGGGIQKGVDYGDKDFYVFDILSDSGNEKVYWDDYRVESFCTTVGLKLAPLLGRGSFAELSQYPNDFKSLVNRYNELVDTVGLEMANKHVFGPQASSETGLAEGYVLKPVYPIFLNTGTRVAIKCKNSKFSEKAKKDSPISAKVELTENDKRLLEIFSEYVTWNRVSNVLSHIGSVTAKDFGRVSGLTMKDIINEAAREGHDLLFADNPSAVLKELTGLIQNTIRSKWHEVLE

SEQ ID NO: 1709 - DNA, 1038 bp, synthetic construct
  misc_feature 1..1038: note = variant of RNA ligase 2 from Klebsiella phage KP179
  source 1..1038: mol_type = other DNA
atgcatcaccatcaccatcacggtggctttaacatgtttgcgtattattcaagtctggaaaaccattacaatgctaagttcattgagaagatccgtgtcgcaggcttcatggtgcacaccgtggaatgggtagctcgcgagaagattcatggaacgaactttagcgttatcattactccgaccgaaatcgtcccagccaaacgcacagggccgatcttggaaggcgagtcgttctttggtcacgaaattatcatgaaaaaatatatggactccttcgtgaaggtgcagaacatgctgaatgccatggatcttgttagcgtgcaaatctttggcgaatttgcgggtggtggcattcagaaaggcgtcgattacggagacaaagatttctatgtgtttgacatcctgtctgatagcgggaacgagaaagtttactgggatgactatcgcgtcgaatcgttttgcaccactgtgggtctgaaattagcgcctctgctgggacgtggtagtttcgctgaactgtcccagtacccaaacgatttcaaaagcctggtgaaccgttataatgaattggttgacacggtcggcctggagatggccaataaacacgtctttggtccgcaagcgtcttctgaaactggcctggcagaaggctacgttcttaaacccgtctatccgatcttctttaataccggtacgcgcgtggcgattaaatgcaagaactccaaattttcggagaaagccaagaaagacagcccaattagtgcgaaggttgaactgacggagaacgataaacgtctgctcgaaatctttagcgagtatgttacctggaatcgcgtcagtaacgtactgtcacatattggctcagtgaccgcaaaagattttgggcgtgtttcgggtctgacgatgaaagacatcattaatgaagcagcacgcgaaggccatgatctgttgttcgctgataacccgtcggcggtgctgaaggagctgactggcctcatccagaacacgattcgctccaaatggcacgaagttctggag

SEQ ID NO: 1710 - protein, 346 aa, synthetic construct
  REGION 1..346: note = variant of RNA ligase 2 from Klebsiella phage KP179
MHHHHHHGGFNMFAYYSSLENHYNAKFIEKIRVAGFMVHTVEWVAREKIHGTNFSVIITPTEIVPAKRTGPILEGESFFGHEIIMKKYMDSFVKVQNMLNAMDLVSVQIFGEFAGGGIQKGVDYGDKDFYVFDILSDSGNEKVYWDDYRVESFCTTVGLKLAPLLGRGSFAELSQYPNDFKSLVNRYNELVDTVGLEMANKHVFGPQASSETGLAEGYVLKPVYPIFFNTGTRVAIKCKNSKFSEKAKKDSPISAKVELTENDKRLLEIFSEYVTWNRVSNVLSHIGSVTAKDFGRVSGLTMKDIINEAAREGHDLLFADNPSAVLKELTGLIQNTIRSKWHEVLE

SEQ ID NO: 1711 - DNA, 1038 bp, synthetic construct
  misc_feature 1..1038: note = variant of RNA ligase 2 from Klebsiella phage KP179
  source 1..1038: mol_type = other DNA
atgcatcaccatcaccatcacggtggctttaacatgtttgcgtattattcaagtctggaaaaccattacaatgctaagttcattgagaagatccgtggcgcaggcttcctgatgcacaccgtggaatgggtagctcgcgagaagattcatggaacgaactttagcgttatcattactccgaccgaaatcgtcccagccaaacgcacagggccgatcttggaaggcgagtcgttctttggtcacgaaattatcatgaaaaaatatatggactccttcgtgaaggtgcagaacatgctgaatgccatggatcttgttagcgtgcaaatctttggcgaatttgcgggtggtggcattcagaaaggcgtcgattacggagacaaagatttctatgtgtttgacatcctgtctgatagcgggaacgagaaagtttactgggatgactatcgcgtcgaatcgttttgcaccactgtgggtctgaaattagcgcctctgctgggacgtggtagtttcgctgaactgtcccagtacccaaacgatttcaaaagcctggtgaaccgttataatgaattggttgacacggtcggcctggagatggccaataaacacgtctttggtccgcaagcgtcttctgaaactggcctggcagaaggctacgttcttaaacccgtctatccgatcttctttaataccggtacgcgcgtggcgattaaatgcaagaactccaaattttcggagaaagccaagaaagacagcccaattagtgcgaaggttgaactgacggagaacgataaacgtctgctcgaaatctttagcgagtatgttacctggaatcgcgtcagtaacgtactgtcacatattggctcagtgaccgcaaaagattttgggcgtgtttcgggtctgacgatgaaagacatcattaatgaagcagcacgcgaaggccatgatctgttgttcgctgataacccgtcggcggtgctgaaggagctgactggcctcatccagaacacgattcgctccaaatggcacgaagttctggag

SEQ ID NO: 1712 - protein, 346 aa, synthetic construct
  REGION 1..346: note = variant of RNA ligase 2 from Klebsiella phage KP179
MHHHHHHGGFNMFAYYSSLENHYNAKFIEKIRGAGFLMHTVEWVAREKIHGTNFSVIITPTEIVPAKRTGPILEGESFFGHEIIMKKYMDSFVKVQNMLNAMDLVSVQIFGEFAGGGIQKGVDYGDKDFYVFDILSDSGNEKVYWDDYRVESFCTTVGLKLAPLLGRGSFAELSQYPNDFKSLVNRYNELVDTVGLEMANKHVFGPQASSETGLAEGYVLKPVYPIFFNTGTRVAIKCKNSKFSEKAKKDSPISAKVELTENDKRLLEIFSEYVTWNRVSNVLSHIGSVTAKDFGRVSGLTMKDIINEAAREGHDLLFADNPSAVLKELTGLIQNTIRSKWHEVLE

SEQ ID NO: 1713 - DNA, 1038 bp, synthetic construct
  misc_feature 1..1038: note = variant of RNA ligase 2 from Klebsiella phage KP179
  source 1..1038: mol_type = other DNA
atgcatcaccatcaccatcacggtggctttaacatgtttgcgtattattcaagtctggaaaaccattacaatgctaagttcattgagaagatccgtggcgcaggcttcctgatgcacaccgtggaatgggtagctcgcgagaagattcatggaacgaactttagcgttatcattactccgaccgaaatcgtcccagccaaacgcacagggccgatcttggaaggcgagtcgttctttggtcacgaaattatcatgaaaaaatatatggactccttcgtgaaggtgcagaacatgctgaatgccatggatcttgttagcgtgcaaatctttggcgaatttgcgggtggtggcattcagaaaggcgtcgattacggagacaaagatttctatgtgtttgacatcctgtctgatagcgggaacgagaaagtttactgggatgactatcgcgtcgaatcgttttgcaccactgtgggtctgaaattagcgcctctgctgggacgtggtagtttcgctgaactgtcccagtacccaaacgatttcaaaagcctggtgaaccgttataatgaattggttgacacggtcggcctggagatggccaataaacacgtctttggtccgcaagcgtcttctgaaactggcctggcagaaggctacgttcttaaacccgtctatccgatcttctttaataccggtacgcgcgtggcgattaaatgcaagaactccaaattttcggagaaagccaagtcggacagcccaattagtgcgaaggttgaactgacggagaacgataaacgtctgctcgaaatctttagcgagtatgttacctggaatcgcgtcagtaacgtactgtcacatattggctcagtgaccgcaaaagattttgggcgtgtttcgggtctgacgatgaaagacatcattaatgaagcagcacgcgaaggccatgatctgttgttcgctgataacccgtcggcggtgctgaaggagctgactggcctcatccagaacacgattcgctccaaatggcacgaagttctggag

SEQ ID NO: 1714 - protein, 346 aa, synthetic construct
  REGION 1..346: note = variant of RNA ligase 2 from Klebsiella phage KP179
MHHHHHHGGFNMFAYYSSLENHYNAKFIEKIRGAGFLMHTVEWVAREKIHGTNFSVIITPTEIVPAKRTGPILEGESFFGHEIIMKKYMDSFVKVQNMLNAMDLVSVQIFGEFAGGGIQKGVDYGDKDFYVFDILSDSGNEKVYWDDYRVESFCTTVGLKLAPLLGRGSFAELSQYPNDFKSLVNRYNELVDTVGLEMANKHVFGPQASSETGLAEGYVLKPVYPIFFNTGTRVAIKCKNSKFSEKAKSDSPISAKVELTENDKRLLEIFSEYVTWNRVSNVLSHIGSVTAKDFGRVSGLTMKDIINEAAREGHDLLFADNPSAVLKELTGLIQNTIRSKWHEVLE

SEQ ID NO: 1715 - DNA, 1038 bp, synthetic construct
  misc_feature 1..1038: note = variant of RNA ligase 2 from Klebsiella phage KP179
  source 1..1038: mol_type = other DNA
atgcatcaccatcaccatcacggtggctttaacatgtttgcgtattattcaagtctggaaaaccattacaatgctaagttcattgagaagatccgtggtgcaggcttcatgatgcacaccgtggaatgggtagctcgcgagaagattcatggaacgaactttagcgttatcattactccgaccgaaatcgtcccagccaaacgcacagggccgatcttggaaggcgagtcgttctttggtcacgaaattatcatgaaaaaatatatggactccttcgtgaaggtgcagaacatgctgaatgccatggatcttgttagcgtgcaaatctttggcgaatttgcgggtggtggcattcagaaaggcgtcgattacggagacaaagatttctatgtgtttgacatcctgtctgatagcgggaacgagaaagtttactgggatgactatcgcgtcgaatcgttttgcaccactgtgggtctgaaattagcgcctctgctgggacgtggtagtttcgctgaactgtcccagtacccaaacgatttcaaaagcctggtgaaccgttataatgaattggttgacacggtcggcctggagatggccaataaacacgtctttggtccgcaagcgtcttctgaaactggcctggcagaaggctacgttcttaaacccgtctatccgatcttctttaataccggtacgcgcgtggcgattaaatgcaagaactccaaattttcggagaaagccaagttggacagcccaattagtgcgaaggttgaactgacggagaacgataaacgtctgctcgaaatctttagcgagtatgttacctggaatcgcgtcagtaacgtactgtcacatattggctcagtgaccgcaaaagattttgggcgtgtttcgggtctgacgatgaaagacatcattaatgaagcagcacgcgaaggccatgatctgttgttcgctgataacccgtcggcggtgctgaaggagctgactggcctcatccagaacacgattcgctccaaatggcacgaagttctggag

SEQ ID NO: 1716 - protein, 346 aa, synthetic construct
  REGION 1..346: note = variant of RNA ligase 2 from Klebsiella phage KP179
MHHHHHHGGFNMFAYYSSLENHYNAKFIEKIRGAGFMMHTVEWVAREKIHGTNFSVIITPTEIVPAKRTGPILEGESFFGHEIIMKKYMDSFVKVQNMLNAMDLVSVQIFGEFAGGGIQKGVDYGDKDFYVFDILSDSGNEKVYWDDYRVESFCTTVGLKLAPLLGRGSFAELSQYPNDFKSLVNRYNELVDTVGLEMANKHVFGPQASSETGLAEGYVLKPVYPIFFNTGTRVAIKCKNSKFSEKAKLDSPISAKVELTENDKRLLEIFSEYVTWNRVSNVLSHIGSVTAKDFGRVSGLTMKDIINEAAREGHDLLFADNPSAVLKELTGLIQNTIRSKWHEVLE

SEQ ID NO: 1717 - DNA, 1038 bp, synthetic construct
  misc_feature 1..1038: note = variant of RNA ligase 2 from Klebsiella phage KP179
  source 1..1038: mol_type = other DNA
atgcatcaccatcaccatcacggtggctttaacatgtttgcgtattattcaagtctggaaaaccattacaatgctaagttcattgagaagatccgtggcgcaggcttcatgatgcacaccgtggaatgggtagctcgcgagaagattcatggaacgaactttagcgttatcattactccgaccgaaatcgtcccagccaaacgcacagggccgatcttggaaggcgagtcgttctttggtcacgaaattatcatgaaaaaatatatggactccttcgtgaaggtgcagaacatgctgaatgccatggatcttgttagcgtgcaaatctttggcgaatttgcgggtggtggcattcagaaaggcgtcgattacggagacaaagatttctatgtgtttgacatcctgtctgatagcgggaacgagaaagtttactgggatgactatcgcgtcgaatcgttttgcaccactgtgggtctgaaattagcgcctctgctgggacgtggtagtttcgctgaactgtcccagtacccaaacgatttcaaaagcctggtgaaccgttataatgaattggttgacacggtcggcctggagatggccaataaacacgtctttggtccgcaagcgtcttctgaaactggcctggcagaaggctacgttcttaaacccgtctatccgatcttcttaaataccggtacgcgcgtggcgattaaatgcaagaactccaaattttcggagaaagccaagttggacagcccaattagtgcgaaggttgaactgacggagaacgataaacgtctgctcgaaatctttagcgagtatgttacctggaatcgcgtcagtaacgtactgtcacatattggctcagtgaccgcaaaagattttgggcgtgtttcgggtctgacgatgaaagacatcattaatgaagcagcacgcgaaggccatgatctgttgttcgctgataacccgtcggcggtgctgaaggagctgactggcctcatccagaacacgattcgctccaaatggcacgaagttctggag

SEQ ID NO: 1718 - protein, 346 aa, synthetic construct
  REGION 1..346: note = variant of RNA ligase 2 from Klebsiella phage KP179
MHHHHHHGGFNMFAYYSSLENHYNAKFIEKIRGAGFMMHTVEWVAREKIHGTNFSVIITPTEIVPAKRTGPILEGESFFGHEIIMKKYMDSFVKVQNMLNAMDLVSVQIFGEFAGGGIQKGVDYGDKDFYVFDILSDSGNEKVYWDDYRVESFCTTVGLKLAPLLGRGSFAELSQYPNDFKSLVNRYNELVDTVGLEMANKHVFGPQASSETGLAEGYVLKPVYPIFLNTGTRVAIKCKNSKFSEKAKLDSPISAKVELTENDKRLLEIFSEYVTWNRVSNVLSHIGSVTAKDFGRVSGLTMKDIINEAAREGHDLLFADNPSAVLKELTGLIQNTIRSKWHEVLE

SEQ ID NO: 1719 - DNA, 1038 bp, synthetic construct
  misc_feature 1..1038: note = variant of RNA ligase 2 from Klebsiella phage KP179
  source 1..1038: mol_type = other DNA
atgcatcaccatcaccatcacggtggctttaacatgtttgcgtattattcaagtctggaaaaccattacaatgctaagttcattgagaagatccgtggtgcaggcttcatgatgcacaccgtggaatgggtagctcgcgagaagattcatggaacgaactttagcgttatcattactccgaccgaaatcgtcccagccaaacgcacagggccgatcttggaaggcgagtcgttctttggtcacgaaattatcatgaaaaaatatatggactccttcgtgaaggtgcagaacatgctgaatgccatggatcttgttagcgtgcaaatctttggcgaatttgcgggtggtggcattcagaaaggcgtcgattacggagacaaagatttctatgtgtttgacatcctgtctgatagcgggaacgagaaagtttactgggatgactatcgcgtcgaatcgttttgcaccactgtgggtctgaaattagcgcctctgctgggacgtggtagtttcgctgaactgtcccagtacccaaacgatttcaaaagcctggtgaaccgttataatgaattggttgacacggtcggcctggagatggccaataaacacgtctttggtccgcaagcgtcttctgaaactggcctggcagaaggctacgttcttaaacccgtctatccgatcttcttaaataccggtacgcgcgtggcgattaaatgcaagaactccaaattttcggagaaagccaagaaagacagcccaattagtgcgaaggttgaactgacggagaacgataaacgtctgctcgaaatctttagcgagtatgttacctggaatcgcgtcagtaacgtactgtcacatattggctcagtgaccgcaaaagattttgggcgtgtttcgggtctgacgatgaaagacatcattaatgaagcagcacgcgaaggccatgatctgttgttcgctgataacccgtcggcggtgctgaaggagctgactggcctcatccagaacacgattcgctccaaatggcacgaagttctggag

SEQ ID NO: 1720 - protein, 346 aa, synthetic construct
  REGION 1..346: note = variant of RNA ligase 2 from Klebsiella phage KP179
MHHHHHHGGFNMFAYYSSLENHYNAKFIEKIRGAGFMMHTVEWVAREKIHGTNFSVIITPTEIVPAKRTGPILEGESFFGHEIIMKKYMDSFVKVQNMLNAMDLVSVQIFGEFAGGGIQKGVDYGDKDFYVFDILSDSGNEKVYWDDYRVESFCTTVGLKLAPLLGRGSFAELSQYPNDFKSLVNRYNELVDTVGLEMANKHVFGPQASSETGLAEGYVLKPVYPIFLNTGTRVAIKCKNSKFSEKAKKDSPISAKVELTENDKRLLEIFSEYVTWNRVSNVLSHIGSVTAKDFGRVSGLTMKDIINEAAREGHDLLFADNPSAVLKELTGLIQNTIRSKWHEVLE

SEQ ID NO: 1721 - DNA, 1038 bp, synthetic construct
  misc_feature 1..1038: note = variant of RNA ligase 2 from Klebsiella phage KP179
  source 1..1038: mol_type = other DNA
atgcatcaccatcaccatcacggtggctttaacatgtttgcgtattattcaagtctggaaaaccattacaatgctaagttcattgagaagatccgtggtgcaggcttcatgatgcacaccgtggaatgggtagctcgcgagaagattcatggaacgaactttagcgttatcattactccgaccgaaatcgtcccagccaaacgcacagggccgatcttggaaggcgagtcgttctttggtcacgaaattatcatgaaaaaatatatggactccttcgtgaaggtgcagaacatgctgaatgccatggatcttgttagcgtgcaaatctttggcgaatttgcgggtggtggcattcagaaaggcgtcgattacggagacaaagatttctatgtgtttgacatcctgtctgatagcgggaacgagaaagtttactgggatgactatcgcgtcgaatcgttttgcaccactgtgggtctgaaattagcgcctctgctgggacgtggtagtttcgctgaactgtcccagtacccaaacgatttcaaaagcctggtgaaccgttataatgaattggttgacacggtcggcctggagatggccaataaacacgtctttggtccgcaagcgtcttctgaaactggcctggcagaaggctacgttcttaaacccgtctatccgatcttctttaataccggtacgcgcgtggcgattaaatgcaagaactccaaattttcggagaaagccaagaaagacagcccaattagtgcgaaggttgaactgacggagaacgataaacgtctgctcgaaatctttagcgagtatgttacctggaatcgcgtcagtaacgtactgtcacatattggctcagtgaccgcaaaagattttgggcgtgtttcgggtctgacgatgaaagacatcattaatgaagcagcacgcgaaggccatgatctgttgttcgctgataacccgtcggcggtgctgaaggagctgactggcctcatccagaacacgattcgctccaaatggcacgaagttctggag

SEQ ID NO: 1722 - protein, 346 aa, synthetic construct
  REGION 1..346: note = variant of RNA ligase 2 from Klebsiella phage KP179
MHHHHHHGGFNMFAYYSSLENHYNAKFIEKIRGAGFMMHTVEWVAREKIHGTNFSVIITPTEIVPAKRTGPILEGESFFGHEIIMKKYMDSFVKVQNMLNAMDLVSVQIFGEFAGGGIQKGVDYGDKDFYVFDILSDSGNEKVYWDDYRVESFCTTVGLKLAPLLGRGSFAELSQYPNDFKSLVNRYNELVDTVGLEMANKHVFGPQASSETGLAEGYVLKPVYPIFFNTGTRVAIKCKNSKFSEKAKKDSPISAKVELTENDKRLLEIFSEYVTWNRVSNVLSHIGSVTAKDFGRVSGLTMKDIINEAAREGHDLLFADNPSAVLKELTGLIQNTIRSKWHEVLE

SEQ ID NO: 1723 - DNA, 1038 bp, synthetic construct
  misc_feature 1..1038: note = variant of RNA ligase 2 from Klebsiella phage KP179
  source 1..1038: mol_type = other DNA
atgcatcaccatcaccatcacggtggctttaacatgtttgcgtattattcaagtctggaaaaccattacaatgctaagttcattgagaagatccgtggcgcaggcttcatggcgcacaccgtggaatgggtagctcgcgagaagattcatggaacgaactttagcgttatcattactccgaccgaaatcgtcccagccaaacgcacagggccgatcttggaaggcgagtcgttctttggtcacgaaattatcatgaaaaaatatatggactccttcgtgaaggtgcagaacatgctgaatgccatggatcttgttagcgtgcaaatctttggcgaatttgcgggtggtggcattcagaaaggcgtcgattacggagacaaagatttctatgtgtttgacatcctgtctgatagcgggaacgagaaagtttactgggatgactatcgcgtcgaatcgttttgcaccactgtgggtctgaaattagcgcctctgctgggacgtggtagtttcgctgaactgtcccagtacccaaacgatttcaaaagcctggtgaaccgttataatgaattggttgacacggtcggcctggagatggccaataaacacgtctttggtccgcaagcgtcttctgaaactggcctggcagaaggctacgttcttaaacccgtctatccgatcttcttaaataccggtacgcgcgtggcgattaaatgcaagaactccaaattttcggagaaagccaagctggactcgccaattagtgcgaaggttgaactgacggagaacgataaacgtctgctcgaaatctttagcgagtatgttacctggaatcgcgtcagtaacgtactgtcacatattggctcagtgaccgcaaaagattttgggcgtgtttcgggtctgacgatgaaagacatcattaatgaagcagcacgcgaaggccatgatctgttgttcgctgataacccgtcggcggtgctgaaggagctgactggcctcatccagaacacgattcgctccaaatggcacgaagttctggag

SEQ ID NO: 1724 - protein, 346 aa, synthetic construct
  REGION 1..346: note = variant of RNA ligase 2 from Klebsiella phage KP179
MHHHHHHGGFNMFAYYSSLENHYNAKFIEKIRGAGFMAHTVEWVAREKIHGTNFSVIITPTEIVPAKRTGPILEGESFFGHEIIMKKYMDSFVKVQNMLNAMDLVSVQIFGEFAGGGIQKGVDYGDKDFYVFDILSDSGNEKVYWDDYRVESFCTTVGLKLAPLLGRGSFAELSQYPNDFKSLVNRYNELVDTVGLEMANKHVFGPQASSETGLAEGYVLKPVYPIFLNTGTRVAIKCKNSKFSEKAKLDSPISAKVELTENDKRLLEIFSEYVTWNRVSNVLSHIGSVTAKDFGRVSGLTMKDIINEAAREGHDLLFADNPSAVLKELTGLIQNTIRSKWHEVLE

SEQ ID NO: 1725 - DNA, 1038 bp, synthetic construct
  misc_feature 1..1038: note = variant of RNA ligase 2 from Klebsiella phage KP179
  source 1..1038: mol_type = other DNA
atgcatcaccatcaccatcacggtggctttaacatgtttgcgtattattcaagtctggaaaaccattacaatgctaagttcattgagaagatccgtggtgcaggcttcatggcgcacaccgtggaatgggtagctcgcgagaagattcatggaacgaactttagcgttatcattactccgaccgaaatcgtcccagccaaacgcacagggccgatcttggaaggcgagtcgttctttggtcacgaaattatcatgaaaaaatatatggactccttcgtgaaggtgcagaacatgctgaatgccatggatcttgttagcgtgcaaatctttggcgaatttgcgggtggtggcattcagaaaggcgtcgattacggagacaaagatttctatgtgtttgacatcctgtctgatagcgggaacgagaaagtttactgggatgactatcgcgtcgaatcgttttgcaccactgtgggtctgaaattagcgcctctgctgggacgtggtagtttcgctgaactgtcccagtacccaaacgatttcaaaagcctggtgaaccgttataatgaattggttgacacggtcggcctggagatggccaataaacacgtctttggtccgcaagcgtcttctgaaactggcctggcagaaggctacgttcttaaacccgtctatccgatcttcttaaataccggtacgcgcgtggcgattaaatgcaagaactccaaattttcggagaaagccaagaaagacagcccaattagtgcgaaggttgaactgacggagaacgataaacgtctgctcgaaatctttagcgagtatgttacctggaatcgcgtcagtaacgtactgtcacatattggctcagtgaccgcaaaagattttgggcgtgtttcgggtctgacgatgaaagacatcattaatgaagcagcacgcgaaggccatgatctgttgttcgctgataacccgtcggcggtgctgaaggagctgactggcctcatccagaacacgattcgctccaaatggcacgaagttctggag

SEQ ID NO: 1726 - protein, 346 aa, synthetic construct
  REGION 1..346: note = variant of RNA ligase 2 from Klebsiella phage KP179
MHHHHHHGGFNMFAYYSSLENHYNAKFIEKIRGAGFMAHTVEWVAREKIHGTNFSVIITPTEIVPAKRTGPILEGESFFGHEIIMKKYMDSFVKVQNMLNAMDLVSVQIFGEFAGGGIQKGVDYGDKDFYVFDILSDSGNEKVYWDDYRVESFCTTVGLKLAPLLGRGSFAELSQYPNDFKSLVNRYNELVDTVGLEMANKHVFGPQASSETGLAEGYVLKPVYPIFLNTGTRVAIKCKNSKFSEKAKKDSPISAKVELTENDKRLLEIFSEYVTWNRVSNVLSHIGSVTAKDFGRVSGLTMKDIINEAAREGHDLLFADNPSAVLKELTGLIQNTIRSKWHEVLE

SEQ ID NO: 1727 - DNA, 1038 bp, synthetic construct
  misc_feature 1..1038: note = variant of RNA ligase 2 from Klebsiella phage KP179
  source 1..1038: mol_type = other DNA
atgcatcaccatcaccatcacggtggctttaacatgtttgcgtattattcaagtctggaaaaccattacaatgctaagttcattgagaagatccgtggtgcaggcttcatggtgcacaccgtggaatgggtagctcgcgagaagattcatggaacgaactttagcgttatcattactccgaccgaaatcgtcccagccaaacgcacagggccgatcttggaaggcgagtcgttctttggtcacgaaattatcatgaaaaaatatatggactccttcgtgaaggtgcagaacatgctgaatgccatggatcttgttagcgtgcaaatctttggcgaatttgcgggtggtggcattcagaaaggcgtcgattacggagacaaagatttctatgtgtttgacatcctgtctgatagcgggaacgagaaagtttactgggatgactatcgcgtcgaatcgttttgcaccactgtgggtctgaaattagcgcctctgctgggacgtggtagtttcgctgaactgtcccagtacccaaacgatttcaaaagcctggtgaaccgttataatgaattggttgacacggtcggcctggagatggccaataaacacgtctttggtccgcaagcgtcttctgaaactggcctggcagaaggctacgttcttaaacccgtctatccgatcttctttaataccggtacgcgcgtggcgattaaatgcaagaactccaaattttcggagaaagccaagctggactcgccaattagtgcgaaggttgaactgacggagaacgataaacgtctgctcgaaatctttagcgagtatgttacctggaatcgcgtcagtaacgtactgtcacatattggctcagtgaccgcaaaagattttgggcgtgtttcgggtctgacgatgaaagacatcattaatgaagcagcacgcgaaggccatgatctgttgttcgctgataacccgtcggcggtgctgaaggagctgactggcctcatccagaacacgattcgctccaaatggcacgaagttctggag

SEQ ID NO: 1728 - protein, 346 aa, synthetic construct
  REGION 1..346: note = variant of RNA ligase 2 from Klebsiella phage KP179
MHHHHHHGGFNMFAYYSSLENHYNAKFIEKIRGAGFMVHTVEWVAREKIHGTNFSVIITPTEIVPAKRTGPILEGESFFGHEIIMKKYMDSFVKVQNMLNAMDLVSVQIFGEFAGGGIQKGVDYGDKDFYVFDILSDSGNEKVYWDDYRVESFCTTVGLKLAPLLGRGSFAELSQYPNDFKSLVNRYNELVDTVGLEMANKHVFGPQASSETGLAEGYVLKPVYPIFFNTGTRVAIKCKNSKFSEKAKLDSPISAKVELTENDKRLLEIFSEYVTWNRVSNVLSHIGSVTAKDFGRVSGLTMKDIINEAAREGHDLLFADNPSAVLKELTGLIQNTIRSKWHEVLE

SEQ ID NO: 1729 - DNA, 1038 bp, synthetic construct
  misc_feature 1..1038: note = variant of RNA ligase 2 from Klebsiella phage KP179
  source 1..1038: mol_type = other DNA
atgcatcaccatcaccatcacggtggctttaacatgtttgcgtattattcaagtctggaaaaccattacaatgctaagttcattgagaagatccgtggtgcaggcttcatggtgcacaccgtggaatgggtagctcgcgagaagattcatggaacgaactttagcgttatcattactccgaccgaaatcgtcccagccaaacgcacagggccgatcttggaaggcgagtcgttctttggtcacgaaattatcatgaaaaaatatatggactccttcgtgaaggtgcagaacatgctgaatgccatggatcttgttagcgtgcaaatctttggcgaatttgcgggtggtggcattcagaaaggcgtcgattacggagacaaagatttctatgtgtttgacatcctgtctgatagcgggaacgagaaagtttactgggatgactatcgcgtcgaatcgttttgcaccactgtgggtctgaaattagcgcctctgctgggacgtggtagtttcgctgaactgtcccagtacccaaacgatttcaaaagcctggtgaaccgttataatgaattggttgacacggtcggcctggagatggccaataaacacgtctttggtccgcaagcgtcttctgaaactggcctggcagaaggctacgttcttaaacccgtctatccgatcttcttaaataccggtacgcgcgtggcgattaaatgcaagaactccaaattttcggagaaagccaagctggactcgccaattagtgcgaaggttgaactgacggagaacgataaacgtctgctcgaaatctttagcgagtatgttacctggaatcgcgtcagtaacgtactgtcacatattggctcagtgaccgcaaaagattttgggcgtgtttcgggtctgacgatgaaagacatcattaatgaagcagcacgcgaaggccatgatctgttgttcgctgataacccgtcggcggtgctgaaggagctgactggcctcatccagaacacgattcgctccaaatggcacgaagttctggag

SEQ ID NO: 1730 - protein, 346 aa, synthetic construct
  REGION 1..346: note = variant of RNA ligase 2 from Klebsiella phage KP179
MHHHHHHGGFNMFAYYSSLENHYNAKFIEKIRGAGFMVHTVEWVAREKIHGTNFSVIITPTEIVPAKRTGPILEGESFFGHEIIMKKYMDSFVKVQNMLNAMDLVSVQIFGEFAGGGIQKGVDYGDKDFYVFDILSDSGNEKVYWDDYRVESFCTTVGLKLAPLLGRGSFAELSQYPNDFKSLVNRYNELVDTVGLEMANKHVFGPQASSETGLAEGYVLKPVYPIFLNTGTRVAIKCKNSKFSEKAKLDSPISAKVELTENDKRLLEIFSEYVTWNRVSNVLSHIGSVTAKDFGRVSGLTMKDIINEAAREGHDLLFADNPSAVLKELTGLIQNTIRSKWHEVLE

SEQ ID NO: 1731 - DNA, 1038 bp, synthetic construct
  misc_feature 1..1038: note = variant of RNA ligase 2 from Klebsiella phage KP179
  source 1..1038: mol_type = other DNA
atgcatcaccatcaccatcacggtggctttaacatgtttgcgtattattcaagtctggaaaaccattacaatgctaagttcattgagaagatccgtggtgcaggcttcatggtgcacaccgtggaatgggtagctcgcgagaagattcatggaacgaactttagcgttatcattactccgaccgaaatcgtcccagccaaacgcacagggccgatcttggaaggcgagtcgttctttggtcacgaaattatcatgaaaaaatatatggactccttcgtgaaggtgcagaacatgctgaatgccatggatcttgttagcgtgcaaatctttggcgaatttgcgggtggtggcattcagaaaggcgtcgattacggagacaaagatttctatgtgtttgacatcctgtctgatagcgggaacgagaaagtttactgggatgactatcgcgtcgaatcgttttgcaccactgtgggtctgaaattagcgcctctgctgggacgtggtagtttcgctgaactgtcccagtacccaaacgatttcaaaagcctggtgaaccgttataatgaattggttgacacggtcggcctggagatggccaataaacacgtctttggtccgcaagcgtcttctgaaactggcctggcagaaggctacgttcttaaacccgtctatccgatcttcttaaataccggtacgcgcgtggcgattaaatgcaagaactccaaattttcggagaaagccaagtcggacagcccaattagtgcgaaggttgaactgacggagaacgataaacgtctgctcgaaatctttagcgagtatgttacctggaatcgcgtcagtaacgtactgtcacatattggctcagtgaccgcaaaagattttgggcgtgtttcgggtctgacgatgaaagacatcattaatgaagcagcacgcgaaggccatgatctgttgttcgctgataacccgtcggcggtgctgaaggagctgactggcctcatccagaacacgattcgctccaaatggcacgaagttctggag

SEQ ID NO: 1732 - protein, 346 aa, synthetic construct
  REGION 1..346: note = variant of RNA ligase 2 from Klebsiella phage KP179
MHHHHHHGGFNMFAYYSSLENHYNAKFIEKIRGAGFMVHTVEWVAREKIHGTNFSVIITPTEIVPAKRTGPILEGESFFGHEIIMKKYMDSFVKVQNMLNAMDLVSVQIFGEFAGGGIQKGVDYGDKDFYVFDILSDSGNEKVYWDDYRVESFCTTVGLKLAPLLGRGSFAELSQYPNDFKSLVNRYNELVDTVGLEMANKHVFGPQASSETGLAEGYVLKPVYPIFLNTGTRVAIKCKNSKFSEKAKSDSPISAKVELTENDKRLLEIFSEYVTWNRVSNVLSHIGSVTAKDFGRVSGLTMKDIINEAAREGHDLLFADNPSAVLKELTGLIQNTIRSKWHEVLE

SEQ ID NO: 1733 - DNA, 1038 bp, synthetic construct
  misc_feature 1..1038: note = variant of RNA ligase 2 from Klebsiella phage KP179
  source 1..1038: mol_type = other DNA
atgcatcaccatcaccatcacggtggctttaacatgtttgcgtattattcaagtctggaaaaccattacaatgctaagttcattgagaagatccgtggcgcaggcttcctggcgcacaccgtggaatgggtagctcgcgagaagattcatggaacgaactttagcgttatcattactccgaccgaaatcgtcccagccaaacgcacagggccgatcttggaaggcgagtcgttctttggtcacgaaattatcatgaaaaaatatatggactccttcgtgaaggtgcagaacatgctgaatgccatggatcttgttagcgtgcaaatctttggcgaatttgcgggtggtggcattcagaaaggcgtcgattacggagacaaagatttctatgtgtttgacatcctgtctgatagcgggaacgagaaagtttactgggatgactatcgcgtcgaatcgttttgcaccactgtgggtctgaaattagcgcctctgctgggacgtggtagtttcgctgaactgtcccagtacccaaacgatttcaaaagcctggtgaaccgttataatgaattggttgacacggtcggcctggagatggccaataaacacgtctttggtccgcaagcgtcttctgaaactggcctggcagaaggctacgttcttaaacccgtctatccgatcttctttaataccggtacgcgcgtggcgattaaatgcaagaactccaaattttcggagaaagccaagaaagacagcccaattagtgcgaaggttgaactgacggagaacgataaacgtctgctcgaaatctttagcgagtatgttacctggaatcgcgtcagtaacgtactgtcacatattggctcagtgaccgcaaaagattttgggcgtgtttcgggtctgacgatgaaagacatcattaatgaagcagcacgcgaaggccatgatctgttgttcgctgataacccgtcggcggtgctgaaggagctgactggcctcatccagaacacgattcgctccaaatggcacgaagttctggag

SEQ ID NO: 1734 - protein, 346 aa, synthetic construct
  REGION 1..346: note = variant of RNA ligase 2 from Klebsiella phage KP179
MHHHHHHGGFNMFAYYSSLENHYNAKFIEKIRGAGFLAHTVEWVAREKIHGTNFSVIITPTEIVPAKRTGPILEGESFFGHEIIMKKYMDSFVKVQNMLNAMDLVSVQIFGEFAGGGIQKGVDYGDKDFYVFDILSDSGNEKVYWDDYRVESFCTTVGLKLAPLLGRGSFAELSQYPNDFKSLVNRYNELVDTVGLEMANKHVFGPQASSETGLAEGYVLKPVYPIFFNTGTRVAIKCKNSKFSEKAKKDSPISAKVELTENDKRLLEIFSEYVTWNRVSNVLSHIGSVTAKDFGRVSGLTMKDIINEAAREGHDLLFADNPSAVLKELTGLIQNTIRSKWHEVLE

SEQ ID NO: 1735 - DNA, 1038 bp, synthetic construct
  misc_feature 1..1038: note = variant of RNA ligase 2 from Klebsiella phage KP179
  source 1..1038: mol_type = other DNA
atgcatcaccatcaccatcacggtggctttaacatgtttgcgtattattcaagtctggaaaaccattacaatgctaagttcattgagaagatccgtggtgcaggcttcctggtgcacaccgtggaatgggtagctcgcgagaagattcatggaacgaactttagcgttatcattactccgaccgaaatcgtcccagccaaacgcacagggccgatcttggaaggcgagtcgttctttggtcacgaaattatcatgaaaaaatatatggactccttcgtgaaggtgcagaacatgctgaatgccatggatcttgttagcgtgcaaatctttggcgaatttgcgggtggtggcattcagaaaggcgtcgattacggagacaaagatttctatgtgtttgacatcctgtctgatagcgggaacgagaaagtttactgggatgactatcgcgtcgaatcgttttgcaccactgtgggtctgaaattagcgcctctgctgggacgtggtagtttcgctgaactgtcccagtacccaaacgatttcaaaagcctggtgaaccgttataatgaattggttgacacggtcggcctggagatggccaataaacacgtctttggtccgcaagcgtcttctgaaactggcctggcagaaggctacgttcttaaacccgtctatccgatcttctttaataccggtacgcgcgtggcgattaaatgcaagaactccaaattttcggagaaagccaagctggactcgccaattagtgcgaaggttgaactgacggagaacgataaacgtctgctcgaaatctttagcgagtatgttacctggaatcgcgtcagtaacgtactgtcacatattggctcagtgaccgcaaaagattttgggcgtgtttcgggtctgacgatgaaagacatcattaatgaagcagcacgcgaaggccatgatctgttgttcgctgataacccgtcggcggtgctgaaggagctgactggcctcatccagaacacgattcgctccaaatggcacgaagttctggag

SEQ ID NO: 1736 - protein, 346 aa, synthetic construct
  REGION 1..346: note = variant of RNA ligase 2 from Klebsiella phage KP179
MHHHHHHGGFNMFAYYSSLENHYNAKFIEKIRGAGFLVHTVEWVAREKIHGTNFSVIITPTEIVPAKRTGPILEGESFFGHEIIMKKYMDSFVKVQNMLNAMDLVSVQIFGEFAGGGIQKGVDYGDKDFYVFDILSDSGNEKVYWDDYRVESFCTTVGLKLAPLLGRGSFAELSQYPNDFKSLVNRYNELVDTVGLEMANKHVFGPQASSETGLAEGYVLKPVYPIFFNTGTRVAIKCKNSKFSEKAKLDSPISAKVELTENDKRLLEIFSEYVTWNRVSNVLSHIGSVTAKDFGRVSGLTMKDIINEAAREGHDLLFADNPSAVLKELTGLIQNTIRSKWHEVLE

SEQ ID NO: 1737 - DNA, 1038 bp, synthetic construct
  misc_feature 1..1038: note = variant of RNA ligase 2 from Klebsiella phage KP179
  source 1..1038: mol_type = other DNA
atgcatcaccatcaccatcacggtggctttaacatgtttgcgtattattcaagtctggaaaaccattacaatgctaagttcattgagaagatccgtggtgcaggcttcctggtgcacaccgtggaatgggtagctcgcgagaagattcatggaacgaactttagcgttatcattactccgaccgaaatcgtcccagccaaacgcacagggccgatcttggaaggcgagtcgttctttggtcacgaaattatcatgaaaaaatatatggactccttcgtgaaggtgcagaacatgctgaatgccatggatcttgttagcgtgcaaatctttggcgaatttgcgggtggtggcattcagaaaggcgtcgattacggagacaaagatttctatgtgtttgacatcctgtctgatagcgggaacgagaaagtttactgggatgactatcgcgtcgaatcgttttgcaccactgtgggtctgaaattagcgcctctgctgggacgtggtagtttcgctgaactgtcccagtacccaaacgatttcaaaagcctggtgaaccgttataatgaattggttgacacggtcggcctggagatggccaataaacacgtctttggtccgcaagcgtcttctgaaactggcctggcagaaggctacgttcttaaacccgtctatccgatcttcttaaataccggtacgcgcgtggcgattaaatgcaagaactccaaattttcggagaaagccaagctggactcgccaattagtgcgaaggttgaactgacggagaacgataaacgtctgctcgaaatctttagcgagtatgttacctggaatcgcgtcagtaacgtactgtcacatattggctcagtgaccgcaaaagattttgggcgtgtttcgggtctgacgatgaaagacatcattaatgaagcagcacgcgaaggccatgatctgttgttcgctgataacccgtcggcggtgctgaaggagctgactggcctcatccagaacacgattcgctccaaatggcacgaagttctggag

SEQ ID NO: 1738 - protein, 346 aa, synthetic construct
  REGION 1..346: note = variant of RNA ligase 2 from Klebsiella phage KP179
MHHHHHHGGFNMFAYYSSLENHYNAKFIEKIRGAGFLVHTVEWVAREKIHGTNFSVIITPTEIVPAKRTGPILEGESFFGHEIIMKKYMDSFVKVQNMLNAMDLVSVQIFGEFAGGGIQKGVDYGDKDFYVFDILSDSGNEKVYWDDYRVESFCTTVGLKLAPLLGRGSFAELSQYPNDFKSLVNRYNELVDTVGLEMANKHVFGPQASSETGLAEGYVLKPVYPIFLNTGTRVAIKCKNSKFSEKAKLDSPISAKVELTENDKRLLEIFSEYVTWNRVSNVLSHIGSVTAKDFGRVSGLTMKDIINEAAREGHDLLFADNPSAVLKELTGLIQNTIRSKWHEVLE

SEQ ID NO: 1739 - DNA, 1038 bp, synthetic construct
  misc_feature 1..1038: note = variant of RNA ligase 2 from Klebsiella phage KP179
  source 1..1038: mol_type = other DNA
atgcatcaccatcaccatcacggtggctttaacatgtttgcgtattattcaagtctggaaaaccattacaatgctaagttcattgagaagatccgtggtgcaggcttcctggtgcacaccgtggaatgggtagctcgcgagaagattcatggaacgaactttagcgttatcattactccgaccgaaatcgtcccagccaaacgcacagggccgatcttggaaggcgagtcgttctttggtcacgaaattatcatgaaaaaatatatggactccttcgtgaaggtgcagaacatgctgaatgccatggatcttgttagcgtgcaaatctttggcgaatttgcgggtggtggcattcagaaaggcgtcgattacggagacaaagatttctatgtgtttgacatcctgtctgatagcgggaacgagaaagtttactgggatgactatcgcgtcgaatcgttttgcaccactgtgggtctgaaattagcgcctctgctgggacgtggtagtttcgctgaactgtcccagtacccaaacgatttcaaaagcctggtgaaccgttataatgaattggttgacacggtcggcctggagatggccaataaacacgtctttggtccgcaagcgtcttctgaaactggcctggcagaaggctacgttcttaaacccgtctatccgatcttctttaataccggtacgcgcgtggcgattaaatgcaagaactccaaattttcggagaaagccaagtcggacagcccaattagtgcgaaggttgaactgacggagaacgataaacgtctgctcgaaatctttagcgagtatgttacctggaatcgcgtcagtaacgtactgtcacatattggctcagtgaccgcaaaagattttgggcgtgtttcgggtctgacgatgaaagacatcattaatgaagcagcacgcgaaggccatgatctgttgttcgctgataacccgtcggcggtgctgaaggagctgactggcctcatccagaacacgattcgctccaaatggcacgaagttctggag

SEQ ID NO: 1740 - protein, 346 aa, synthetic construct
  REGION 1..346: note = variant of RNA ligase 2 from Klebsiella phage KP179
MHHHHHHGGFNMFAYYSSLENHYNAKFIEKIRGAGFLVHTVEWVAREKIHGTNFSVIITPTEIVPAKRTGPILEGESFFGHEIIMKKYMDSFVKVQNMLNAMDLVSVQIFGEFAGGGIQKGVDYGDKDFYVFDILSDSGNEKVYWDDYRVESFCTTVGLKLAPLLGRGSFAELSQYPNDFKSLVNRYNELVDTVGLEMANKHVFGPQASSETGLAEGYVLKPVYPIFFNTGTRVAIKCKNSKFSEKAKSDSPISAKVELTENDKRLLEIFSEYVTWNRVSNVLSHIGSVTAKDFGRVSGLTMKDIINEAAREGHDLLFADNPSAVLKELTGLIQNTIRSKWHEVLE

SEQ ID NO: 1741 - DNA, 1038 bp, synthetic construct
  misc_feature 1..1038: note = variant of RNA ligase 2 from Klebsiella phage KP179
  source 1..1038: mol_type = other DNA
atgcatcaccatcaccatcacggtggcagcaacatgtttgcgtattattcaagtctggaaaaccattacaatgctaagttcattgagaagatccgtggtgcaggcttcctgatgcacaccgtggaatgggtagctcgcgagaagattcatggaacgaactttagcgttatcattactccgaccgaaatcgtcccagccaaacgcacagggccgatcttggaaggtgagatgttctttggtcacgaaattatcatgaaaaaatatatggactccttcgtgaaggtgcagaacatgctgaatgccatggatcttgttagcgtgcaaatctttggcgaatttgcgggtggtggcattcagaaaggcgtcgattacggagacaaagatttctatgtgtttgacatcctgtctgatagcgggaacgagaaagtttactgggatgactatcgcgtcgaatcgttttgcaccactgtgggtctgaaattagcgcctctgctgggacgtggtagtttcgctgaactgtcccagtacccaaacgatttcaaaagcctggtgaaccgttataatgaattggttgacacggtcggcctggagatggccaataaacacgtctttggtccgcaagcgtcttctgaaactggcctggcagaaggctacgttcttaaacccgtctatccgattttctttaataccggtacgcgcgtggcgattaaatgcaagaactccaaattttcggagaaagccaagctggattcgccaattagttcgaaggttgaactgacggagaacgataaacgtctgctcgaaatctttagcgagtatgttacctggaatcgcgtcagtaacgtactgtcacatattggctcagtgaccgcaaaagattttgggcgtgtttcgggtctgacgatgaaagacatcattaatgaagcagcacgcgaaggccatgatctgttgttcgctgataacccgtcggcggtgctgaaggagctgactggcctcatccagaacacgattcgctccaaatggcacgaagttctggag

SEQ ID NO: 1742 - protein, 346 aa, synthetic construct
  REGION 1..346: note = variant of RNA ligase 2 from Klebsiella phage KP179
MHHHHHHGGSNMFAYYSSLENHYNAKFIEKIRGAGFLMHTVEWVAREKIHGTNFSVIITPTEIVPAKRTGPILEGEMFFGHEIIMKKYMDSFVKVQNMLNAMDLVSVQIFGEFAGGGIQKGVDYGDKDFYVFDILSDSGNEKVYWDDYRVESFCTTVGLKLAPLLGRGSFAELSQYPNDFKSLVNRYNELVDTVGLEMANKHVFGPQASSETGLAEGYVLKPVYPIFFNTGTRVAIKCKNSKFSEKAKLDSPISSKVELTENDKRLLEIFSEYVTWNRVSNVLSHIGSVTAKDFGRVSGLTMKDIINEAAREGHDLLFADNPSAVLKELTGLIQNTIRSKWHEVLE

SEQ ID NO: 1743 - DNA, 1038 bp, synthetic construct
  misc_feature 1..1038: note = variant of RNA ligase 2 from Klebsiella phage KP179
  source 1..1038: mol_type = other DNA
atgcatcaccatcaccatcacggtggcagcaacatgtttgcgtattattcaagtctggaaaaccattacaatgctaagttcattgagaagatccgtggtgcaggcttcctgatgcacaccgtggaatgggtagctcgcgagaagattcatggaacgaactttagcgttatcattactccgaccgaaatcgtcccagccaaacgcacagggccgatcttggaaggtgagatgttctttggtcacgaaattatcatgaaaaaatatatggactccttcgtgaaggtgcagaacatgctgaatgccatggatcttgttagcgtgcaaatctttggcgaatttgcgggtggtggcattcagaaaggcgtcgattacggagacaaagatttctatgtgtttgacatcctgtctgatagcgggaacgagaaagtttactgggatgactatcgcgtcgaatcgttttgcaccactgtgggtctgaaattagcgcctctgctgggacgtggtagtttcgctgaactgtcccagtacccaaacgatttcaaaagcctggtgaaccgttataatgaattggttgacacggtcggcctggagatggccaataaacacgtctttggtccgcaagcgtcttctgaaactggcctggcagaaggctacgttcttaaacccgtctatccgatcttctttaataccggtacgcgcgtggcgattaaatgcaagaactccaaattttcggagaaagccaagctgagctcgccaattagtgcgaaggttgaactgacggagaacgataaacgtctgctcgaaatctttagcgagtatgttacctggaatcgcgtcagtaacgtactgtcacatattggctcagtgaccgcaaaagattttgggcgtgtttcgggtctgacgatgaaagacatcattaatgaagcagcacgcgaaggccatgatctgttgttcgctgataacccgtcggcggtgctgaaggagctgactggcctcatccagaacacgattcgctccaaatggcacgaagttctggag

SEQ ID NO: 1744 - protein, 346 aa, synthetic construct
  REGION 1..346: note = variant of RNA ligase 2 from Klebsiella phage KP179
MHHHHHHGGSNMFAYYSSLENHYNAKFIEKIRGAGFLMHTVEWVAREKIHGTNFSVIITPTEIVPAKRTGPILEGEMFFGHEIIMKKYMDSFVKVQNMLNAMDLVSVQIFGEFAGGGIQKGVDYGDKDFYVFDILSDSGNEKVYWDDYRVESFCTTVGLKLAPLLGRGSFAELSQYPNDFKSLVNRYNELVDTVGLEMANKHVFGPQASSETGLAEGYVLKPVYPIFFNTGTRVAIKCKNSKFSEKAKLSSPISAKVELTENDKRLLEIFSEYVTWNRVSNVLSHIGSVTAKDFGRVSGLTMKDIINEAAREGHDLLFADNPSAVLKELTGLIQNTIRSKWHEVLE

SEQ ID NO: 1745 - DNA, 1038 bp, synthetic construct
  misc_feature 1..1038: note = variant of RNA ligase 2 from Klebsiella phage KP179
  source 1..1038: mol_type = other DNA
atgcatcaccatcaccatcacggtggcagcaacatgtttgcgtattattcaagtctggaaaaccattacaatgctaagttcattgagaagatccgtggtgcaggcttcctgatgcacaccgtggaatgggtagctcgcgagaagattcatggaacgaactttagcgttatcattactccgaccgaaatcgtcccagccaaacgcacagggccgatcttggaaggtgagatgttctttggtcacgaaattatcatgaaaaaatatatggactccttcgtgaaggtgcagaacatgctgaatgccatggatcttgttagcgtgcaaatctttggcgaatttgcgggtggtggcattcagaaaggcgtcgattacggagacaaagatttctatgtgtttgacatcctgtctgatagcgggaacgagaaagtttactgggatgactatcgcgtcgaatcgttttgcaccactgtgggtctgaaattagcgcctctgctgggacgtggtagtttcgctgaactgtcccagtacccaaacgatttcaaaagcctggtgaaccgttataatgaattggttgacacggtcggcctggagatggccaataaacacgtctttggtccgcaagcgtcttctgaaactggcctggcagaaggctacgttcttaaacccgtctatccgatcttctttaataccggtacgcgcgtggcgattaaatgcaagaactccaaattttcggagaaagccaagctgagctcgccaattagttcgaaggttgaactgacggagaacgataaacgtctgctcgaaatctttagcgagtatgttacctggaatcgcgtcagtaacgtactgtcacatattggctcagtgaccgcaaaagattttgggcgtgtttcgggtctgacgatgaaagacatcattaatgaagcagcacgcgaaggccatgatctgttgttcgctgataacccgtcggcggtgctgaaggagctgactggcctcatccagaacacgattcgctccaaatggcacgaagttctggag

SEQ ID NO: 1746 - protein, 346 aa, synthetic construct
  REGION 1..346: note = variant of RNA ligase 2 from Klebsiella phage KP179
MHHHHHHGGSNMFAYYSSLENHYNAKFIEKIRGAGFLMHTVEWVAREKIHGTNFSVIITPTEIVPAKRTGPILEGEMFFGHEIIMKKYMDSFVKVQNMLNAMDLVSVQIFGEFAGGGIQKGVDYGDKDFYVFDILSDSGNEKVYWDDYRVESFCTTVGLKLAPLLGRGSFAELSQYPNDFKSLVNRYNELVDTVGLEMANKHVFGPQASSETGLAEGYVLKPVYPIFFNTGTRVAIKCKNSKFSEKAKLSSPISSKVELTENDKRLLEIFSEYVTWNRVSNVLSHIGSVTAKDFGRVSGLTMKDIINEAAREGHDLLFADNPSAVLKELTGLIQNTIRSKWHEVLE

SEQ ID NO: 1747 - DNA, 1038 bp, synthetic construct
  misc_feature 1..1038: note = variant of RNA ligase 2 from Klebsiella phage KP179
  source 1..1038: mol_type = other DNA
atgcatcaccatcaccatcacggtggcagcaacatgtttgcgtattattcaagtctggaaaaccattacaatgctaagttcattgagaagatccgtggtgcaggcttcctgatgcacaccgtggaatgggtagctcgcgagaagattcatggaacgaactttagcgttatcattactccgaccgaaatcgtcccagccaaacgcacagggccgatcttggaaggtgagatgttctttggtcacgaaattatcatgaaaaaatatatggactccttcgtgaaggtgcagaacatgctgaatgccatggatcttgttagcgtgcaaatctttggcgaatttgcgggtggtggcattcagaaaggcgtcgattacggagacaaagatttctatgtgtttgacatcctgtctgatagcgggaacgagaaagtttactgggatgactatcgcgtcgaatcgttttgcaccactgtgggtctgaaattagcgcctctgctgggacgtggtagtttcgctgaactgtcccagtacccaaacgatttcaaaagcctggtgaaccgttataatgaattggttgacacggtcggcctggagatggccaataaacacgtctttggtccgcaagcgtcttctgaaactggcctggcagaaggctacgttcttaaacccgtctatccgcgcttctttaataccggtacgcgcgtggcgattaaatgcaagaactccaaattttcggagaaagccaagctggactcgccaattagtgcgaaggttgaactgacggagaacgataaacgtctgctcgaaatctttagcgagtatgttacctggaatcgcgtcagtaacgtactgtcacatattggctcagtgaccgcaaaagattttgggcgtgtttcgggtctgacgatgaaagacatcattaatgaagcagcacgcgaaggccatgatctgttgttcgctgataacccgtcggcggtgctgaaggagctgactggcctcatccagaacacgattcgctccaaatggcacgaagttctggag

SEQ ID NO: 1748 - protein, 346 aa, synthetic construct
  REGION 1..346: note = variant of RNA ligase 2 from Klebsiella phage KP179
MHHHHHHGGSNMFAYYSSLENHYNAKFIEKIRGAGFLMHTVEWVAREKIHGTNFSVIITPTEIVPAKRTGPILEGEMFFGHEIIMKKYMDSFVKVQNMLNAMDLVSVQIFGEFAGGGIQKGVDYGDKDFYVFDILSDSGNEKVYWDDYRVESFCTTVGLKLAPLLGRGSFAELSQYPNDFKSLVNRYNELVDTVGLEMANKHVFGPQASSETGLAEGYVLKPVYPRFFNTGTRVAIKCKNSKFSEKAKLDSPISAKVELTENDKRLLEIFSEYVTWNRVSNVLSHIGSVTAKDFGRVSGLTMKDIINEAAREGHDLLFADNPSAVLKELTGLIQNTIRSKWHEVLE

SEQ ID NO: 1749 - DNA, 1038 bp, synthetic construct
  misc_feature 1..1038: note = variant of RNA ligase 2 from Klebsiella phage KP179
  source 1..1038: mol_type = other DNA
atgcatcaccatcaccatcacggtggcagcaacatgtttgcgtattattcaagtctggaaaaccattacaatgctaagttcattgagaagatccgtggtgcaggcttcctgatgcacaccgtggaatgggtagctcgcgagaagattcatggaacgaactttagcgttatcattactccgaccgaaatcgtcccagccaaacgcacagggccgatcttggaaggtgagatgttctttggtcacgaaattatcatgaaaaaatatatggactccttcgtgaaggtgcagaacatgctgaatgccatggatcttgttagcgtgcaaatctttggcgaatttgcgggtggtggcattcagaaaggcgtcgattacggagacaaagatttctatgtgtttgacatcctgtctgatagcgggaacgagaaagtttactgggatgactatcgcgtcgaatcgttttgcaccactgtgggtctgaaattagcgcctctgctgggacgtggtagtttcgctgaactgtcccagtacccaaacgatttcaaaagcctggtgaaccgttataatgaattggttgacacggtcggcctggagatggccaataaacacgtctttggtccgcaagcgtcttctgaaactggcctggcagaaggctacgttcttaaacccgtctatccgcgcttctttaataccggtacgcgcgtggcgattaaatgcaagaactccaaattttcggagaaagccaagctggactcgccaattagttcgaaggttgaactgacggagaacgataaacgtctgctcgaaatctttagcgagtatgttacctggaatcgcgtcagtaacgtactgtcacatattggctcagtgaccgcaaaagattttgggcgtgtttcgggtctgacgatgaaagacatcattaatgaagcagcacgcgaaggccatgatctgttgttcgctgataacccgtcggcggtgctgaaggagctgactggcctcatccagaacacgattcgctccaaatggcacgaagttctggag

SEQ ID NO: 1750 - protein, 346 aa, synthetic construct
  REGION 1..346: note = variant of RNA ligase 2 from Klebsiella phage KP179
MHHHHHHGGSNMFAYYSSLENHYNAKFIEKIRGAGFLMHTVEWVAREKIHGTNFSVIITPTEIVPAKRTGPILEGEMFFGHEIIMKKYMDSFVKVQNMLNAMDLVSVQIFGEFAGGGIQKGVDYGDKDFYVFDILSDSGNEKVYWDDYRVESFCTTVGLKLAPLLGRGSFAELSQYPNDFKSLVNRYNELVDTVGLEMANKHVFGPQASSETGLAEGYVLKPVYPRFFNTGTRVAIKCKNSKFSEKAKLDSPISSKVELTENDKRLLEIFSEYVTWNRVSNVLSHIGSVTAKDFGRVSGLTMKDIINEAAREGHDLLFADNPSAVLKELTGLIQNTIRSKWHEVLE

SEQ ID NO: 1751 - DNA, 1038 bp, synthetic construct
  misc_feature 1..1038: note = variant of RNA ligase 2 from Klebsiella phage KP179
  source 1..1038: mol_type = other DNA
atgcatcaccatcaccatcacggtggcagcaacatgtttgcgtattattcaagtctggaaaaccattacaatgctaagttcattgagaagatccgtggtgcaggcttcctgatgcacaccgtggaatgggtagctcgcgagaagattcatggaacgaactttagcgttatcattactccgaccgaaatcgtcccagccaaacgcacagggccgatcttggaaggtgagatgttctttggtcacgaaattatcatgaaaaaatatatggactccttcgtgaaggtgcagaacatgctgaatgccatggatcttgttagcgtgcaaatctttggcgaatttgcgggtggtggcattcagaaaggcgtcgattacggagacaaagatttctatgtgtttgacatcctgtctgatagcgggaacgagaaagtttactgggatgactatcgcgtcgaatcgttttgcaccactgtgggtctgaaattagcgcctctgctgggacgtggtagtttcgctgaactgtcccagtacccaaacgatttcaaaagcctggtgaaccgttataatgaattggttgacacggtcggcctggagatggccaataaacacgtctttggtccgcaagcgtcttctgaaactggcctggcagaaggctacgttcttaaacccgtctatccgattttctttaatgtgggtacgcgcgtggcgattaaatgcaagaactccaaattttcggagaaagccaagctggactcgccaattagtgcgaaggttgaactgacggagaacgataaacgtctgctcgaaatctttagcgagtatgttacctggaatcgcgtcagtaacgtactgtcacatattggctcagtgaccgcaaaagattttgggcgtgtttcgggtctgacgatgaaagacatcattaatgaagcagcacgcgaaggccatgatctgttgttcgctgataacccgtcggcggtgctgaaggagctgactggcctcatccagaacacgattcgctccaaatggcacgaagttctggag

SEQ ID NO: 1752 - protein, 346 aa, synthetic construct
  REGION 1..346: note = variant of RNA ligase 2 from Klebsiella phage KP179
MHHHHHHGGSNMFAYYSSLENHYNAKFIEKIRGAGFLMHTVEWVAREKIHGTNFSVIITPTEIVPAKRTGPILEGEMFFGHEIIMKKYMDSFVKVQNMLNAMDLVSVQIFGEFAGGGIQKGVDYGDKDFYVFDILSDSGNEKVYWDDYRVESFCTTVGLKLAPLLGRGSFAELSQYPNDFKSLVNRYNELVDTVGLEMANKHVFGPQASSETGLAEGYVLKPVYPIFFNVGTRVAIKCKNSKFSEKAKLDSPISAKVELTENDKRLLEIFSEYVTWNRVSNVLSHIGSVTAKDFGRVSGLTMKDIINEAAREGHDLLFADNPSAVLKELTGLIQNTIRSKWHEVLE

SEQ ID NO: 1753 - DNA, 1038 bp, synthetic construct
  misc_feature 1..1038: note = variant of RNA ligase 2 from Klebsiella phage KP179
  source 1..1038: mol_type = other DNA
atgcatcaccatcaccatcacggtggcagcaacatgtttgcgtattattcaagtctggaaaaccattataatgccaagttcattgaaaagatccgtggtgcaggcttcctgatgcacaccgtggaatgggtagctcgcgagaagattcatggaacgaactttagcgttatcattactccgaccgaaatcgtcccagccaaacgcacagggccgatcttggaaggtgagatgttctttggtcacgaaattatcatgaaaaaatatatggactccttcgtgaaggtgcagaacatgctgaatgccatggatcttgttagcgtgcaaatctttggcgaatttgcgggtggtggcattcagaaaggcgtcgattacggagacaaagatttctatgtgtttgacatcctgtctgatagcgggaacgagaaagtttactgggatgactatcgcgtcgaatcgttttgcaccactgtgggtctgaaattagcgcctctgctgggacgtggtagtttcgctgaactgtcccagtacccaaacgatttcaaaagcctggtgaaccgttataatgaattggttgacacggtcggcctggagatggccaataaacacgtctttggtccgcaagcgtcttctgaaactggcctggcagaaggctacgttcttaaacccgtctatccgattttctttaatgtgggtacgcgcgtggcgattaaatgcaagaactccaaattttcggagaaagccaagctggattcgccaattagttcgaaggttgaactgacggagaacgataaacgtctgctcgaaatctttagcgagtatgttacctggaatcgcgtcagtaacgtactgtcacatattggctcagtgaccgcaaaagattttgggcgtgtttcgggtctgacgatgaaagacatcattaatgaagcagcacgcgaaggccatgatctgttgttcgctgataacccgtcggcggtgctgaaggagctgactggcctcatccagaacacgattcgctccaaatggcacgaagttctggag

SEQ ID NO: 1754 - protein, 346 aa, synthetic construct
  REGION 1..346: note = variant of RNA ligase 2 from Klebsiella phage KP179
MHHHHHHGGSNMFAYYSSLENHYNAKFIEKIRGAGFLMHTVEWVAREKIHGTNFSVIITPTEIVPAKRTGPILEGEMFFGHEIIMKKYMDSFVKVQNMLNAMDLVSVQIFGEFAGGGIQKGVDYGDKDFYVFDILSDSGNEKVYWDDYRVESFCTTVGLKLAPLLGRGSFAELSQYPNDFKSLVNRYNELVDTVGLEMANKHVFGPQASSETGLAEGYVLKPVYPIFFNVGTRVAIKCKNSKFSEKAKLDSPISSKVELTENDKRLLEIFSEYVTWNRVSNVLSHIGSVTAKDFGRVSGLTMKDIINEAAREGHDLLFADNPSAVLKELTGLIQNTIRSKWHEVLE

SEQ ID NO: 1755 - DNA, 1038 bp, synthetic construct
  misc_feature 1..1038: note = variant of RNA ligase 2 from Klebsiella phage KP179
  source 1..1038: mol_type = other DNA
atgcatcaccatcaccatcacggtggcagcaacatgtttgcgtattattcaagtctggaaaaccattacaatgctaagttcattgagaagatccgtggtgcaggcttcctgatgcacaccgtggaatgggtagctcgcgagaagattcatggaacgaactttagcgttatcattactccgaccgaaatcgtcccagccaaacgcacagggccgatcttggaaggcgagtcgttctttggtcacgaaattatcatgaaaaaatatatggactccttcgtgaaggtgcagaacatgctgaatgccatggatcttgttagcgtgcaaatctttggcgaatttgcgggtggtggcattcagaaaggcgtcgattacggagacaaagatttctatgtgtttgacatcctgtctgatagcgggaacgagaaagtttactgggatgactatcgcgtcgaatcgttttgcaccactgtgggtctgaaattagcgcctctgctgggacgtggtagtttcgctgaactgtcccagtacccaaacgatttcaaaagcctggtgaaccgttataatgaattggttgacacggtcggcctggagatggccaataaacacgtctttggtccgcaagcgtcttctgaaactggcctggcagaaggctacgttcttaaacccgtctatccgattttctttaatgtgggtacgcgcgtggcgattaaatgcaagaactccaaattttcggagaaagccaagctggactcgccaattagttcgaaggttgaactgacggagaacgataaacgtctgctcgaaatctttagcgagtatgttacctggaatcgcgtcagtaacgtactgtcacatattggctcagtgaccgcaaaagattttgggcgtgtttcgggtctgacgatgaaagacatcattaatgaagcagcacgcgaaggccatgatctgttgttcgctgataacccgtcggcggtgctgaaggagctgactggcctcatccagaacacgattcgctccaaatggcacgaagttctggag

SEQ ID NO: 1756 - protein, 346 aa, synthetic construct
  REGION 1..346: note = variant of RNA ligase 2 from Klebsiella phage KP179
MHHHHHHGGSNMFAYYSSLENHYNAKFIEKIRGAGFLMHTVEWVAREKIHGTNFSVIITPTEIVPAKRTGPILEGESFFGHEIIMKKYMDSFVKVQNMLNAMDLVSVQIFGEFAGGGIQKGVDYGDKDFYVFDILSDSGNEKVYWDDYRVESFCTTVGLKLAPLLGRGSFAELSQYPNDFKSLVNRYNELVDTVGLEMANKHVFGPQASSETGLAEGYVLKPVYPIFFNVGTRVAIKCKNSKFSEKAKLDSPISSKVELTENDKRLLEIFSEYVTWNRVSNVLSHIGSVTAKDFGRVSGLTMKDIINEAAREGHDLLFADNPSAVLKELTGLIQNTIRSKWHEVLE

SEQ ID NO: 1757 - DNA, 1038 bp, synthetic construct
  misc_feature 1..1038: note = variant of RNA ligase 2 from Klebsiella phage KP179
  source 1..1038: mol_type = other DNA
atgcatcaccatcaccatcacggtggcagcaacatgtttgcgtattattcaagtctggaaaaccattacaatgctaagttcattgagaagatccgtggtgcaggcttcctgatgcacaccgtggaatgggtagctcgcgagaagattcatggaacgaactttagcgttatcattactccgaccgaaatcgtcccagccaaacgcacagggccgatcttggaaggcgagtcgttctttggtcacgaaattatcatgaaaaaatatatggactccttcgtgaaggtgcagaacatgctgaatgccatggatcttgttagcgtgcaaatctttggcgaatttgcgggtggtggcattcagaaaggcgtcgattacggagacaaagatttctatgtgtttgacatcctgtctgatagcgggaacgagaaagtttactgggatgactatcgcgtcgaatcgttttgcaccactgtgggtctgaaattagcgcctctgctgggacgtggtagtttcgctgaactgtcccagtacccaaacgatttcaaaagcctggtgaaccgttataatgaattggttgacacggtcggcctggagatggccaataaacacgtctttggtccgcaagcgtcttctgaaactggcctggcagaaggctacgttcttaaacccgtctatccgattttctttaatgtgggtacgcgcgtggcgattaaatgcaagaactccaaattttcggagaaagccaagctgagctcgccaattagtgcgaaggttgaactgacggagaacgataaacgtctgctcgaaatctttagcgagtatgttacctggaatcgcgtcagtaacgtactgtcacatattggctcagtgaccgcaaaagattttgggcgtgtttcgggtctgacgatgaaagacatcattaatgaagcagcacgcgaaggccatgatctgttgttcgctgataacccgtcggcggtgctgaaggagctgactggcctcatccagaacacgattcgctccaaatggcacgaagttctggag

SEQ ID NO: 1758 - protein, 346 aa, synthetic construct
  REGION 1..346: note = variant of RNA ligase 2 from Klebsiella phage KP179
MHHHHHHGGSNMFAYYSSLENHYNAKFIEKIRGAGFLMHTVEWVAREKIHGTNFSVIITPTEIVPAKRTGPILEGESFFGHEIIMKKYMDSFVKVQNMLNAMDLVSVQIFGEFAGGGIQKGVDYGDKDFYVFDILSDSGNEKVYWDDYRVESFCTTVGLKLAPLLGRGSFAELSQYPNDFKSLVNRYNELVDTVGLEMANKHVFGPQASSETGLAEGYVLKPVYPIFFNVGTRVAIKCKNSKFSEKAKLSSPISAKVELTENDKRLLEIFSEYVTWNRVSNVLSHIGSVTAKDFGRVSGLTMKDIINEAAREGHDLLFADNPSAVLKELTGLIQNTIRSKWHEVLE

SEQ ID NO: 1759 - DNA, 1038 bp, synthetic construct
  misc_feature 1..1038: note = variant of RNA ligase 2 from Klebsiella phage KP179
  source 1..1038: mol_type = other DNA
atgcatcaccatcaccatcacggtggcagcaacatgtttgcgtattattcaagtctggaaaaccattacaatgctaagttcattgagaagatccgtggtgcaggcttcctgatgcacaccgtggaatgggtagctcgcgagaagattcatggaacgaactttagcgttatcattactccgaccgaaatcgtcccagccaaacgcacagggccgatcttggaaggcgagtcgttctttggtcacgaaattatcatgaaaaaatatatggactccttcgtgaaggtgcagaacatgctgaatgccatggatcttgttagcgtgcaaatctttggcgaatttgcgggtggtggcattcagaaaggcgtcgattacggagacaaagatttctatgtgtttgacatcctgtctgatagcgggaacgagaaagtttactgggatgactatcgcgtcgaatcgttttgcaccactgtgggtctgaaattagcgcctctgctgggacgtggtagtttcgctgaactgtcccagtacccaaacgatttcaaaagcctggtgaaccgttataatgaattggttgacacggtcggcctggagatggccaataaacacgtctttggtccgcaagcgtcttctgaaactggcctggcagaaggctacgttcttaaacccgtctatccgattttctttaatgtgggtacgcgcgtggcgattaaatgcaagaactccaaattttcggagaaagccaagctgagctcgccaattagttcgaaggttgaactgacggagaacgataaacgtctgctcgaaatctttagcgagtatgttacctggaatcgcgtcagtaacgtactgtcacatattggctcagtgaccgcaaaagattttgggcgtgtttcgggtctgacgatgaaagacatcattaatgaagcagcacgcgaaggccatgatctgttgttcgctgataacccgtcggcggtgctgaaggagctgactggcctcatccagaacacgattcgctccaaatggcacgaagttctggag

SEQ ID NO: 1760 - protein, 346 aa, synthetic construct
  REGION 1..346: note = variant of RNA ligase 2 from Klebsiella phage KP179
MHHHHHHGGSNMFAYYSSLENHYNAKFIEKIRGAGFLMHTVEWVAREKIHGTNFSVIITPTEIVPAKRTGPILEGESFFGHEIIMKKYMDSFVKVQNMLNAMDLVSVQIFGEFAGGGIQKGVDYGDKDFYVFDILSDSGNEKVYWDDYRVESFCTTVGLKLAPLLGRGSFAELSQYPNDFKSLVNRYNELVDTVGLEMANKHVFGPQASSETGLAEGYVLKPVYPIFFNVGTRVAIKCKNSKFSEKAKLSSPISSKVELTENDKRLLEIFSEYVTWNRVSNVLSHIGSVTAKDFGRVSGLTMKDIINEAAREGHDLLFADNPSAVLKELTGLIQNTIRSKWHEVLE

SEQ ID NO: 1761 - DNA, 1038 bp, synthetic construct
  misc_feature 1..1038: note = variant of RNA ligase 2 from Klebsiella phage KP179
  source 1..1038: mol_type = other DNA
atgcatcaccatcaccatcacggtggcagcaacatgtttgcgtattattcaagtctggaaaaccatacaaatggcaagttcattgaaaagatccgtggtgcaggcttcctgatgcacaccgtggaatgggtagctcgcgagaagattcatggaacgaactttagcgttatcattactccgaccgaaatcgtcccagccaaacgcacagggccgatcttggaaggcgagtcgttctttggtcacgaaattatcatgaaaaaatatatggactccttcgtgaaggtgcagaacatgctgaatgccatggatcttgttagcgtgcaaatctttggcgaatttgcgggtggtggcattcagaaaggcgtcgattacggagacaaagatttctatgtgtttgacatcctgtctgatagcgggaacgagaaagtttactgggatgactatcgcgtcgaatcgttttgcaccactgtgggtctgaaattagcgcctctgctgggacgtggtagtttcgctgaactgtcccagtacccaaacgatttcaaaagcctggtgaaccgttataatgaattggttgacacggtcggcctggagatggccaataaacacgtctttggtccgcaagcgtcttctgaaactggcctggcagaaggctacgttcttaaacccgtctatccgcgcttctttaataccggtacgcgcgtggcgattaaatgcaagaactccaaattttcggagaaagccaagctggattcgccaattagttcgaaggttgaactgacggagaacgataaacgtctgctcgaaatctttagcgagtatgttacctggaatcgcgtcagtaacgtactgtcacatattggctcagtgaccgcaaaagattttgggcgtgtttcgggtctgacgatgaaagacatcattaatgaagcagcacgcgaaggccatgatctgttgttcgctgataacccgtcggcggtgctgaaggagctgactggcctcatccagaacacgattcgctccaaatggcacgaagttctggag

SEQ ID NO: 1762 - protein, 346 aa, synthetic construct
  REGION 1..346: note = variant of RNA ligase 2 from Klebsiella phage KP179
MHHHHHHGGSNMFAYYSSLENHTNGKFIEKIRGAGFLMHTVEWVAREKIHGTNFSVIITPTEIVPAKRTGPILEGESFFGHEIIMKKYMDSFVKVQNMLNAMDLVSVQIFGEFAGGGIQKGVDYGDKDFYVFDILSDSGNEKVYWDDYRVESFCTTVGLKLAPLLGRGSFAELSQYPNDFKSLVNRYNELVDTVGLEMANKHVFGPQASSETGLAEGYVLKPVYPRFFNTGTRVAIKCKNSKFSEKAKLDSPISSKVELTENDKRLLEIFSEYVTWNRVSNVLSHIGSVTAKDFGRVSGLTMKDIINEAAREGHDLLFADNPSAVLKELTGLIQNTIRSKWHEVLE

SEQ ID NO: 1763 - DNA, 1038 bp, synthetic construct
  misc_feature 1..1038: note = variant of RNA ligase 2 from Klebsiella phage KP179
  source 1..1038: mol_type = other DNA
atgcatcaccatcaccatcacggtggcagcaacatgtttgcgtattattcaagtctggaaaaccatacaaatggcaagttcattgaaaagatccgtggtgcaggcttcctgatgcacaccgtggaatgggtagctcgcgagaagattcatggaacgaactttagcgttatcattactccgaccgaaatcgtcccagccaaacgcacagggccgatcttggaaggtgagagcttctttggtcacgaaattatcatgaaaaaatatatggactccttcgtgaaggtgcagaacatgctgaatgccatggatcttgttagcgtgcaaatctttggcgaatttgcgggtggtggcattcagaaaggcgtcgattacggagacaaagatttctatgtgtttgacatcctgtctgatagcgggaacgagaaagtttactgggatgactatcgcgtcgaatcgttttgcaccactgtgggtctgaaattagcgcctctgctgggacgtggtagtttcgctgaactgtcccagtacccaaacgatttcaaaagcctggtgaaccgttataatgaattggttgacacggtcggcctggagatggccaataaacacgtctttggtccgcaagcgtcttctgaaactggcctggcagaaggctacgttcttaaacccgtctatccgcgcttctttaatgtgggtacgcgcgtggcgattaaatgcaagaactccaaattttcggagaaagccaagctggactcgccaattagtgcgaaggttgaactgacggagaacgataaacgtctgctcgaaatctttagcgagtatgttacctggaatcgcgtcagtaacgtactgtcacatattggctcagtgaccgcaaaagattttgggcgtgtttcgggtctgacgatgaaagacatcattaatgaagcagcacgcgaaggccatgatctgttgttcgctgataacccgtcggcggtgctgaaggagctgactggcctcatccagaacacgattcgctccaaatggcacgaagttctggag

SEQ ID NO: 1764 - protein, 346 aa, synthetic construct
  REGION 1..346: note = variant of RNA ligase 2 from Klebsiella phage KP179
MHHHHHHGGSNMFAYYSSLENHTNGKFIEKIRGAGFLMHTVEWVAREKIHGTNFSVIITPTEIVPAKRTGPILEGESFFGHEIIMKKYMDSFVKVQNMLNAMDLVSVQIFGEFAGGGIQKGVDYGDKDFYVFDILSDSGNEKVYWDDYRVESFCTTVGLKLAPLLGRGSFAELSQYPNDFKSLVNRYNELVDTVGLEMANKHVFGPQASSETGLAEGYVLKPVYPRFFNVGTRVAIKCKNSKFSEKAKLDSPISAKVELTENDKRLLEIFSEYVTWNRVSNVLSHIGSVTAKDFGRVSGLTMKDIINEAAREGHDLLFADNPSAVLKELTGLIQNTIRSKWHEVLE

SEQ ID NO: 1765 - DNA, 1038 bp, synthetic construct
  misc_feature 1..1038: note = variant of RNA ligase 2 from Klebsiella phage KP179
  source 1..1038: mol_type = other DNA
atgcatcaccatcaccatcacggtggcagcaacatgtttgcgtattattcaagtctggaaaaccatacaaatggcaagttcattgaaaagatccgtggtgcaggcttcctgatgcacaccgtggaatgggtagctcgcgagaagattcatggaacgaactttagcgttatcattactccgaccgaaatcgtcccagccaaacgcacagggccgatcttggaaggcgagtcgttctttggtcacgaaattatcatgaaaaaatatatggactccttcgtgaaggtgcagaacatgctgaatgccatggatcttgttagcgtgcaaatctttggcgaatttgcgggtggtggcattcagaaaggcgtcgattacggagacaaagatttctatgtgtttgacatcctgtctgatagcgggaacgagaaagtttactgggatgactatcgcgtcgaatcgttttgcaccactgtgggtctgaaattagcgcctctgctgggacgtggtagtttcgctgaactgtcccagtacccaaacgatttcaaaagcctggtgaaccgttataatgaattggttgacacggtcggcctggagatggccaataaacacgtctttggtccgcaagcgtcttctgaaactggcctggcagaaggctacgttcttaaacccgtctatccgattttctttaatgtgggtacgcgcgtggcgattaaatgcaagaactccaaattttcggagaaagccaagctggactcgccaattagtgcgaaggttgaactgacggagaacgataaacgtctgctcgaaatctttagcgagtatgttacctggaatcgcgtcagtaacgtactgtcacatattggctcagtgaccgcaaaagattttgggcgtgtttcgggtctgacgatgaaagacatcattaatgaagcagcacgcgaaggccatgatctgttgttcgctgataacccgtcggcggtgctgaaggagctgactggcctcatccagaacacgattcgctccaaatggcacgaagttctggag

SEQ ID NO: 1766 - protein, 346 aa, synthetic construct
  REGION 1..346: note = variant of RNA ligase 2 from Klebsiella phage KP179
MHHHHHHGGSNMFAYYSSLENHTNGKFIEKIRGAGFLMHTVEWVAREKIHGTNFSVIITPTEIVPAKRTGPILEGESFFGHEIIMKKYMDSFVKVQNMLNAMDLVSVQIFGEFAGGGIQKGVDYGDKDFYVFDILSDSGNEKVYWDDYRVESFCTTVGLKLAPLLGRGSFAELSQYPNDFKSLVNRYNELVDTVGLEMANKHVFGPQASSETGLAEGYVLKPVYPIFFNVGTRVAIKCKNSKFSEKAKLDSPISAKVELTENDKRLLEIFSEYVTWNRVSNVLSHIGSVTAKDFGRVSGLTMKDIINEAAREGHDLLFADNPSAVLKELTGLIQNTIRSKWHEVLE

SEQ ID NO: 1767 - DNA, 1038 bp, synthetic construct
  misc_feature 1..1038: note = variant of RNA ligase 2 from Klebsiella phage KP179
  source 1..1038: mol_type = other DNA
atgcatcaccatcaccatcacggtggcagcaacatgtttgcgtattattcaagtctggaaaaccattataatgccaagttcattagcaagatccgtggtgcaggcttcctgatgcacaccgtggaatgggtagctcgcgagaagattcatggaacgaactttagcgttatcattactccgaccgaaatcgtgccagccaaacgcacagggccgatcttggaaggcgagtcgttctttggtcacgaaattatcatgaaaaaatatatggactccttcgtgaaggtgcagaacatgctgaatccgatggatcttgttagcgtgcaaatctttggcgaatttgcgggtggtggcattcagaaaggcgtcgattacggagacaaagatttctatgtgtttgacatcctgtctgatagcgggaacgagaaagtttactgggatgactatcgcgtcgaatcgttttgcaccactgtgggtctgaaattagcgcctctgctgggacgtggtagtttcgctgaactgtcccagtacccaaacgatttcaaaagcctggtgaaccgttataatgaattggttgacacggtcggcctggagatggccaataaacacgtctttggtccgcaagcgtcttctgaaactggcctggcagaaggctacgttcttaaacccgtctatccgcgcttctttaatgtgggtacgcgcgtggcgattaaatgcaagaacagcaaattttcggagaaagccaagctggactcgccaattagtgcgaaggttgaactgacggagaacgataaacgtctgctcgaaatctttagcgagtatgttacctggaatcgcgtcagtaacgtactgtcacatattggctcagtgaccgcaaaagattttgggcgtgtttcgggtctgacgatgaaagacatcattaatgaagcagcacgcgaaggccatgatctgttgttcgctgataacccgtcggcggtgctgaaggagctgactggcctcatccagaacacgattcgctccaaatggcacgaagttctggag

SEQ ID NO: 1768 - protein, 346 aa, synthetic construct
  REGION 1..346: note = variant of RNA ligase 2 from Klebsiella phage KP179
MHHHHHHGGSNMFAYYSSLENHYNAKFISKIRGAGFLMHTVEWVAREKIHGTNFSVIITPTEIVPAKRTGPILEGESFFGHEIIMKKYMDSFVKVQNMLNPMDLVSVQIFGEFAGGGIQKGVDYGDKDFYVFDILSDSGNEKVYWDDYRVESFCTTVGLKLAPLLGRGSFAELSQYPNDFKSLVNRYNELVDTVGLEMANKHVFGPQASSETGLAEGYVLKPVYPRFFNVGTRVAIKCKNSKFSEKAKLDSPISAKVELTENDKRLLEIFSEYVTWNRVSNVLSHIGSVTAKDFGRVSGLTMKDIINEAAREGHDLLFADNPSAVLKELTGLIQNTIRSKWHEVLE

SEQ ID NO: 1769 - DNA, 1038 bp, synthetic construct
  misc_feature 1..1038: note = variant of RNA ligase 2 from Klebsiella phage KP179
  source 1..1038: mol_type = other DNA
atgcatcaccatcaccatcacggtggctctaacatgtttgcgtattattcaagtctggaaaaccattataatgccaagttcattagcaagatccgtggcgcaggcttcctgatgcacaccgtggaatgggtagctcgcgagaagattcatggaacgaactttagcgttatcattactccgaccgaaatcgtcccagccaaacgcacagggccgatcttggaaggtgagtcgttctttggtcacgaaattatcatgaaaaaatatatggactccttcgtgaaggtgcagaacatgctgaatgccatggatcttgttagcgtgcaaatctttggcgaatttgcgggtggtggcattcagaaaggcgtcgattacggagacaaagatttctatgtgtttgacatcctgtctgatagcgggaacgagaaagtttactgggatgactatcgcgtcgaatcgttttgcaccactgtgggtctgaaattagcgcctctgctgggacgtggtagtttcgctgaactgtcccagtacccaaacgatttcaaaagcctggtgaaccgttataatgaattggttgacacggtcggcctggagatggccaataaacacgtctttggtccgcaagcgtcttctgaaactggcctggcagaaggctacgttcttaaacccgtctatccgcgcttctttaatgtgggtacgcgcgtggcgattaaatgcaagaactccaaattttcggagaaagccaagctggattcgccaattagtgcgaaggttgaactgacggagaacgataaacgtctgctcgaaatctttagcgagtatgttacctggaatcgcgtcagtaacgtactgtcacatattggctcagtgaccaccaaagattttgggcgtgtttcgggtctgacgatgaaagacatcattaacgaagcagcacgcgaaggccatgatctgttgttcgctgataacccgtcggcggtgctgaaggagctgactggcctcatccagaacacgattcgctccaaatggcacgaagttctggag

SEQ ID NO: 1770 - protein, 346 aa, synthetic construct
  REGION 1..346: note = variant of RNA ligase 2 from Klebsiella phage KP179
MHHHHHHGGSNMFAYYSSLENHYNAKFISKIRGAGFLMHTVEWVAREKIHGTNFSVIITPTEIVPAKRTGPILEGESFFGHEIIMKKYMDSFVKVQNMLNAMDLVSVQIFGEFAGGGIQKGVDYGDKDFYVFDILSDSGNEKVYWDDYRVESFCTTVGLKLAPLLGRGSFAELSQYPNDFKSLVNRYNELVDTVGLEMANKHVFGPQASSETGLAEGYVLKPVYPRFFNVGTRVAIKCKNSKFSEKAKLDSPISAKVELTENDKRLLEIFSEYVTWNRVSNVLSHIGSVTTKDFGRVSGLTMKDIINEAAREGHDLLFADNPSAVLKELTGLIQNTIRSKWHEVLE

SEQ ID NO: 1771 - DNA, 1038 bp, synthetic construct
  misc_feature 1..1038: note = variant of RNA ligase 2 from Klebsiella phage KP179
  source 1..1038: mol_type = other DNA
atgcatcaccatcaccatcacggtggcagcaacatgtttgcgtattattcaagtctggaaaaccattataatgccaagttcattagcaagatccgtggtgcaggcttcctgatgcacaccgtggaatgggtagctcgcgagaagattcatggaacgaactttagcgttatcattactccgaccgaaatcgtcccagccaaacgcacagggccgatcttggaaggcgagtcgttctttggtcacgaaattatcatgaaaaaatatatggactccttcgtgaaggtgcagaacatgctgaatgccatggatcttgttagcgtgcaaatctttggcgaatttgcgggtggtggcattcagaaaggcgtcgattacggagacaaagatttctatgtgtttgacatcctgtctgatagcgggaacgagaaagtttactgggatgactatcgcgtcgaatcgttttgcaccactgtgggtctgaaattagcgcctctgctgggacgtggtagtttcgctgaactgtcccagtacccaaacgatttcaaaagcctggtgaaccgttataatgaattggttgacacggtcggcctggagatggccaataaacacgtctttggtccgcaagcgtcttctgaaactggcctggcagaaggctacgttcttaaacccgtctatccgcgcttctttaatgtgggtacgcgcgtggcgattaaatgcaagaactccaaattttcggagaaagccaagctggactcgccaattagtgcgaaggttgaactgacggagaacgataaacgtctgctcgaaatctttagcgagtatgttacctggaatcgcgtcagtaacgtactgtcacatattggctcagtgaccaccaaagattttgggcgtgtttcgggtctgacgatgaaagacatcattcgcgaagcagcacgcgaaggccatgatctgttgttcgctgataacccgtcggcggtgctgaaggagctgactggcctcatccagaacacgattcgctccaaatggcacgaagttctggag

SEQ ID NO: 1772 - protein, 346 aa, synthetic construct
  REGION 1..346: note = variant of RNA ligase 2 from Klebsiella phage KP179
MHHHHHHGGSNMFAYYSSLENHYNAKFISKIRGAGFLMHTVEWVAREKIHGTNFSVIITPTEIVPAKRTGPILEGESFFGHEIIMKKYMDSFVKVQNMLNAMDLVSVQIFGEFAGGGIQKGVDYGDKDFYVFDILSDSGNEKVYWDDYRVESFCTTVGLKLAPLLGRGSFAELSQYPNDFKSLVNRYNELVDTVGLEMANKHVFGPQASSETGLAEGYVLKPVYPRFFNVGTRVAIKCKNSKFSEKAKLDSPISAKVELTENDKRLLEIFSEYVTWNRVSNVLSHIGSVTTKDFGRVSGLTMKDIIREAAREGHDLLFADNPSAVLKELTGLIQNTIRSKWHEVLE

SEQ ID NO: 1773 - DNA, 1038 bp, synthetic construct
  misc_feature 1..1038: note = variant of RNA ligase 2 from Klebsiella phage KP179
  source 1..1038: mol_type = other DNA
atgcatcaccatcaccatcacggtggctctaacatgtttgcgtattattcaagtctggaaaaccattataatgccaagttcattagcaagatccgtggcgcaggcttcctgatgcacaccgtggaatgggtagctcgcgagaagattcatggaacgaactttagcgttatcattactccgaccgaaatcgtcccagccaaacgcacagggccgatcttggaaggcgaatcgttctttggtcacgaaattatcatgaaaaaatatatggactccttcgtgaaggtgcagaacatgctgaatgccatggatcttgttagcgtgcaaatctttggcgaatttgcgggtggtggcattcagaaaggcgtcgattacggagacaaagatttctatgtgtttgacatcctgtctgatagcgggaacgagaaagtttactgggatgactatcgcgtcgaatcgttttgcaccactgtgggtctgaaattagcgcctctgctgggacgtggtagtttcgctgaactgtcccagtacccaaacgatttcaaaagcctggtgaaccgttataatgaattggttgacacggtcggcctggagatggccaataaacacgtctttggtccgcaagcgtcttctgaaactggcctggcagaaggctacgttcttaaacccgtctatccgcgcttctttaatgtgggtacgcgcgtggcgattaaatgcaagaactccaaattttcggagaaagccaagctggattcgccaattagtgcgaaggttgaactgacggagaacgataaacgtctgctcgaaatctttagcgagtatgttacctggaatcgcgtcagtaacgtactgtcacatattggctcagtgaccgccaaagattttgggcgtgtttcgggtctgacgatgaaagacatcattaacgaagcagcacgcgaaggccatgatctgttgttcgctgataacccgtcggcggtgctgaaggagctgactcgcctcatccagaacacgattcgctccaaatggcacgaagttctggag

SEQ ID NO: 1774 - protein, 346 aa, synthetic construct
  REGION 1..346: note = variant of RNA ligase 2 from Klebsiella phage KP179
MHHHHHHGGSNMFAYYSSLENHYNAKFISKIRGAGFLMHTVEWVAREKIHGTNFSVIITPTEIVPAKRTGPILEGESFFGHEIIMKKYMDSFVKVQNMLNAMDLVSVQIFGEFAGGGIQKGVDYGDKDFYVFDILSDSGNEKVYWDDYRVESFCTTVGLKLAPLLGRGSFAELSQYPNDFKSLVNRYNELVDTVGLEMANKHVFGPQASSETGLAEGYVLKPVYPRFFNVGTRVAIKCKNSKFSEKAKLDSPISAKVELTENDKRLLEIFSEYVTWNRVSNVLSHIGSVTAKDFGRVSGLTMKDIINEAAREGHDLLFADNPSAVLKELTRLIQNTIRSKWHEVLE

SEQ ID NO: 1775 - DNA, 1038 bp, synthetic construct
  misc_feature 1..1038: note = variant of RNA ligase 2 from Klebsiella phage KP179
  source 1..1038: mol_type = other DNA
atgcatcaccatcaccatcacggtggcagcaacatgtttgcgtattattcaagtctggaaaaccattataatgccaagttcattagcaagatccgtgtcgcaggcttcctgatgcacaccgtggaatgggtagctcgcgagaagattcatggaacgaactttagcgttatcattactccgaccgaaatcgtcccagccaaacgcacagggccgatcttggaagatgagtcgttctttggtcacgaaattatcatgaaaaaatatatggactccttcgtgaaggtgcagaacatgctgaatgccatggatcttgttagcgtgcaaatctttggcgaatttgcgggtggtggcattcagaaaggcgtcgattacggagacaaagatttctatgtgtttgacatcctgtctgatagcgggaacgagaaagtttactgggatgactatcgcgtcgaatcgttttgcaccactgtgggtctgaaattagcgcctctgctgggacgtggtagtttcgctgaactgtcccagtacccaaacgatttcaaaagcctggtgaaccgttataatgaattggttgacacggtcggcctggagatggccaataaacacgtctttggtccgcaagcgtcttctgaaactggcctggcagaaggctacgttcttaaacccgtctatccgcgcttctttaatgtgggtacgcgcgtggcgattaaatgcaagaactccaaattttcggagaaagccaagctggattcgccaattagtgcgaaggttgaactgacggagaacgataaacgtctgctcgaaatctttagcgagtatgttacctggaatcgcgtcagtaacgtactgtcacatattggctcagtgaccgcaaaagattttgggcgtgtttcgggtctgacgatgaaagacatcattaatgaagcagcacgcgaaggccatgatctgttgttcgctgataacccgtcggcggtgctgaaggagctgactggcctcatccagaacacgattcgctccaaatggcacgaagttctggag

SEQ ID NO: 1776 - protein, 346 aa, synthetic construct
  REGION 1..346: note = variant of RNA ligase 2 from Klebsiella phage KP179
MHHHHHHGGSNMFAYYSSLENHYNAKFISKIRVAGFLMHTVEWVAREKIHGTNFSVIITPTEIVPAKRTGPILEDESFFGHEIIMKKYMDSFVKVQNMLNAMDLVSVQIFGEFAGGGIQKGVDYGDKDFYVFDILSDSGNEKVYWDDYRVESFCTTVGLKLAPLLGRGSFAELSQYPNDFKSLVNRYNELVDTVGLEMANKHVFGPQASSETGLAEGYVLKPVYPRFFNVGTRVAIKCKNSKFSEKAKLDSPISAKVELTENDKRLLEIFSEYVTWNRVSNVLSHIGSVTAKDFGRVSGLTMKDIINEAAREGHDLLFADNPSAVLKELTGLIQNTIRSKWHEVLE

SEQ ID NO: 1777 - DNA, 1038 bp, synthetic construct
  misc_feature 1..1038: note = variant of RNA ligase 2 from Klebsiella phage KP179
  source 1..1038: mol_type = other DNA
atgcatcaccatcaccatcacggtggctctaacatgtttgcgtattattcaagtctggaaaaccattataatgccaagttcattagcaagatccgtgtcgcaggcttcctgatgcacaccgtggaatgggtagctcgcgagaagattcatggaacgaactttagcgttatcattactccgaccgaaatcgtcccagccaaacgcacagggccgatcttggaagatgagtcgttctttggtcacgaaattatcatgaaaaaatatatggactccttcgtgaaggtgcagaacatgctgaatgccatggatcttgttagcgtgcaaatctttggcgaatttgcgggtggtggcattcagaaaggcgtcgattacggagacaaagatttctatgtgtttgacatcctgtctgatagcgggaacgagaaagtttactgggatgactatcgcgtcgaatcgttttgcaccactgtgggtctgaaattagcgcctctgctgggacgtggtagtttcgctgaactgtcccagtacccaaacgatttcaaaagcctggtgaaccgttataatgaattggttgacacggtcggcctggagatggccaataaacacgtctttggtccgcaagcgtcttctgaaactggcctggcagaaggctacgttcttaaacccgtctatccgcgcttctttaatgtgggtacgcgcgtggcgattaaatgcaagaactccaaattttcggagaaagccaagaaagattcgccaattagtgcgaaggttgaactgacggagaacgataaacgtctgctcgaaatctttagcgagtatgttacctggaatcgcgtcagtaacgtactgtcacatattggctcagtgaccaccaaagattttgggcgtgtttcgggtctgacgatgaaagacatcattaatgaagcagcacgcgaaggccatgatctgttgttcgctgataacccgtcggcggtgctgaaggagctgactcgcctcatccagaacacgattcgctccaaatggcacgaagttctggag

SEQ ID NO: 1778 - protein, 346 aa, synthetic construct
  REGION 1..346: note = variant of RNA ligase 2 from Klebsiella phage KP179
MHHHHHHGGSNMFAYYSSLENHYNAKFISKIRVAGFLMHTVEWVAREKIHGTNFSVIITPTEIVPAKRTGPILEDESFFGHEIIMKKYMDSFVKVQNMLNAMDLVSVQIFGEFAGGGIQKGVDYGDKDFYVFDILSDSGNEKVYWDDYRVESFCTTVGLKLAPLLGRGSFAELSQYPNDFKSLVNRYNELVDTVGLEMANKHVFGPQASSETGLAEGYVLKPVYPRFFNVGTRVAIKCKNSKFSEKAKKDSPISAKVELTENDKRLLEIFSEYVTWNRVSNVLSHIGSVTTKDFGRVSGLTMKDIINEAAREGHDLLFADNPSAVLKELTRLIQNTIRSKWHEVLE

SEQ ID NO: 1779 - DNA, 1038 bp, synthetic construct
  misc_feature 1..1038: note = variant of RNA ligase 2 from Klebsiella phage KP179
  source 1..1038: mol_type = other DNA
atgcatcaccatcaccatcacggtggctctaacatgtttgcgtattattcaagtctggaaaaccattataatgccaagttcattagcaagatccgtgtcgcaggcttcctggcgcacaccgtggaatgggtagctcgcgagaagattcatggaacgaactttagcgttatcattactccgaccgaaatcgtcccagccaaacgcacagggccgatcttggaaggcgagtcgttctttggtcacgaaattatcatgaaaaaatatatggactccttcgtgaaggtgcagaacatgctgaatgccatggatcttgttagcgtgcaaatctttggcgaatttgcgggtggtggcattcagaaaggcgtcgattacggagacaaagatttctatgtgtttgacatcctgtctgatagcgggaacgagaaagtttactgggatgactatcgcgtcgaatcgttttgcaccactgtgggtctgaaattagcgcctctgctgggacgtggtagtttcgctgaactgtcccagtacccaaacgatttcaaaagcctggtgaaccgttataatgaattggttgacacggtcggcctggagatggccaataaacacgtctttggtccgcaagcgtcttctgaaactggcctggcagaaggctacgttcttaaacccgtctatccgcgcttctttaatgtgggtacgcgcgtggcgattaaatgcaagaactccaaattttcggagaaagccaagctggattcgccaattagtgcgaaggttgaactgacggagaacgataaacgtctgctcgaaatctttagcgagtatgttacctggaatcgcgtcagtaacgtactgtcacatattggctcagtgaccgccaaagattttgggcgtgtttcgggtctgacgatgaaagacatcattaatgaagcagcacgcgaaggccatgatctgttgttcgctgataacccgtcggcggtgctgaaggagctgactggcctcatccagaacacgattcgctccaaatggcacgaagttctggag

SEQ ID NO: 1780 - protein, 346 aa, synthetic construct
  REGION 1..346: note = variant of RNA ligase 2 from Klebsiella phage KP179
MHHHHHHGGSNMFAYYSSLENHYNAKFISKIRVAGFLAHTVEWVAREKIHGTNFSVIITPTEIVPAKRTGPILEGESFFGHEIIMKKYMDSFVKVQNMLNAMDLVSVQIFGEFAGGGIQKGVDYGDKDFYVFDILSDSGNEKVYWDDYRVESFCTTVGLKLAPLLGRGSFAELSQYPNDFKSLVNRYNELVDTVGLEMANKHVFGPQASSETGLAEGYVLKPVYPRFFNVGTRVAIKCKNSKFSEKAKLDSPISAKVELTENDKRLLEIFSEYVTWNRVSNVLSHIGSVTAKDFGRVSGLTMKDIINEAAREGHDLLFADNPSAVLKELTGLIQNTIRSKWHEVLE

SEQ ID NO: 1781 - DNA, 1038 bp, synthetic construct
  misc_feature 1..1038: note = variant of RNA ligase 2 from Klebsiella phage KP179
  source 1..1038: mol_type = other DNA
atgcatcaccatcaccatcacggtggctctaacatgtttgcgtattattcaagtctggaaaaccattataatgccaagttcattagcaagatccgtgtcgcaggcttcctgatgcacaccgtggaatgggtagctcgcgagaagattcatggaacgaactttagcgttatcattactccgaccgaaatcgtcccagccaaacgcacagggccgatcttggaaggcgagtcgttctttggtcacgaaattatcatgaaaaaatatatggactccttcaaaaaggtgcagaacatgctgaatgccatggatcttgttagcgtgcaaatctttggcgaatttgcgggtggtggcattcagaaaggcgtcgattacggagacaaagatttctatgtgtttgacatcctgtctgatagcgggaacgagaaagtttactgggatgactatcgcgtcgaatcgttttgcaccactgtgggtctgaaattagcgcctctgctgggacgtggtagtttcgctgaactgtcccagtacccaaacgatttcaaaagcctggtgaaccgttataatgaattggttgacacggtcggcctggagatggccaataaacacgtctttggtccgcaagcgtcttctgaaactggcctggcagaaggctacgttcttaaacccgtctatccgcgcttctttaatgtgggtacgcgcgtggcgattaaatgcaagaactccaaattttcggagaaagccaagaaagattcgccaattagtgcgaaggttgaactgacggagaacgataaacgtctgctcgaaatctttagcgagtatgttacctggaatcgcgtcagtaacgtactgtcacatattggctcagtgaccgccaaagattttgggcgtgtttcgggtctgacgatgaaagacatcattaatgaagcagcacgcgaaggccatgatctgttgttcgctgataacccgtcggcggtgctgaaggagctgactggcctcatccagaacacgattcgctccaaatggcacgaagttctggag

SEQ ID NO: 1782 - protein, 346 aa, synthetic construct
  REGION 1..346: note = variant of RNA ligase 2 from Klebsiella phage KP179
MHHHHHHGGSNMFAYYSSLENHYNAKFISKIRVAGFLMHTVEWVAREKIHGTNFSVIITPTEIVPAKRTGPILEGESFFGHEIIMKKYMDSFKKVQNMLNAMDLVSVQIFGEFAGGGIQKGVDYGDKDFYVFDILSDSGNEKVYWDDYRVESFCTTVGLKLAPLLGRGSFAELSQYPNDFKSLVNRYNELVDTVGLEMANKHVFGPQASSETGLAEGYVLKPVYPRFFNVGTRVAIKCKNSKFSEKAKKDSPISAKVELTENDKRLLEIFSEYVTWNRVSNVLSHIGSVTAKDFGRVSGLTMKDIINEAAREGHDLLFADNPSAVLKELTGLIQNTIRSKWHEVLE

SEQ ID NO: 1783 - DNA, 1038 bp, synthetic construct
  misc_feature 1..1038: note = variant of RNA ligase 2 from Klebsiella phage KP179
  source 1..1038: mol_type = other DNA
atgcatcaccatcaccatcacggtggctctaacatgtttgcgtattattcaagtctggaaaaccattataatgccaagttcattagcaagatccgtggcgcaggcttcctggcgcacaccgtggaatgggtagctcgcgagaagattcatggaacgaactttagcgttatcattactccgaccgaaatcgtcccagccaaacgcacagggccgatcttggaagatgagtcgttctttggtcacgaaattatcatgaaaaaatatatggactccttcgtgaaggtgcagaacatgctgaatgccatggatcttgttagcgtgcaaatctttggcgaatttgcgggtggtggcattcagaaaggcgtcgattacggagacaaagatttctatgtgtttgacatcctgtctgatagcgggaacgagaaagtttactgggatgactatcgcgtcgaatcgttttgcaccactgtgggtctgaaattagcgcctctgctgggacgtggtagtttcgctgaactgtcccagtacccaaacgatttcaaaagcctggtgaaccgttataatgaattggttgacacggtcggcctggagatggccaataaacacgtctttggtccgcaagcgtcttctgaaactggcctggcagaaggctacgttcttaaacccgtctatccgcgcttctttaatgtgggtacgcgcgtggcgattaaatgcaagaactccaaattttcggagaaagccaagctggattcgccaattagtgcgaaggttgaactgacggagaacgataaacgtctgctcgaaatctttagcgagtatgttacctggaatcgcgtcagtaacgtactgtcacatattggctcagtgaccaccaaagattttgggcgtgtttcgggtctgacgatgaaagacatcattcgcgaagcagcacgcgaaggccatgatctgttgttcgctgataacccgtcggcggtgctgaaggagctgactggcctcatccagaacacgattcgctccaaatggcacgaagttctggag

SEQ ID NO: 1784 - protein, 346 aa, synthetic construct
  REGION 1..346: note = variant of RNA ligase 2 from Klebsiella phage KP179
MHHHHHHGGSNMFAYYSSLENHYNAKFISKIRGAGFLAHTVEWVAREKIHGTNFSVIITPTEIVPAKRTGPILEDESFFGHEIIMKKYMDSFVKVQNMLNAMDLVSVQIFGEFAGGGIQKGVDYGDKDFYVFDILSDSGNEKVYWDDYRVESFCTTVGLKLAPLLGRGSFAELSQYPNDFKSLVNRYNELVDTVGLEMANKHVFGPQASSETGLAEGYVLKPVYPRFFNVGTRVAIKCKNSKFSEKAKLDSPISAKVELTENDKRLLEIFSEYVTWNRVSNVLSHIGSVTTKDFGRVSGLTMKDIIREAAREGHDLLFADNPSAVLKELTGLIQNTIRSKWHEVLE

SEQ ID NO: 1785 - DNA, 1038 bp, synthetic construct
  misc_feature 1..1038: note = variant of RNA ligase 2 from Klebsiella phage KP179
  source 1..1038: mol_type = other DNA
atgcatcaccatcaccatcacggtggctctaacatgtttgcgtattattcaagtctggaaaaccattataatgccaagttcattagcaagatccgtggcgcaggcttcctggtgcacaccgtggaatgggtagctcgcgagaagattcatggaacgaactttagcgttatcattactccgaccgaaatcgtcccagccaaacgcacagggccgatcttggaagatgagtcgttctttggtcacgaaattatcatgaaaaaatatatggactccttcgtgaaggtgcagaacatgctgaatgccatggatcttgttagcgtgcaaatctttggcgaatttgcgggtggtggcattcagaaaggcgtcgattacggagacaaagatttctatgtgtttgacatcctgtctgatagcgggaacgagaaagtttactgggatgactatcgcgtcgaatcgttttgcaccactgtgggtctgaaattagcgcctctgctgggacgtggtagtttcgctgaactgtcccagtacccaaacgatttcaaaagcctggtgaaccgttataatgaattggttgacacggtcggcctggagatggccaataaacacgtctttggtccgcaagcgtcttctgaaactggcctggcagaaggctacgttcttaaacccgtctatccgcgcttctttaatgtgggtacgcgcgtggcgattaaatgcaagaactccaaattttcggagaaagccaagaaaagctcgccaattagtgcgaaggttgaactgacggagaacgataaacgtctgctcgaaatctttagcgagtatgttacctggaatcgcgtcagtaacgtactgtcacatattggctcagtgaccgccaaagattttgggcgtgtttcgggtctgacgatgaaagacatcattaatgaagcagcacgcgaaggccatgatctgttgttcgctgataacccgtcggcggtgctgaaggagctgactggcctcatccagaacacgattcgctccaaatggcacgaagttctggag

SEQ ID NO: 1786 - protein, 346 aa, synthetic construct
  REGION 1..346: note = variant of RNA ligase 2 from Klebsiella phage KP179
MHHHHHHGGSNMFAYYSSLENHYNAKFISKIRGAGFLVHTVEWVAREKIHGTNFSVIITPTEIVPAKRTGPILEDESFFGHEIIMKKYMDSFVKVQNMLNAMDLVSVQIFGEFAGGGIQKGVDYGDKDFYVFDILSDSGNEKVYWDDYRVESFCTTVGLKLAPLLGRGSFAELSQYPNDFKSLVNRYNELVDTVGLEMANKHVFGPQASSETGLAEGYVLKPVYPRFFNVGTRVAIKCKNSKFSEKAKKSSPISAKVELTENDKRLLEIFSEYVTWNRVSNVLSHIGSVTAKDFGRVSGLTMKDIINEAAREGHDLLFADNPSAVLKELTGLIQNTIRSKWHEVLE

SEQ ID NO: 1787 - DNA, 1038 bp, synthetic construct
  misc_feature 1..1038: note = variant of RNA ligase 2 from Klebsiella phage KP179
  source 1..1038: mol_type = other DNA
atgcatcaccatcaccatcacggtggctctaacatgtttgcgtattattcaagtctggaaaaccattataatgccaagttcattagcaagatccgtggcgcaggcttcctggtgcacaccgtggaatgggtagctcgcgagaagattcatggaacgaactttagcgttatcattactccgaccgaaatcgtcccagccaaacgcacagggccgatcttggaagatgagtcgttctttggtcacgaaattatcatgaaaaaatatatggactccttcaaaaaggtgcagaacatgctgaatgccatggatcttgttagcgtgcaaatctttggcgaatttgcgggtggtggcattcagaaaggcgtcgattacggagacaaagatttctatgtgtttgacatcctgtctgatagcgggaacgagaaagtttactgggatgactatcgcgtcgaatcgttttgcaccactgtgggtctgaaattagcgcctctgctgggacgtggtagtttcgctgaactgtcccagtacccaaacgatttcaaaagcctggtgaaccgttataatgaattggttgacacggtcggcctggagatggccaataaacacgtctttggtccgcaagcgtcttctgaaactggcctggcagaaggctacgttcttaaacccgtctatccgcgcttctttaatgtgggtacgcgcgtggcgattaaatgcaagaactccaaattttcggagaaagccaagctggattcgccaattagtgcgaaggttgaactgacggagaacgataaacgtctgctcgaaatctttggcgagtatgttacctggaatcgcgtcagtaacgtactgtcacatattggctcagtgaccgcaaaagattttgggcgtgtttcgggtctgacgatgaaagacatcattaacgaagcagcacgcgaaggccatgatctgttgttcgctgataacccgtcggcggtgctgaaggagctgactggcctcatccagaacacgattcgctccaaatggcacgaagttctggag

SEQ ID NO: 1788 - protein, 346 aa, synthetic construct
  REGION 1..346: note = variant of RNA ligase 2 from Klebsiella phage KP179
MHHHHHHGGSNMFAYYSSLENHYNAKFISKIRGAGFLVHTVEWVAREKIHGTNFSVIITPTEIVPAKRTGPILEDESFFGHEIIMKKYMDSFKKVQNMLNAMDLVSVQIFGEFAGGGIQKGVDYGDKDFYVFDILSDSGNEKVYWDDYRVESFCTTVGLKLAPLLGRGSFAELSQYPNDFKSLVNRYNELVDTVGLEMANKHVFGPQASSETGLAEGYVLKPVYPRFFNVGTRVAIKCKNSKFSEKAKLDSPISAKVELTENDKRLLEIFGEYVTWNRVSNVLSHIGSVTAKDFGRVSGLTMKDIINEAAREGHDLLFADNPSAVLKELTGLIQNTIRSKWHEVLE

SEQ ID NO: 1789 - DNA, 1038 bp, synthetic construct
  misc_feature 1..1038: note = variant of RNA ligase 2 from Klebsiella phage KP179
  source 1..1038: mol_type = other DNA
atgcatcaccatcaccatcacggtggcagcaacatgtttgcgtattattcaagtctggaaaaccattataatgccaagttcattagcaagatccgtggcgcaggcttcctggtgcacaccgtggaatgggtagctcgcgagaagattcatggaacgaactttagcgttatcattactccgaccgaaatcgtcccagccaaacgcacagggccgatcttggaaggcgagtcgttctttggtcacgaaattatcatgaaaaaatatatggactccttcaaaaaggtgcagaacatgctgaatgccatggatcttgttagcgtgcaaatctttggcgaatttgcgggtggtggcattcagaaaggcgtcgattacggagacaaagatttctatgtgtttgacatcctgtctgatagcgggaacgagaaagtttactgggatgactatcgcgtcgaatcgttttgcaccactgtgggtctgaaattagcgcctctgctgggacgtggtagtttcgctgaactgtcccagtacccaaacgatttcaaaagcctggtgaaccgttataatgaattggttgacacggtcggcctggagatggccaataaacacgtctttggtccgcaagcgtcttctgaaactggcctggcagaaggctacgttcttaaacccgtctatccgcgcttctttaatgtgggtacgcgcgtggcgattaaatgcaagaactccaaattttcggagaaagccaagctggattcgccaattagtgcgaaggttgaactgacggagaacgataaacgtctgctcgaaatctttagcgagtatgttacctggaatcgcgtcagtaacgtactgtcacatattggctcagtgaccgcaaaagattttgggcgtgtttcgggtctgacgatgaaagacatcattaatgaagcagcacgcgaaggccatgatctgttgttcgctgataacccgtcggcggtgctgaaggagctgactggcctcatccagaacacgattcgctccaaatggcacgaagttctggag

SEQ ID NO: 1790 - protein, 346 aa, synthetic construct
  REGION 1..346: note = variant of RNA ligase 2 from Klebsiella phage KP179
MHHHHHHGGSNMFAYYSSLENHYNAKFISKIRGAGFLVHTVEWVAREKIHGTNFSVIITPTEIVPAKRTGPILEGESFFGHEIIMKKYMDSFKKVQNMLNAMDLVSVQIFGEFAGGGIQKGVDYGDKDFYVFDILSDSGNEKVYWDDYRVESFCTTVGLKLAPLLGRGSFAELSQYPNDFKSLVNRYNELVDTVGLEMANKHVFGPQASSETGLAEGYVLKPVYPRFFNVGTRVAIKCKNSKFSEKAKLDSPISAKVELTENDKRLLEIFSEYVTWNRVSNVLSHIGSVTAKDFGRVSGLTMKDIINEAAREGHDLLFADNPSAVLKELTGLIQNTIRSKWHEVLE

SEQ ID NO: 1791 - DNA, 1038 bp, synthetic construct
  misc_feature 1..1038: note = variant of RNA ligase 2 from Klebsiella phage KP179
  source 1..1038: mol_type = other DNA
atgcatcaccatcaccatcacggtggctttaacatgtttgcgtattattcaagtctggaaaaccattataatgccaagttcattagcaagatccgtggtgcaggcttcctgatgcacaccgtggaatgggtagctcgcgagaagattcatggaacgaactttagcgttatcattactccgaccgaaatcgtcccagccaaacgcacagggccgatcttggaagatgagtcgttctttggtcacgaaattatcatgaaaaaatatatggactccttcgtgaaggtgcagaacatgctgaatgccatggatcttgttagcgtgcaaatctttggcgaatttgcgggtggtggcattcagaaaggcgtcgattacggagacaaagatttctatgtgtttgacatcctgtctgatagcgggaacgagaaagtttactgggatgactatcgcgtcgaatcgttttgcaccactgtgggtctgaaattagcgcctctgctgggacgtggtagtttcgctgaactgtcccagtacccaaacgatttcaaaagcctggtgaaccgttataatgaattggttgacacggtcggcctggagatggccaataaacacgtctttggtccgcaagcgtcttctgaaactggcctggcagaaggctacgttcttaaacccgtctatccgcgcttctttaatgtgggtacgcgcgtggcgattaaatgcaagaactccaaattttcggagaaagccaagctggattcgccaattagtgcgaaggttgaactgacggagaacgataaacgtctgctcgaaatctttagcgagtatgttacctggaatcgcgtcagtaacgtactgtcacatattggctcagtgaccgcaaaagattttgggcgtgtttcgggtctgacgatgaaagacatcattaacgaagcagcacgcgaaggccatgatctgttgttcgctgataacccgtcggcggtgctgaaggagctgactggcctcatccagaacacgattcgctccaaatggcacgaagttctggag

SEQ ID NO: 1792 - protein, 346 aa, synthetic construct
  REGION 1..346: note = variant of RNA ligase 2 from Klebsiella phage KP179
MHHHHHHGGFNMFAYYSSLENHYNAKFISKIRGAGFLMHTVEWVAREKIHGTNFSVIITPTEIVPAKRTGPILEDESFFGHEIIMKKYMDSFVKVQNMLNAMDLVSVQIFGEFAGGGIQKGVDYGDKDFYVFDILSDSGNEKVYWDDYRVESFCTTVGLKLAPLLGRGSFAELSQYPNDFKSLVNRYNELVDTVGLEMANKHVFGPQASSETGLAEGYVLKPVYPRFFNVGTRVAIKCKNSKFSEKAKLDSPISAKVELTENDKRLLEIFSEYVTWNRVSNVLSHIGSVTAKDFGRVSGLTMKDIINEAAREGHDLLFADNPSAVLKELTGLIQNTIRSKWHEVLE

SEQ ID NO: 1793 - DNA, 1038 bp, synthetic construct
  misc_feature 1..1038: note = variant of RNA ligase 2 from Klebsiella phage KP179
  source 1..1038: mol_type = other DNA
atgcatcaccatcaccatcacggtggctttaacatgtttgcgtattattcaagtctggaaaaccattataatgccaagttcattagcaagatccgtggcgcaggcttcctggcgcacaccgtggaatgggtagctcgcgagaagattcatggaacgaactttagcgttatcattactccgaccgaaatcgtcccagccaaacgcacagggccgatcttggaagatgagtcgttctttggtcacgaaattatcatgaaaaaatatatggactccttcgtgaaggtgcagaacatgctgaatgccatggatcttgttagcgtgcaaatctttggcgaatttgcgggtggtggcattcagaaaggcgtcgattacggagacaaagatttctatgtgtttgacatcctgtctgatagcgggaacgagaaagtttactgggatgactatcgcgtcgaatcgttttgcaccactgtgggtctgaaattagcgcctctgctgggacgtggtagtttcgctgaactgtcccagtacccaaacgatttcaaaagcctggtgaaccgttataatgaattggttgacacggtcggcctggagatggccaataaacacgtctttggtccgcaagcgtcttctgaaactggcctggcagaaggctacgttcttaaacccgtctatccgcgcttctttaatgtgggtacgcgcgtggcgattaaatgcaagaactccaaattttcggagaaagccaagctggattcgccaattagtgcgaaggttgaactgacggagaacgataaacgtctgctcgaaatctttagcgagtatgttacctggaatcgcgtcagtaacgtactgtcacatattggctcagtgaccgcaaaagattttgggcgtgtttcgggtctgacgatgaaagacatcattaatgaagcagcacgcgaaggccatgatctgttgttcgctgataacccgtcggcggtgctgaaggagctgactggcctcatccagaacacgattcgctccaaatggcacgaagttctggag

SEQ ID NO: 1794 - protein, 346 aa, synthetic construct
  REGION 1..346: note = variant of RNA ligase 2 from Klebsiella phage KP179
MHHHHHHGGFNMFAYYSSLENHYNAKFISKIRGAGFLAHTVEWVAREKIHGTNFSVIITPTEIVPAKRTGPILEDESFFGHEIIMKKYMDSFVKVQNMLNAMDLVSVQIFGEFAGGGIQKGVDYGDKDFYVFDILSDSGNEKVYWDDYRVESFCTTVGLKLAPLLGRGSFAELSQYPNDFKSLVNRYNELVDTVGLEMANKHVFGPQASSETGLAEGYVLKPVYPRFFNVGTRVAIKCKNSKFSEKAKLDSPISAKVELTENDKRLLEIFSEYVTWNRVSNVLSHIGSVTAKDFGRVSGLTMKDIINEAAREGHDLLFADNPSAVLKELTGLIQNTIRSKWHEVLE

SEQ ID NO: 1795 - DNA, 1038 bp, synthetic construct
  misc_feature 1..1038: note = variant of RNA ligase 2 from Klebsiella phage KP179
  source 1..1038: mol_type = other DNA
atgcatcaccatcaccatcacggtggctttaacatgtttgcgtattattcaagtctggaaaaccattataatgccaagttcattagcaagatccgtggcgcaggcttcctggtgcacaccgtggaatgggtagctcgcgagaagattcatggaacgaactttagcgttatcattactccgaccgaaatcgtcccagccaaacgcacagggccgatcttggaagatgagtcgttctttggtcacgaaattatcatgaaaaaatatatggactccttcgtgaaggtgcagaacatgctgaatgccatggatcttgttagcgtgcaaatctttggcgaatttgcgggtggtggcattcagaaaggcgtcgattacggagacaaagatttctatgtgtttgacatcctgtctgatagcgggaacgagaaagtttactgggatgactatcgcgtcgaatcgttttgcaccactgtgggtctgaaattagcgcctctgctgggacgtggtagtttcgctgaactgtcccagtacccaaacgatttcaaaagcctggtgaaccgttataatgaattggttgacacggtcggcctggagatggccaataaacacgtctttggtccgcaagcgtcttctgaaactggcctggcagaaggctacgttcttaaacccgtctatccgcgcttctttaatgtgggtacgcgcgtggcgattaaatgcaagaactccaaattttcggagaaagccaagctggattcgccaattagtgcgaaggttgaactgacggagaacgataaacgtctgctcgaaatctttagcgagtatgttacctggaatcgcgtcagtaacgtactgtcacatattggctcagtgaccaccaaagattttgggcgtgtttcgggtctgacgatgaaagacatcattaatgaagcagcacgcgaaggccatgatctgttgttcgctgataacccgtcggcggtgctgaaggagctgactggcctcatccagaacacgattcgctccaaatggcacgaagttctggag

SEQ ID NO: 1796 - protein, 346 aa, synthetic construct
  REGION 1..346: note = variant of RNA ligase 2 from Klebsiella phage KP179
MHHHHHHGGFNMFAYYSSLENHYNAKFISKIRGAGFLVHTVEWVAREKIHGTNFSVIITPTEIVPAKRTGPILEDESFFGHEIIMKKYMDSFVKVQNMLNAMDLVSVQIFGEFAGGGIQKGVDYGDKDFYVFDILSDSGNEKVYWDDYRVESFCTTVGLKLAPLLGRGSFAELSQYPNDFKSLVNRYNELVDTVGLEMANKHVFGPQASSETGLAEGYVLKPVYPRFFNVGTRVAIKCKNSKFSEKAKLDSPISAKVELTENDKRLLEIFSEYVTWNRVSNVLSHIGSVTTKDFGRVSGLTMKDIINEAAREGHDLLFADNPSAVLKELTGLIQNTIRSKWHEVLE

SEQ ID NO: 1797 - DNA, 1038 bp, synthetic construct
  misc_feature 1..1038: note = variant of RNA ligase 2 from Klebsiella phage KP179
  source 1..1038: mol_type = other DNA
atgcatcaccatcaccatcacggtggctttaacatgtttgcgtattattcaagtctggaaaaccattataatgccaagttcattagcaagatccgtggcgcaggcttcctggtgcacaccgtggaatgggtagctcgcgagaagatccatggaacgaactttagcgttatcattactccgaccgaaatcgtcccagccaaacgcacagggccgatcttggaagatgagtcgttctttggtcacgaaattatcatgaaaaaatatatggactccttcgtgaaggtgcagaacatgctgaatgccatggatcttgttagcgtgcaaatctttggcgaatttgcgggtggtggcattcagaaaggcgtcgattacggagacaaagatttctatgtgtttgacatcctgtctgatagcgggaacgagaaagtttactgggatgactatcgcgtcgaatcgttttgcaccactgtgggtctgaaattagcgcctctgctgggacgtggtagtttcgctgaactgtcccagtacccaaacgatttcaaaagcctggtgaaccgttataatgaattggttgacacggtcggcctggagatggccaataaacacgtctttggtccgcaagcgtcttctgaaactggcctggcagaaggctacgttcttaaacccgtctatccgcgcttctttaatgtgggtacgcgcgtggcgattaaatgcaagaactccaaattttcggagaaagccaagaaagattcgccaattagtgcgaaggttgaactgacggagaacgataaacgtctgctcgaaatctttagcgagtatgttacctggaatcgcgtcagtaacgtactgtcacatattggctcagtgaccgccaaagattttgggcgtgtttcgggtctgacgatgaaagacatcattaacgaagcagcacgcgaaggccatgatctgttgttcgctgataacccgtcggcggtgctgaaggagctgactggcctcatccagaacacgattcgctccaaatggcacgaagttctggag

SEQ ID NO: 1798 - protein, 346 aa, synthetic construct
  REGION 1..346: note = variant of RNA ligase 2 from Klebsiella phage KP179
MHHHHHHGGFNMFAYYSSLENHYNAKFISKIRGAGFLVHTVEWVAREKIHGTNFSVIITPTEIVPAKRTGPILEDESFFGHEIIMKKYMDSFVKVQNMLNAMDLVSVQIFGEFAGGGIQKGVDYGDKDFYVFDILSDSGNEKVYWDDYRVESFCTTVGLKLAPLLGRGSFAELSQYPNDFKSLVNRYNELVDTVGLEMANKHVFGPQASSETGLAEGYVLKPVYPRFFNVGTRVAIKCKNSKFSEKAKKDSPISAKVELTENDKRLLEIFSEYVTWNRVSNVLSHIGSVTAKDFGRVSGLTMKDIINEAAREGHDLLFADNPSAVLKELTGLIQNTIRSKWHEVLE

SEQ ID NO: 1799 - DNA, 1038 bp, synthetic construct
  misc_feature 1..1038: note = variant of RNA ligase 2 from Klebsiella phage KP179
  source 1..1038: mol_type = other DNA
atgcatcaccatcaccatcacggtggctttaacatgtttgcgtattattcaagtctggaaaaccattataatgccaagttcattagcaagatccgtggcgcaggcttcctggtgcacaccgtggaatgggtagctcgcgagaagattcatggaacgaactttagcgttatcattactccgaccgaaatcgtcccagccaaacgcacagggccgatcttggaagatgagtcgttctttggtcacgaaattatcatgaaaaaatatatggactccttcaaaaaggtgcagaacatgctgaatgccatggatcttgttagcgtgcaaatctttggcgaatttgcgggtggtggcattcagaaaggcgtcgattacggagacaaagatttctatgtgtttgacatcctgtctgatagcgggaacgagaaagtttactgggatgactatcgcgtcgaatcgttttgcaccactgtgggtctgaaattagcgcctctgctgggacgtggtagtttcgctgaactgtcccagtacccaaacgatttcaaaagcctggtgaaccgttataatgaattggttgacacggtcggcctggagatggccaataaacacgtctttggtccgcaagcgtcttctgaaactggcctggcagaaggctacgttcttaaacccgtctatccgcgcttctttaatgtgggtacgcgcgtggcgattaaatgcaagaactccaaattttcggagaaagccaagctggattcgccaattagtgcgaaggttgaactgacggagaacgataaacgtctgctcgaaatctttagcgagtatgttacctggaatcgcgtcagtaacgtactgtcacatattggctcagtgaccgccaaagattttgggcgtgtttcgggtctgacgatgaaagacatcattaatgaagcagcacgcgaaggccatgatctgttgttcgctgataacccgtcggcggtgctgaaggagctgactggcctcatccagaacacgattcgctccaaatggcacgaagttctggag

SEQ ID NO: 1800 - protein, 346 aa, synthetic construct
  REGION 1..346: note = variant of RNA ligase 2 from Klebsiella phage KP179
MHHHHHHGGFNMFAYYSSLENHYNAKFISKIRGAGFLVHTVEWVAREKIHGTNFSVIITPTEIVPAKRTGPILEDESFFGHEIIMKKYMDSFKKVQNMLNAMDLVSVQIFGEFAGGGIQKGVDYGDKDFYVFDILSDSGNEKVYWDDYRVESFCTTVGLKLAPLLGRGSFAELSQYPNDFKSLVNRYNELVDTVGLEMANKHVFGPQASSETGLAEGYVLKPVYPRFFNVGTRVAIKCKNSKFSEKAKLDSPISAKVELTENDKRLLEIFSEYVTWNRVSNVLSHIGSVTAKDFGRVSGLTMKDIINEAAREGHDLLFADNPSAVLKELTGLIQNTIRSKWHEVLE

SEQ ID NO: 1801 - DNA, 1038 bp, synthetic construct
  misc_feature 1..1038: note = variant of RNA ligase 2 from Klebsiella phage KP179
  source 1..1038: mol_type = other DNA
atgcatcaccatcaccatcacggtggcagcaacatgtttgcgtattattcaagtctggaaaaccattataatgccaagttcattagcaagatccgtggtgcaggcttcctgatgcacaccgtggaatgggtagctcgcgagaagattcatggaacgaactttagcgttatcattactccgaccgaaatccagccagccaaacgcacagggccgatcttggaaggcgagtcgttctttggtcacgaaattatcatgaaaaaatatatggactccttcgtgaaggtgcagaacatgctgaatgccatggatcttgttagcgtgcaaatctttggcgaatttgcgggtggtggcattcagaaaggcgtcgattacggagacaaagatttctatgtgtttgacatcctgtctgatagcgggaacgagaaagtttactgggatgactatcgcgtcgaatcgttttgcaccactgtgggtctgaaattagcgcctctgctgggacgtggtagtttcgctgaactgtcccagtacccaaacgatttcaaaagcctggtgaaccgttataatgaattggttgacacggtcggcctggagatggccaataaacacgtctttggtccgcaagcgtcttctgaaactggcctggcagaaggctacgttcttaaacccgtcgcgccgcgcttctttaatgtgggtacgcgcgtggcgattaaatgcaagaactccaaattttcggagaaagccaagctggactcgccaattagtgcgaaggttgaactgacggagaacgataaacgtctgctcgaaatctttagcgagtatgttacctggaatcgcgtcagtaacgtactgtcacatattggctcagtgaccgcaaaagattttgggcgtgtttcgggtctgacgatgaaagacatcattaatgaagcagcacgcgaaggccatgatctgttgttcgctgataacccgtcggcggtgctgaaggagctgacaggcctcatccagaacacgattcgctccaaatggcacgaagttctggag

SEQ ID NO: 1802 - protein, 346 aa, synthetic construct
  REGION 1..346: note = variant of RNA ligase 2 from Klebsiella phage KP179
MHHHHHHGGSNMFAYYSSLENHYNAKFISKIRGAGFLMHTVEWVAREKIHGTNFSVIITPTEIQPAKRTGPILEGESFFGHEIIMKKYMDSFVKVQNMLNAMDLVSVQIFGEFAGGGIQKGVDYGDKDFYVFDILSDSGNEKVYWDDYRVESFCTTVGLKLAPLLGRGSFAELSQYPNDFKSLVNRYNELVDTVGLEMANKHVFGPQASSETGLAEGYVLKPVAPRFFNVGTRVAIKCKNSKFSEKAKLDSPISAKVELTENDKRLLEIFSEYVTWNRVSNVLSHIGSVTAKDFGRVSGLTMKDIINEAAREGHDLLFADNPSAVLKELTGLIQNTIRSKWHEVLE

SEQ ID NO: 1803 - DNA, 1038 bp, synthetic construct
  misc_feature 1..1038: note = variant of RNA ligase 2 from Klebsiella phage KP179
  source 1..1038: mol_type = other DNA
atgcatcaccatcaccatcacggtggcagcaacatgtttgcgtattattcaagtctggaaaaccattataatgccaagttcattagcaagatccgtggtgcaggcttcctgatgcacaccgtggaatgggtagctcgcgagaagattcatggaacgaactttagcgttatcattactccgaccgaaatcgtcccagccaaacgcacagggccgatcttggaaggcgagtcgttctttggtcacgaaattatcatgaaaaaatatatggactccttcgtgaaggtgcagaacatgctgaatgcgatggatcttgttagcgtgcaaatctttggcgaatttgcgggtggtggcattcagaaaggcgtcgattacggagacaaagatttctatgtgtttgacatcctgtctgatagcgggaacgagaaagtttactgggatgactatcgcgtcgaatcgttttgcaccactgtgggtctgaaattagcgcctctgctgggacgtggtagtttcgctgaactgtcccagtacccaaacgatttcaaaagcctggtgaaccgttataatgaattggttgacacggtcggcctggagatggccaataaacacgtctttggtccgcaagcgtcttctgaaactggcctggcagaaggctacgttcttaaacccgtcgcgccgcgcttctttaatgtgggtacgcgcgtggcgattaaatgcaagaactccaaattttcggagaaagccaagctggactcgccaattagtgcgaaggttgaactgacggagaacgataaacgtctgctcgaaatctttagcgagtatgttacctggaatcgcgtcagtaacgtactgtcacatattggctcagtgaccgcaaaagattttgggcgtgtttcgggtctgacgatgaaagacatcattaatgaagcagcacgcgaaggccatgatctgttgttcgctgataacccgtcggcggtgctgaaggagctgactggcctcatccagaacacgattcgctccaaatggcacgaagttctggag

SEQ ID NO: 1804 - protein, 346 aa, synthetic construct
  REGION 1..346: note = variant of RNA ligase 2 from Klebsiella phage KP179
MHHHHHHGGSNMFAYYSSLENHYNAKFISKIRGAGFLMHTVEWVAREKIHGTNFSVIITPTEIVPAKRTGPILEGESFFGHEIIMKKYMDSFVKVQNMLNAMDLVSVQIFGEFAGGGIQKGVDYGDKDFYVFDILSDSGNEKVYWDDYRVESFCTTVGLKLAPLLGRGSFAELSQYPNDFKSLVNRYNELVDTVGLEMANKHVFGPQASSETGLAEGYVLKPVAPRFFNVGTRVAIKCKNSKFSEKAKLDSPISAKVELTENDKRLLEIFSEYVTWNRVSNVLSHIGSVTAKDFGRVSGLTMKDIINEAAREGHDLLFADNPSAVLKELTGLIQNTIRSKWHEVLE

SEQ ID NO: 1805 - DNA, 1038 bp, synthetic construct
  misc_feature 1..1038: note = variant of RNA ligase 2 from Klebsiella phage KP179
  source 1..1038: mol_type = other DNA
atgcatcaccatcaccatcacggtggcagcaacatgtttgcgtattattcaagtctggaaaaccattataatgccaagttcattagcaagatccgtggtgcaggcttcctgatgcacaccgtggaatgggtagctcgcgagaagattcatggaacgaactttagcgttatcattactccgaccgaaatcgtcccagccaaacgcacagggccgatcttggaaggcgagtcgttctttggtcacgaaattatcatgaaaaaatatatggactccttcgtgaaggtgcagaacatgctgaatgccatggatcttgttagcgtgcaaatctttggcgaatttgcgggtggtggcattcagaaaggcgtcgattacggagacaaagatttctatgtgtttgacatcctgtctgatagcgggaacgagaaagtttactgggatgactatcgcgtcgaatcgttttgcaccactgtgggtctgaaattagcgcctctgctgggacgtggtagtttcgctgaactgtcccagtacccaaacgatttcaaaagcctggtgaaccgttataatgaattggttgacacggtcggcctggagatggccaataaacacgtctttggtccgcaagcgtcttctgaaactggcctggcagaaggctacgttcttaaacccgtccagccgcgcttctttaatgtgggtacgcgcgtggcgattaaatgcaagaactccaaattttcggagaaagccaagctggactcgccaattagtgcgaaggttgaactgacggagaacgataaacgtctgctcgaaatctttagcgagtatgttacctggaatcgcgtcagtaacgtactgtcacatattggctcagtgaccgcaaaagattttgggcgtgtttcgggtctgacgatgaaagacatcattaatgaagcagcacgcgaaggccatgatctgttgttcgctgataacccgtcggcggtgctgaaggagctgactggcctcatccagaacacgattcgctccaaatggcacgaagttctggag

SEQ ID NO: 1806 - protein, 346 aa, synthetic construct
  REGION 1..346: note = variant of RNA ligase 2 from Klebsiella phage KP179
MHHHHHHGGSNMFAYYSSLENHYNAKFISKIRGAGFLMHTVEWVAREKIHGTNFSVIITPTEIVPAKRTGPILEGESFFGHEIIMKKYMDSFVKVQNMLNAMDLVSVQIFGEFAGGGIQKGVDYGDKDFYVFDILSDSGNEKVYWDDYRVESFCTTVGLKLAPLLGRGSFAELSQYPNDFKSLVNRYNELVDTVGLEMANKHVFGPQASSETGLAEGYVLKPVQPRFFNVGTRVAIKCKNSKFSEKAKLDSPISAKVELTENDKRLLEIFSEYVTWNRVSNVLSHIGSVTAKDFGRVSGLTMKDIINEAAREGHDLLFADNPSAVLKELTGLIQNTIRSKWHEVLE

SEQ ID NO: 1807 - DNA, 1038 bp, synthetic construct
  misc_feature 1..1038: note = variant of RNA ligase 2 from Klebsiella phage KP179
  source 1..1038: mol_type = other DNA
atgcatcaccatcaccatcacggtggcagcaacatgtttgcgtattattcaagtctggaaaaccataccaatgccaagttcattagcaagatccgtggtgcaggcttcctgatgcacaccgtggaatgggtagctcgcgagaagattcatggaacgaactttagcgttatcattactccgaccgaaatcgtcccagccaaacgcacagggccgatcttggaaggcgagtcgttctttggtcacgaaattatcatgaaaaaatatatggactccttcgtgaaggtgcagaacatgctgaatccgatggatcttgttagcgtgcaaatctttggcgaatttgcgggtggtggcattcagaaaggcgtcgattacggagacaaagatttctatgtgtttgacatcctgtctgatagcgggaacgagaaagtttactgggatgactatcgcgtcgaatcgttttgcaccactgtgggtctgaaattagcgcctctgctgggacgtggtagtttcgctgaactgtcccagtacccaaacgatttcaaaagcctggtgaaccgttataatgaattggttgacacggtcggcctggagatggccaataaacacgtctttggtccgcaagcgtcttctgaaactggcctggcagaaggctacgttcttaaacccgtctatccgcgcttctttaatgtgggtacgcgcgtggcgattaaatgcaagaacagcaaattttcggagaaagccaagctggactcgccaattagtgcgaaggttgaactgacggagaacgataaacgtctgctcgaaatctttagcgagtatgttacctggaatcgcgtcagtaacgtactgtcacatattggctcagtgaccgcaaaagattttgggcgtgtttcgggtctgacgatgaaagacatcattaaagaagcagcacgcgaaggccatgatctgttgttcgctgataacccgtcggcggtgctgaaggagctgacaggcctcatccagaacacgattcgctccaaatggcacgaagttctggag

SEQ ID NO: 1808 - protein, 346 aa, synthetic construct
  REGION 1..346: note = variant of RNA ligase 2 from Klebsiella phage KP179
MHHHHHHGGSNMFAYYSSLENHTNAKFISKIRGAGFLMHTVEWVAREKIHGTNFSVIITPTEIVPAKRTGPILEGESFFGHEIIMKKYMDSFVKVQNMLNPMDLVSVQIFGEFAGGGIQKGVDYGDKDFYVFDILSDSGNEKVYWDDYRVESFCTTVGLKLAPLLGRGSFAELSQYPNDFKSLVNRYNELVDTVGLEMANKHVFGPQASSETGLAEGYVLKPVYPRFFNVGTRVAIKCKNSKFSEKAKLDSPISAKVELTENDKRLLEIFSEYVTWNRVSNVLSHIGSVTAKDFGRVSGLTMKDIIKEAAREGHDLLFADNPSAVLKELTGLIQNTIRSKWHEVLE

SEQ ID NO: 1809 - DNA, 1038 bp, synthetic construct
  misc_feature 1..1038: note = variant of RNA ligase 2 from Klebsiella phage KP179
  source 1..1038: mol_type = other DNA
atgcatcaccatcaccatcacggtggcagcaacatgtttgcgtattattcaagtctggaaaaccataccaatgccaagttcattagcaagatccgtggtgcaggcttcctgatgcacaccgtggaatgggtagctcgcgagaagattcatggaacgaactttagcgttatcattactccgaccgaaatcgtgccagccaaacgcacagggccgatcttggaaggcgagtcgttctttggtcacgaaattatcatgaaaaaatatatggactccttcgtgaaggtgcagaacatgctgaatgccatggatcttgttagcgtgcaaatctttggcgaatttgcgggtggtggcattcagaaaggcgtcgattacggagacaaagatttctatgtgtttgacatcctgtctgatagcgggaacgagaaagtttactgggatgactatcgcgtcgaatcgttttgcaccactgtgggtctgaaattagcgcctctgctgggacgtggtagtttcgctgaactgtcccagtacccaaacgatttcaaaagcctggtgaaccgttataatgaattggttgacacggtcggcctggagatggccaataaacacgtctttggtccgcaagcgtcttctgaaactggcctggcagaaggctacgttcttaaacccgtctatccgcgcttctttaatgtgggtacgcgcgtggcgattaaatgcaagaactccaaattttcggagaaagccaagctggactcgccaattagcgcgaaggttgaactgacggagaacgataaacgtctgctctttatctttagcgagtatgttacctggaatcgcgtcagtaacgtactgtcacatattggctcagtgaccgcaaaagattttgggcgtgtttcgggtctgacgatgaaagacatcattaatgaagcagcacgcgaaggccatgatctgttgttcgctgataacccgtcggcggtgctgaaggagctgactggcctcatccagaacacgattcgctccaaatggcacgaagttctggag

SEQ ID NO: 1810 - protein, 346 aa, synthetic construct
  REGION 1..346: note = variant of RNA ligase 2 from Klebsiella phage KP179
MHHHHHHGGSNMFAYYSSLENHTNAKFISKIRGAGFLMHTVEWVAREKIHGTNFSVIITPTEIVPAKRTGPILEGESFFGHEIIMKKYMDSFVKVQNMLNAMDLVSVQIFGEFAGGGIQKGVDYGDKDFYVFDILSDSGNEKVYWDDYRVESFCTTVGLKLAPLLGRGSFAELSQYPNDFKSLVNRYNELVDTVGLEMANKHVFGPQASSETGLAEGYVLKPVYPRFFNVGTRVAIKCKNSKFSEKAKLDSPISAKVELTENDKRLLFIFSEYVTWNRVSNVLSHIGSVTAKDFGRVSGLTMKDIINEAAREGHDLLFADNPSAVLKELTGLIQNTIRSKWHEVLE

SEQ ID NO: 1811 - DNA, 1038 bp, synthetic construct
  misc_feature 1..1038: note = variant of RNA ligase 2 from Klebsiella phage KP179
  source 1..1038: mol_type = other DNA
atgcatcaccatcaccatcacggtggcagcaacatgtttgcgtattattcaagtctggaaaaccataccaatgccaagttcattagcaagatccgtggtgcaggcttcaaaatgcacaccgtggaatgggtagctcgcgagaagattcatggaacgaactttagcgttatcattactccgaccgaaatccagccagccaaacgcacagggccgatcttggaaggcgagtcgttctttggtcatgaaattatcatgaaaaaatatatggactccttcgtgaaggtgcagaacatgctgaatgcgatggatcttgttagcgtgcaaatctttggcgaatttgcgggtggtggcattcagaaaggcgtcgattacggagacaaagatttctatgtgtttgacatcctgtctgatagcgggaacgagaaagtttactgggatgactatcgcgtcgaatcgttttgcaccactgtgggtctgaaattagcgcctctgctgggacgtggtagtttcgctgaactgtcccagtacccaaacgatttcaaaagcctggtgaaccgttataatgaattggttgacacggtcggcctggagatggccaataaacacgtctttggtccgcaagcgtcttctgaaactggcctggcagaaggctacgttcttaaacccgtcgcgccgcgcttctttaatgtgggtacgcgcgtggcgattaaatgcaagaactccaaattttcggagaaagccaagctggactcgccaattaaagcgaaggttgaactgacggagaacgataaacgtctgctcgaaatctttagcgagtatgttacctggaatcgcgtcagtaacgtactgtcacatattggctcagtgaccgcaaaagattttgggcgtgtttcgggtctgacgatgaaagacatcattaatgaagcagcacgcgaaggccatgatctgttgttcgctgataacccgtcggcggtgctgaaggagctgactggcctcatccagaacacgattcgctccaaatggcacgaagttctggag

SEQ ID NO: 1812 - protein, 346 aa, synthetic construct
  REGION 1..346: note = variant of RNA ligase 2 from Klebsiella phage KP179
MHHHHHHGGSNMFAYYSSLENHTNAKFISKIRGAGFKMHTVEWVAREKIHGTNFSVIITPTEIQPAKRTGPILEGESFFGHEIIMKKYMDSFVKVQNMLNAMDLVSVQIFGEFAGGGIQKGVDYGDKDFYVFDILSDSGNEKVYWDDYRVESFCTTVGLKLAPLLGRGSFAELSQYPNDFKSLVNRYNELVDTVGLEMANKHVFGPQASSETGLAEGYVLKPVAPRFFNVGTRVAIKCKNSKFSEKAKLDSPIKAKVELTENDKRLLEIFSEYVTWNRVSNVLSHIGSVTAKDFGRVSGLTMKDIINEAAREGHDLLFADNPSAVLKELTGLIQNTIRSKWHEVLE

SEQ ID NO: 1813 - DNA, 1038 bp, synthetic construct
  misc_feature 1..1038: note = variant of RNA ligase 2 from Klebsiella phage KP179
  source 1..1038: mol_type = other DNA
atgcatcaccatcaccatcacggtggcagcaacatgtttgcgtattattcaagtctggaaaaccataccaatgccaagttcattagcaagatccgtggtgcaggcttcctgatgcacaccgtggaatgggtagctcgcgagaagattcatggaacgaactttagcgttatcattactccgaccgaaatccagccagccaaacgcacagggccgatcttggaaggcgagtcgttctttggttatgaaattatcatgaaaaaatatatggactccttcgtgaaggtgcagaacatgctgaatgcgatggatcttgttagcgtgcaaatctttggcgaatttgcgggtggtggcattcagaaaggcgtcgattacggagacaaagatttctatgtgtttgacatcctgtctgatagcgggaacgagaaagtttactgggatgactatcgcgtcgaatcgttttgcaccactgtgggtctgaaattagcgcctctgctgggacgtggtagtttcgctgaactgtcccagtacccaaacgatttcaaaagcctggtgaaccgttataatgaattggttgacacggtcggcctggagatggccaataaacacgtctttggtccgcaagcgtcttctgaaactggcctggcagaaggctacgttcttaaacccgtctatccgcgcttctttaatgtgggtacgcgcgtggcgattaaatgcaagaactccaaattttcggagaaagccaagctggactcgccaattagcgcgaaggttgaactgacggagaacgataaacgtctgctcgaaatctttagcgagtatgttacctggaatcgcgtcagtaacgtactgtcacatattggctcagtgaccgcaaaagattttgggcgtgtttcgggtctgacgatgaaagacatcattaatgaagcagcacgcgaaggccatgatctgttgttcgctgataacccgtcggcggtgctgaaggagctgacaggcctcatccagaacacgattcgctccaaatggcacgaagttctggag

SEQ ID NO: 1814 - protein, 346 aa, synthetic construct
  REGION 1..346: note = variant of RNA ligase 2 from Klebsiella phage KP179
MHHHHHHGGSNMFAYYSSLENHTNAKFISKIRGAGFLMHTVEWVAREKIHGTNFSVIITPTEIQPAKRTGPILEGESFFGYEIIMKKYMDSFVKVQNMLNAMDLVSVQIFGEFAGGGIQKGVDYGDKDFYVFDILSDSGNEKVYWDDYRVESFCTTVGLKLAPLLGRGSFAELSQYPNDFKSLVNRYNELVDTVGLEMANKHVFGPQASSETGLAEGYVLKPVYPRFFNVGTRVAIKCKNSKFSEKAKLDSPISAKVELTENDKRLLEIFSEYVTWNRVSNVLSHIGSVTAKDFGRVSGLTMKDIINEAAREGHDLLFADNPSAVLKELTGLIQNTIRSKWHEVLE

SEQ ID NO: 1815 - DNA, 1038 bp, synthetic construct
  misc_feature 1..1038: note = variant of RNA ligase 2 from Klebsiella phage KP179
  source 1..1038: mol_type = other DNA
atgcatcaccatcaccatcacggtggcagcaacatgtttgcgtattattcaagtctggaaaaccataccaatgccaagttcattagcaagatccgtggtgcaggcttcctgatgcacaccgtggaatgggtagctcgcgagaagattcatggaacgaactttagcgttatcattactccgaccgaaatcgtgccagccaaacgcacagggccgatcttggaaggcgagtcgttctttggtcacgaaattatcatgaaaaaatatatggactccttcgtgaaggtgcagaacatgctgaatgccatggatcttgttagcgtgcaaatctttggcgaatttgcgggtggtggcattcagaaaggcgtcgattacggagacaaagatttctatgtgtttgacatcctgtctgatagcgggaacgagaaagtttactgggatgactatcgcgtcgaatcgttttgcaccactgtgggtctgaaattagcgcctctgctgggacgtggtagtttcgctgaactgtcccagtacccaaacgatttcaaaagcctggtgaaccgttataatgaattggttgacacggtcggcctggagatggccaataaacacgtctttggtccgcaagcgtcttctgaaactggcctggcagaaggctacgttcttaaacccgtcgcgccgcgcttctttaatgtgggtacgcgcgtggcgattaaatgcaagaactccaaattttcggagaaagccaagctggactcgccaattagcgcgaaggttgaactgacggagaacgataaacgtctgctctttatctttagcgagtatgttacctggaatcgcgtcagtaacgtactgtcacatattggctcagtgaccgcaaaagattttgggcgtgtttcgggtctgacgatgaaagacatcattaatgaagcagcacgcgaaggccatgatctgttgttcgctgataacccgtcggcggtgctgaaggagctgactggcctcatccagaacacgattcgctccaaatggcacgaagttctggag

SEQ ID NO: 1816 - protein, 346 aa, synthetic construct
  REGION 1..346: note = variant of RNA ligase 2 from Klebsiella phage KP179
MHHHHHHGGSNMFAYYSSLENHTNAKFISKIRGAGFLMHTVEWVAREKIHGTNFSVIITPTEIVPAKRTGPILEGESFFGHEIIMKKYMDSFVKVQNMLNAMDLVSVQIFGEFAGGGIQKGVDYGDKDFYVFDILSDSGNEKVYWDDYRVESFCTTVGLKLAPLLGRGSFAELSQYPNDFKSLVNRYNELVDTVGLEMANKHVFGPQASSETGLAEGYVLKPVAPRFFNVGTRVAIKCKNSKFSEKAKLDSPISAKVELTENDKRLLFIFSEYVTWNRVSNVLSHIGSVTAKDFGRVSGLTMKDIINEAAREGHDLLFADNPSAVLKELTGLIQNTIRSKWHEVLE

SEQ ID NO: 1817 - DNA, 1038 bp, synthetic construct
  misc_feature 1..1038: note = variant of RNA ligase 2 from Klebsiella phage KP179
  source 1..1038: mol_type = other DNA
atgcatcaccatcaccatcacggtggcagcaacatgtttgcgtattattcaagtctggaaaaccataccaatgccaagttcattagcaagatccgtggtgcaggcttcctgatgcacaccgtggaatgggtagctcgcgagaagattcatggaacgaactttagcgttatcattactccgaccgaaatcgtcccagccaaacgcacagggccgatcttggaaggcgagtcgttctttggtcacgaaattatcatgaaaaaatatatggactccttcgtgaaggtgcagaacatgctgaatgcgatggatcttgttagcgtgcaaatctttggcgaatttgcgggtggtggcattcagaaaggcgtcgattacggagacaaagatttctatgtgtttgacatcctgtctgatagcgggaacgagaaagtttactgggatgactatcgcgtcgaatcgttttgcaccactgtgggtctgaaattagcgcctctgctgggacgtggtagtttcgctgaactgtcccagtacccaaacgatttcaaaagcctggtgaaccgttataatgaattggttgacacggtcggcctggagatggccaataaacacgtctttggtccgcaagcgtcttctgaaactggcctggcagaaggctacgttcttaaacccgtcgcgccgcgcttctttaatgtgggtacgcgcgtggcgattaaatgcaagaactccaaattttcggagaaagccaagctggactcgccaattaaagcgaaggttgaactgacggagaacgataaacgtctgctcgaaatctttagcgagtatgttacctggaatcgcgtcagtaacgtactgtcacatattggctcagtgaccgcaaaagattttgggcgtgtttcgggtctgacgatgaaagacatcattaatgaagcagcacgcgaaggccatgatctgttgttcgctgataacccgtcggcggtgctgaaggagctgacaggcctcatccagaacacgattcgctccaaatggcacgaagttctggag

SEQ ID NO: 1818 - protein, 346 aa, synthetic construct
  REGION 1..346: note = variant of RNA ligase 2 from Klebsiella phage KP179
MHHHHHHGGSNMFAYYSSLENHTNAKFISKIRGAGFLMHTVEWVAREKIHGTNFSVIITPTEIVPAKRTGPILEGESFFGHEIIMKKYMDSFVKVQNMLNAMDLVSVQIFGEFAGGGIQKGVDYGDKDFYVFDILSDSGNEKVYWDDYRVESFCTTVGLKLAPLLGRGSFAELSQYPNDFKSLVNRYNELVDTVGLEMANKHVFGPQASSETGLAEGYVLKPVAPRFFNVGTRVAIKCKNSKFSEKAKLDSPIKAKVELTENDKRLLEIFSEYVTWNRVSNVLSHIGSVTAKDFGRVSGLTMKDIINEAAREGHDLLFADNPSAVLKELTGLIQNTIRSKWHEVLE

SEQ ID NO: 1819 - DNA, 1038 bp, synthetic construct
  misc_feature 1..1038: note = variant of RNA ligase 2 from Klebsiella phage KP179
  source 1..1038: mol_type = other DNA
atgcatcaccatcaccatcacggtggcagcaacatgtttgcgtattattcaagtctggaaaaccataccaatgccaagttcattagcaagatccgtggtgcaggcttcctgatgcacaccgtggaatgggtagctcgcgagaagattcatggaacgaactttagcgttatcattactccgaccgaaatcgtgccagccaaacgcacagggccgatcttggaaggcgagtcgttctttggtcatgaaattatcatgaaaaaatatatggactccttcgtgaaggtgcagaacatgctgaatgccatggatcttgttagcgtgcaaatctttggcgaatttgcgggtggtggcattcagaaaggcgtcgattacggagacaaagatttctatgtgtttgacatcctgtctgatagcgggaacgagaaagtttactgggatgactatcgcgtcgaatcgttttgcaccactgtgggtctgaaattagcgcctctgctgggacgtggtagtttcgctgaactgtcccagtacccaaacgatttcaaaagcctggtgaaccgttataatgaattggttgacacggtcggcctggagatggccaataaacacgtctttggtccgcaagcgtcttctgaaactggcctggcagaaggctacgttcttaaacccgtctatccgcgcttctttaatgtgggtacgcgcgtggcgattaaatgcaagaactccaaattttcggagaaagccaagctggactcgccaattagtgcgaaggttgaactgacggagaacgataaacgtctgctcgaaatctttagcgagtatgttacctggaatcgcgtcagtaacgtactgtcacatattggctcagtgaccgcaaaagattttgggcgtgtttcgggtctgacgatgaaagacatcattaatgaagcagcacgcgaaggccatgatctgttgttcgctgataacccgtcggcggtgctgaaggagctgacaggcctcatccagaacacgattcgctccaaatggcacgaagttctggag

SEQ ID NO: 1820 - protein, 346 aa, synthetic construct
  REGION 1..346: note = variant of RNA ligase 2 from Klebsiella phage KP179
MHHHHHHGGSNMFAYYSSLENHTNAKFISKIRGAGFLMHTVEWVAREKIHGTNFSVIITPTEIVPAKRTGPILEGESFFGHEIIMKKYMDSFVKVQNMLNAMDLVSVQIFGEFAGGGIQKGVDYGDKDFYVFDILSDSGNEKVYWDDYRVESFCTTVGLKLAPLLGRGSFAELSQYPNDFKSLVNRYNELVDTVGLEMANKHVFGPQASSETGLAEGYVLKPVYPRFFNVGTRVAIKCKNSKFSEKAKLDSPISAKVELTENDKRLLEIFSEYVTWNRVSNVLSHIGSVTAKDFGRVSGLTMKDIINEAAREGHDLLFADNPSAVLKELTGLIQNTIRSKWHEVLE

SEQ ID NO: 1821 - DNA, 1038 bp, synthetic construct
  misc_feature 1..1038: note = variant of RNA ligase 2 from Klebsiella phage KP179
  source 1..1038: mol_type = other DNA
atgcatcaccatcaccatcacggtggcagcaacatgtttgcgtattattcaagtctggaaaaccataccaatgccaagttcattagcaagatccgtggtgcaggcttcctgatgcacaccgtggaatgggtagctcgcgagaagattcatggaacgaactttagcgttatcattactccgaccgaaatccagccagccaaacgcacagggccgatcttggaaggcgagtcgttctttggtcacgaaattatcatgaaaaaatatatggactccttcgtgaaggtgcagaacatgctgaatgccatggatcttgttagcgtgcaaatctttggcgaatttgcgggtggtggcattcagaaaggcgtcgattacggagacaaagatttctatgtgtttgacatcctgtctgatagcgggaacgagaaagtttactgggatgactatcgcgtcgaatcgttttgcaccactgtgggtctgaaattagcgcctctgctgggacgtggtagtttcgctgaactgtcccagtacccaaacgatttcaaaagcctggtgaaccgttataatgaattggttgacacggtcggcctggagatggccaataaacacgtctttggtccgcaagcgtcttctgaaactggcctggcagaaggctacgttcttaaacccgtcgcgccgcgcttctttaatgtgggtacgcgcgtggcgattaaatgcaagaactccaaattttcggagaaagccaagctggactcgccaattagcgcgaaggttgaactgacggagaacgataaacgtctgctcgaaatctttagcgagtatgttacctggaatcgcgtcagtaacgtactgtcacatattggctcagtgaccgcaaaagattttgggcgtgtttcgggtctgacgatgaaagacatcattaatgaagcagcacgcgaaggccatgatctgttgttcgctgataacccgtcggcggtgctgaaggagctgactggcctcatccagaacacgattcgctccaaatggcacgaagttctggag

SEQ ID NO: 1822 - protein, 346 aa, synthetic construct
  REGION 1..346: note = variant of RNA ligase 2 from Klebsiella phage KP179
MHHHHHHGGSNMFAYYSSLENHTNAKFISKIRGAGFLMHTVEWVAREKIHGTNFSVIITPTEIQPAKRTGPILEGESFFGHEIIMKKYMDSFVKVQNMLNAMDLVSVQIFGEFAGGGIQKGVDYGDKDFYVFDILSDSGNEKVYWDDYRVESFCTTVGLKLAPLLGRGSFAELSQYPNDFKSLVNRYNELVDTVGLEMANKHVFGPQASSETGLAEGYVLKPVAPRFFNVGTRVAIKCKNSKFSEKAKLDSPISAKVELTENDKRLLEIFSEYVTWNRVSNVLSHIGSVTAKDFGRVSGLTMKDIINEAAREGHDLLFADNPSAVLKELTGLIQNTIRSKWHEVLE

SEQ ID NO: 1823 - DNA, 1038 bp, synthetic construct
  misc_feature 1..1038: note = variant of RNA ligase 2 from Klebsiella phage KP179
  source 1..1038: mol_type = other DNA
atgcatcaccatcaccatcacggtggcagcaacatgtttgcgtattattcaagtctggaaaaccattataatgccaagttcattagcaagatccgtggtgcaggcttcctgatgcacaccgtggaatgggtagctcgcgagaagattcatggaacgaactttagcgttatcattactccgaccgaaatccagccagccaaacgcacagggccgatcttggaaggcgagtcgttctttggtcacgaaattatcatgaaaaaatatatggactccttcgtgaaggtgcagaacatgctgaatgcgatggatcttgttagcgtgcaaatctttggcgaatttgcgggtggtggcattcagaaaggcgtcgattacggagacaaagatttctatgtgtttgacatcctgtctgatagcgggaacgagaaagtttactgggatgactatcgcgtcgaatcgttttgcaccactgtgggtctgaaattagcgcctctgctgggacgtggtagtttcgctgaactgtcccagtacccaaacgatttcaaaagcctggtgaaccgttataatgaattggttgacacggtcggcctggagatggccaataaacacgtctttggtccgcaagcgtcttctgaaactggcctggcagaaggctacgttcttaaacccgtctatccgcgcttctttaatgtgggtacgcgcgtggcgattaaatgcaagaacagcaaattttcggagaaagccaagctggactcgccaattagcgcgaaggttgaactgacggagaacgataaacgtctgctcgaaatctttagcgagtatgttacctggaatcgcgtcagtaacgtactgtcacatattggctcagtgaccgcaaaagattttgggcgtgtttcgggtctgacgatgaaagacatcattaatgaagcagcacgcgaaggccatgatctgttgttcgctgataacccgtcggcggtgctgaaggagctgacaggcctcatccagaacacgattcgctccaaatggcacgaagttctggag

SEQ ID NO: 1824 - protein, 346 aa, synthetic construct
  REGION 1..346: note = variant of RNA ligase 2 from Klebsiella phage KP179
MHHHHHHGGSNMFAYYSSLENHYNAKFISKIRGAGFLMHTVEWVAREKIHGTNFSVIITPTEIQPAKRTGPILEGESFFGHEIIMKKYMDSFVKVQNMLNAMDLVSVQIFGEFAGGGIQKGVDYGDKDFYVFDILSDSGNEKVYWDDYRVESFCTTVGLKLAPLLGRGSFAELSQYPNDFKSLVNRYNELVDTVGLEMANKHVFGPQASSETGLAEGYVLKPVYPRFFNVGTRVAIKCKNSKFSEKAKLDSPISAKVELTENDKRLLEIFSEYVTWNRVSNVLSHIGSVTAKDFGRVSGLTMKDIINEAAREGHDLLFADNPSAVLKELTGLIQNTIRSKWHEVLE

SEQ ID NO: 1825 - DNA, 1038 bp, synthetic construct
  misc_feature 1..1038: note = variant of RNA ligase 2 from Klebsiella phage KP179
  source 1..1038: mol_type = other DNA
atgcatcaccatcaccatcacggtggctctaacatgtttgcgtattattcaagtctggaaaaccattataatgccaagttcattagcaagatccgtggcgcaggcttcctgatgcacaccgtggaatgggtagctcgcgagaagattcatggaacgaactttagcgttatcattactccgaccgaaatcgtcccagccaaacgcacagggccgatcttggaagatgagtcgttctttggtcacgaaattatcatgaaaaaatatatggactccttcgtgaaggtgcagaacatgctgaatgccatggatcttgttagcgtgcaaatctttggcgaatttgcgggtggtggcattcagaaaggcgtcgattacggagacaaagatttctatgtgtttgacatcctgtctgatagcgggaacgagaaagtttactgggatgactatcgcgtcgaatcgttttgcaccactgtgggtctgaaattagcgcctctgctgggacgtggtagtttcgctgaactgtcccagtacccaaacgatttcaaaagcctggtgaaccgttataatgaattggttgacacggtcggcctggagatggccaataaacacgtctttggtccgcaagcgtcttctgaaactggcctggcagaaggctacgttcttaaacccgtctatccgcgcttctttaatgtgggtacgcgcgtggcgattaaatgcaagaactccaaattttcggagaaagccaagaaagattcgccaattagtgcgaaggttgaactgacggagaacgataaacgtctgctcgaaatctttagcgagtatgttacctggaatcgcgtcagtaacgtactgtcacatattggctcagtgaccgcaaaagattttgggcgtgtttcgggtctgacgatgaaagacatcattcgcgaagcagcacgcgaaggccatgatctgttgttcgctgataacccgtcggcggtgctgaaggagctgactggcctcatccagaacacgattcgctccaaatggcacgaagttctggag

SEQ ID NO: 1826 - protein, 346 aa, synthetic construct
  REGION 1..346: note = variant of RNA ligase 2 from Klebsiella phage KP179
MHHHHHHGGSNMFAYYSSLENHYNAKFISKIRGAGFLMHTVEWVAREKIHGTNFSVIITPTEIVPAKRTGPILEDESFFGHEIIMKKYMDSFVKVQNMLNAMDLVSVQIFGEFAGGGIQKGVDYGDKDFYVFDILSDSGNEKVYWDDYRVESFCTTVGLKLAPLLGRGSFAELSQYPNDFKSLVNRYNELVDTVGLEMANKHVFGPQASSETGLAEGYVLKPVYPRFFNVGTRVAIKCKNSKFSEKAKKDSPISAKVELTENDKRLLEIFSEYVTWNRVSNVLSHIGSVTAKDFGRVSGLTMKDIIREAAREGHDLLFADNPSAVLKELTGLIQNTIRSKWHEVLE

SEQ ID NO: 1827 - DNA, 1038 bp, synthetic construct
  misc_feature 1..1038: note = variant of RNA ligase 2 from Klebsiella phage KP179
  source 1..1038: mol_type = other DNA
atgcatcaccatcaccatcacggtggctctaacatgtttgcgtattattcaagtctggaaaaccattataatgccaagttcattagcaagatccgtggcgcaggcttcctgatgcacaccgtggaatgggtagctcgcgagaagattcatggaacgaactttagcgttatcattactccgaccgaaatcgtcccagccaaacgcacagggccgatcttggaaggcgagtcgttctttggtcacgaaattatcatgaaaaaatatatggactccttcaaaaaggtgcagaacatgctgaatgccatggatcttgttagcgtgcaaatctttggcgaatttgcgggtggtggcattcagaaaggcgtcgattacggagacaaagatttctatgtgtttgacatcctgtctgatagcgggaacgagaaagtttactgggatgactatcgcgtcgaatcgttttgcaccactgtgggtctgaaattagcgcctctgctgggacgtggtagtttcgctgaactgtcccagtacccaaacgatttcaaaagcctggtgaaccgttataatgaattggttgacacggtcggcctggagatggccaataaacacgtctttggtccgcaagcgtcttctgaaactggcctggcagaaggctacgttcttaaacccgtctatccgcgcttctttaatgtgggtacgcgcgtggcgattaaatgcaagaactccaaattttcggagaaagccaagctggactcgccaattagtgcgaaggttgaactgacggagaacgataaacgtctgctcgaaatctttagcgagtatgttacctggaatcgcgtcagtaacgtactgtcacatattggctcagtgaccgcaaaagattttgggcgtgtttcgggtctgacgatgaaagacatcattaatgaagcagcacgcgaaggccatgatctgttgttcgctgataacccgtcggcggtgctgaaggagctgactggcctcatccagaacacgattcgctccaaatggcacgaagttctggag

SEQ ID NO: 1828 - protein, 346 aa, synthetic construct
  REGION 1..346: note = variant of RNA ligase 2 from Klebsiella phage KP179
MHHHHHHGGSNMFAYYSSLENHYNAKFISKIRGAGFLMHTVEWVAREKIHGTNFSVIITPTEIVPAKRTGPILEGESFFGHEIIMKKYMDSFKKVQNMLNAMDLVSVQIFGEFAGGGIQKGVDYGDKDFYVFDILSDSGNEKVYWDDYRVESFCTTVGLKLAPLLGRGSFAELSQYPNDFKSLVNRYNELVDTVGLEMANKHVFGPQASSETGLAEGYVLKPVYPRFFNVGTRVAIKCKNSKFSEKAKLDSPISAKVELTENDKRLLEIFSEYVTWNRVSNVLSHIGSVTAKDFGRVSGLTMKDIINEAAREGHDLLFADNPSAVLKELTGLIQNTIRSKWHEVLE

SEQ ID NO: 1829 - DNA, 1038 bp, synthetic construct
  misc_feature 1..1038: note = variant of RNA ligase 2 from Klebsiella phage KP179
  source 1..1038: mol_type = other DNA
atgcatcaccatcaccatcacggtggctctaacatgtttgcgtattattcaagtctggaaaaccattataatgccaagttcattagcaagatccgtgtcgcaggcttcctggcgcacaccgtggaatgggtagctcgcgagaagattcatggaacgaactttagcgttatcattactccgaccgaaatcgtcccagccaaacgcacagggccgatcttggaagatgagtcgttctttggtcacgaaattatcatgaaaaaatatatggactccttcgtgaaggtgcagaacatgctgaatgccatggatcttgttagcgtgcaaatctttggcgaatttgcgggtggtggcattcagaaaggcgtcgattacggagacaaagatttctatgtgtttgacatcctgtctgatagcgggaacgagaaagtttactgggatgactatcgcgtcgaatcgttttgcaccactgtgggtctgaaattagcgcctctgctgggacgtggtagtttcgctgaactgtcccagtacccaaacgatttcaaaagcctggtgaaccgttataatgaattggttgacacggtcggcctggagatggccaataaacacgtctttggtccgcaagcgtcttctgaaactggcctggcagaaggctacgttcttaaacccgtctatccgcgcttctttaatgtgggtacgcgcgtggcgattaaatgcaagaactccaaattttcggagaaagccaagaaagattcgccaattagtgcgaaggttgaactgacggagaacgataaacgtctgctcgaaatctttagcgagtatgttacctggaatcgcgtcagtaacgtactgtcacatattggctcagtgaccgcaaaagattttgggcgtgtttcgggtctgacgatgaaagacatcattaatgaagcagcacgcgaaggccatgatctgttgttcgctgataacccgtcggcggtgctgaaggagctgactggcctcatccagaacacgattcgctccaaatggcacgaagttctggag

SEQ ID NO: 1830 - protein, 346 aa, synthetic construct
  REGION 1..346: note = variant of RNA ligase 2 from Klebsiella phage KP179
MHHHHHHGGSNMFAYYSSLENHYNAKFISKIRVAGFLAHTVEWVAREKIHGTNFSVIITPTEIVPAKRTGPILEDESFFGHEIIMKKYMDSFVKVQNMLNAMDLVSVQIFGEFAGGGIQKGVDYGDKDFYVFDILSDSGNEKVYWDDYRVESFCTTVGLKLAPLLGRGSFAELSQYPNDFKSLVNRYNELVDTVGLEMANKHVFGPQASSETGLAEGYVLKPVYPRFFNVGTRVAIKCKNSKFSEKAKKDSPISAKVELTENDKRLLEIFSEYVTWNRVSNVLSHIGSVTAKDFGRVSGLTMKDIINEAAREGHDLLFADNPSAVLKELTGLIQNTIRSKWHEVLE

SEQ ID NO: 1831 - DNA, 1038 bp, synthetic construct
  misc_feature 1..1038: note = variant of RNA ligase 2 from Klebsiella phage KP179
  source 1..1038: mol_type = other DNA
atgcatcaccatcaccatcacggtggcagcaacatgtttgcgtattattcaagtctggaaaaccattataatgccaagttcattagcaagatccgtggtgcaggcttcctgatgcacaccgtggaatgggtagctcgcgagaagattcatggaacgaactttagcgttatcattactccgaccgaaatcgtcccagccaaacgcacagggccgatcttggaagatgagtcgttctttggtcacgaaattatcatgaaaaaatatatggactccttcgtgaaggtgcagaacatgctgaatgccatggatcttgttagcgtgcaaatctttggcgaatttgcgggtggtggcattcagaaaggcgtcgattacggagacaaagatttctatgtgtttgacatcctgtctgatagcgggaacgagaaagtttactgggatgactatcgcgtcgaatcgttttgcaccactgtgggtctgaaattagcgcctctgctgggacgtggtagtttcgctgaactgtcccagtacccaaacgatttcaaaagcctggtgaaccgttataatgaattggttgacacggtcggcctggagatggccaataaacacgtctttggtccgcaagcgtcttctgaaactggcctggcagaaggctacgttcttaaacccgtctatccgcgcttctttaatgtgggtacgcgcgtggcgattaaatgcaagaactccaaattttcggagaaagccaagaaagattcgccaattagtgcgaaggttgaactgacggagaacgataaacgtctgctcgaaatctttagcgagtatgttacctggaatcgcgtcagtaacgtactgtcacatattggctcagtgaccgcaaaagattttgggcgtgtttcgggtctgacgatgaaagacatcattaatgaagcagcacgcgaaggccatgatctgttgttcgctgataacccgtcggcggtgctgaaggagctgactggcctcatccagaacacgattcgctccaaatggcacgaagttctggag

SEQ ID NO: 1832 - protein, 346 aa, synthetic construct
  REGION 1..346: note = variant of RNA ligase 2 from Klebsiella phage KP179
MHHHHHHGGSNMFAYYSSLENHYNAKFISKIRGAGFLMHTVEWVAREKIHGTNFSVIITPTEIVPAKRTGPILEDESFFGHEIIMKKYMDSFVKVQNMLNAMDLVSVQIFGEFAGGGIQKGVDYGDKDFYVFDILSDSGNEKVYWDDYRVESFCTTVGLKLAPLLGRGSFAELSQYPNDFKSLVNRYNELVDTVGLEMANKHVFGPQASSETGLAEGYVLKPVYPRFFNVGTRVAIKCKNSKFSEKAKKDSPISAKVELTENDKRLLEIFSEYVTWNRVSNVLSHIGSVTAKDFGRVSGLTMKDIINEAAREGHDLLFADNPSAVLKELTGLIQNTIRSKWHEVLE

SEQ ID NO: 1833 - DNA, 1038 bp, synthetic construct
  misc_feature 1..1038: note = variant of RNA ligase 2 from Klebsiella phage KP179
  source 1..1038: mol_type = other DNA
atgcatcaccatcaccatcacggtggctctaacatgtttgcgtattattcaagtctggaaaaccattataattccaagttcattagcaagatccgtggtgcaggcttcctggtgcacaccgtggaatgggtagctcgcgagaagattcatggaacgaactttagcgttatcattactccgaccgaaatcgtcccagccaaacgcacagggccgatcttggaagatgagtcgttctttggtcacgaaattatcatgaaaaaatatatggactccttcaaaaaggtgcagaacatgctgaatgccatggatcttgttagcgtgcaaatctttggcgaatttgcgggtggtggcattcagaaaggcgtcgattacggagacaaagatttctatgtgtttgacatcctgtctgatagcgggaacgagaaagtttactgggatgactatcgcgtcgaatcgttttgcaccactgtgggtctgaaattagcgcctctgctgggacgtggtagtttcgctgaactgtcccagtacccaaacgatttcaaaagcctggtgaaccgttataatgaattggttgacacggtcggcctggagatggccaataaacacgtctttggtccgcaagcgtcttctgaaactggcctggcagaaggctacgttcttaaacccgtctatccgcgcttctttaatgtgggtacgcgcgtggcgattaaatgcaagaactccaaattttcggagaaagccaagctggattcgccaattagtgcgaaggttgaactgacggagaacgataaacgtctgctcgaaatctttagcgagtatgttacctggaatcgcgtcagtaacgtactgtcacatattggctcagtgaccaccaaagattttgggcgtgtttcgggtctgacgatgaaagacatcattaacgaagcagcacgcgaaggccatgatctgttgttcgctgataacccgtcggcggtgctgaaggagctgactggcctcatccagaacacgattcgctccaaatggcacgaagttctggag

SEQ ID NO: 1834 - protein, 346 aa, synthetic construct
  REGION 1..346: note = variant of RNA ligase 2 from Klebsiella phage KP179
MHHHHHHGGSNMFAYYSSLENHYNSKFISKIRGAGFLVHTVEWVAREKIHGTNFSVIITPTEIVPAKRTGPILEDESFFGHEIIMKKYMDSFKKVQNMLNAMDLVSVQIFGEFAGGGIQKGVDYGDKDFYVFDILSDSGNEKVYWDDYRVESFCTTVGLKLAPLLGRGSFAELSQYPNDFKSLVNRYNELVDTVGLEMANKHVFGPQASSETGLAEGYVLKPVYPRFFNVGTRVAIKCKNSKFSEKAKLDSPISAKVELTENDKRLLEIFSEYVTWNRVSNVLSHIGSVTTKDFGRVSGLTMKDIINEAAREGHDLLFADNPSAVLKELTGLIQNTIRSKWHEVLE

SEQ ID NO: 1835 - DNA, 1038 bp, synthetic construct
  misc_feature 1..1038: note = variant of RNA ligase 2 from Klebsiella phage KP179
  source 1..1038: mol_type = other DNA
atgcatcaccatcaccatcacggtggctctaacatgtttgcgtattattcaagtctggaaaaccattataatgccaagttcattagcaagatccgtgtcgcaggcttcctggcgcacaccgtggaatgggtagctcgcgagaagattcatggaacgaactttagcgttatcattactccgaccgaaatcgtcccagccaaacgcacagggccgatcttggaagatgagtcgttctttggtcacgaaattatcatgaaaaaatatatggactccttcgtgaaggtgcagaacatgctgaatgccatggatcttgttagcgtgcaaatctttggcgaatttgcgggtggtggcattcagaaaggcgtcgattacggagacaaagatttctatgtgtttgacatcctgtctgatagcgggaacgagaaagtttactgggatgactatcgcgtcgaatcgttttgcaccactgtgggtctgaaattagcgcctctgctgggacgtggtagtttcgctgaactgtcccagtacccaaacgatttcaaaagcctggtgaaccgttataatgaattggttgacacggtcggcctggagatggccaataaacacgtctttggtccgcaagcgtcttctgaaactggcctggcagaaggctacgttcttaaacccgtctatccgcgcttctttaatgtgggtacgcgcgtggcgattaaatgcaagaactccaaattttcggagaaagccaagctggactcgccaattagtgcgaaggttgaactgacggagaacgataaacgtctgctcgaaatctttagcgagtatgttacctggaatcgcgtcagtaacgtactgtcacatattggctcagtgaccgcaaaagattttgggcgtgtttcgggtctgacgatgaaagacatcattaatgaagcagcacgcgaaggccatgatctgttgttcgctgataacccgtcggcggtgctgaaggagctgactggcctcatccagaacacgattcgctccaaatggcacgaagttctggag

SEQ ID NO: 1836 - protein, 346 aa, synthetic construct
  REGION 1..346: note = variant of RNA ligase 2 from Klebsiella phage KP179
MHHHHHHGGSNMFAYYSSLENHYNAKFISKIRVAGFLAHTVEWVAREKIHGTNFSVIITPTEIVPAKRTGPILEDESFFGHEIIMKKYMDSFVKVQNMLNAMDLVSVQIFGEFAGGGIQKGVDYGDKDFYVFDILSDSGNEKVYWDDYRVESFCTTVGLKLAPLLGRGSFAELSQYPNDFKSLVNRYNELVDTVGLEMANKHVFGPQASSETGLAEGYVLKPVYPRFFNVGTRVAIKCKNSKFSEKAKLDSPISAKVELTENDKRLLEIFSEYVTWNRVSNVLSHIGSVTAKDFGRVSGLTMKDIINEAAREGHDLLFADNPSAVLKELTGLIQNTIRSKWHEVLE

SEQ ID NO: 1837 - DNA, 1038 bp, synthetic construct
  misc_feature 1..1038: note = variant of RNA ligase 2 from Klebsiella phage KP179
  source 1..1038: mol_type = other DNA
atgcatcaccatcaccatcacggtggctctaacatgtttgcgtattattcaagtctggaaaaccattataatgccaagttcattagcaagatccgtggcgcaggcttcctgatgcacaccgtggaatgggtagctcgcgagaagattcatggaacgaactttagcgttatcattactccgaccgaaatcgtcccagccaaacgcacagggccgatcttggaagatgagtcgttctttggtcacgaaattatcatgaaaaaatatatggactccttcgtgaaggtgcagaacatgctgaatgccatggatcttgttagcgtgcaaatctttggcgaatttgcgggtggtggcattcagaaaggcgtcgattacggagacaaagatttctatgtgtttgacatcctgtctgatagcgggaacgagaaagtttactgggatgactatcgcgtcgaatcgttttgcaccactgtgggtctgaaattagcgcctctgctgggacgtggtagtttcgctgaactgtcccagtacccaaacgatttcaaaagcctggtgaaccgttataatgaattggttgacacggtcggcctggagatggccaataaacacgtctttggtccgcaagcgtcttctgaaactggcctggcagaaggctacgttcttaaacccgtctatccgcgcttctttaatgtgggtacgcgcgtggcgattaaatgcaagaactccaaattttcggagaaagccaagctggattcgccaattagtgcgaaggttgaactgacggagaacgataaacgtctgctcgaaatctttagcgagtatgttacctggaatcgcgtcagtaacgtactgtcacatattggctcagtgaccgcaaaagattttgggcgtgtttcgggtctgacgatgaaagacatcattaatgaagcagcacgcgaaggccatgatctgttgttcgctgataacccgtcggcggtgctgaaggagctgactggcctcatccagaacacgattcgctccaaatggcacgaagttctggag

SEQ ID NO: 1838 - protein, 346 aa, synthetic construct
  REGION 1..346: note = variant of RNA ligase 2 from Klebsiella phage KP179
MHHHHHHGGSNMFAYYSSLENHYNAKFISKIRGAGFLMHTVEWVAREKIHGTNFSVIITPTEIVPAKRTGPILEDESFFGHEIIMKKYMDSFVKVQNMLNAMDLVSVQIFGEFAGGGIQKGVDYGDKDFYVFDILSDSGNEKVYWDDYRVESFCTTVGLKLAPLLGRGSFAELSQYPNDFKSLVNRYNELVDTVGLEMANKHVFGPQASSETGLAEGYVLKPVYPRFFNVGTRVAIKCKNSKFSEKAKLDSPISAKVELTENDKRLLEIFSEYVTWNRVSNVLSHIGSVTAKDFGRVSGLTMKDIINEAAREGHDLLFADNPSAVLKELTGLIQNTIRSKWHEVLE

SEQ ID NO: 1839 - DNA, 1038 bp, synthetic construct
  misc_feature 1..1038: note = variant of RNA ligase 2 from Klebsiella phage KP179
  source 1..1038: mol_type = other DNA
atgcatcaccatcaccatcacggtggcagcaacatgtttgcgtattattcaagtctggaaaaccataccaatgccaagttcattagcaagatccgtggtgcaggcttcctgatgcacaccgtggaatgggtagctcgcgagaagattcatggaacgaactttagcgttatcattactccgaccgaaatcgtgccagccaaacgcacagggccgatcttggaaggcgagtcgttctttggtcatgaaattatcatgaaaaaatatatggactccttcgtgaaggtgcagaacatgctgaatgcgatggatcttgttagcgtgcaaatctttggcgaatttgcgggtggtggcattcagaaaggcgtcgattacggagacaaagatttctatgtgtttgacatcctgtctgatagcgggaacgagaaagtttactgggatgactatcgcgtcgaatcgttttgcaccactgtgggtctgaaattagcgcctctgctgggacgtggtagtttcgctgaactgtcccagtacccaaacgatttcaaaagcctggtgaaccgttataatgaattggttgacacggtcggcctggagatggccaataaacacgtctttggtccgcaagcgtcttctgaaactggcctggcagaaggctacgttcttaaacccgtctatccgcgcttctttaatgtgggtacgcgcgtggcgattaaatgcaagaactccaaattttcggagaaagccaagctggactcgccaattaaagcgaaggttgaactgacggagaacgataaacgtctgctcgaaatctttagcgagtatgttacctggaatcgcgtcagtaacgtactgtcacatattggctcagtgaccgcaaaagattttgggcgtgtttcgggtctgacgatgaaagacatcattaatgaagcagcacgcgaaggccatgatctgttgttcgctgataacccgtcggcggtgctgaaggagctgacaggcctcatccagaacacgattcgctccaaatggcacgaagttctggag

SEQ ID NO: 1840 - protein, 346 aa, synthetic construct
  REGION 1..346: note = variant of RNA ligase 2 from Klebsiella phage KP179
MHHHHHHGGSNMFAYYSSLENHTNAKFISKIRGAGFLMHTVEWVAREKIHGTNFSVIITPTEIVPAKRTGPILEGESFFGHEIIMKKYMDSFVKVQNMLNAMDLVSVQIFGEFAGGGIQKGVDYGDKDFYVFDILSDSGNEKVYWDDYRVESFCTTVGLKLAPLLGRGSFAELSQYPNDFKSLVNRYNELVDTVGLEMANKHVFGPQASSETGLAEGYVLKPVYPRFFNVGTRVAIKCKNSKFSEKAKLDSPIKAKVELTENDKRLLEIFSEYVTWNRVSNVLSHIGSVTAKDFGRVSGLTMKDIINEAAREGHDLLFADNPSAVLKELTGLIQNTIRSKWHEVLE

SEQ ID NO: 1841 - DNA, 1038 bp, synthetic construct
  misc_feature 1..1038: note = variant of RNA ligase 2 from Klebsiella phage KP179
  source 1..1038: mol_type = other DNA
atgcatcaccatcaccatcacggtggcagcaacatgtttgcgtattattcaagtctggaaaaccataccaatgccaagttcattagcaagatccgtggtgcaggcttcctggcgcacaccgtggaatgggtagctcgcgagaagattcatggaacgaactttagcgttatcattactccgaccgaaatcgtgtgcgccaaacgcacagggccgatcttggaaggcgagtcgttctttggtcatgaaattatcatgaaaaaatatatggactccttcgtgaaggtgcagaacatgctgaatgcgatggatcttgttagcgtgcaaatctttggcgaatttgcgggtggtggcattcagaaaggcgtcgattacggagacaaagatttctatgtgtttgacatcctgtctgatagcgggaacgagaaagtttactgggatgactatcgcgtcgaatcgttttgcaccactgtgggtctgaaattagcgcctctgctgggacgtggtagtttcgctgaactgtcccagtacccaaacgatttcaaaagcctggtgaaccgttataatgaattggttgaaacggtcggcctggagatggccaataaacacgtctttggtccgcaagcgtcttctgaaactggcctggcagaaggctacgttcttaaacccgtctatccgcgcttctttaatgtgggtacgcgcgtggcgattaaatgcaagaactccaaattttcggagaaagccaagctggactcgccaattaaagcgaaggttgaactgacggagaacgataaacgtctgctcgaaatctttagcgagtatgttacctggaatcgcgtcagtaacgtactgtcacatattggctcagtgaccgcaaaagattttgggcgggtttcgggtctgacgatgaaagacatcattaatgaagcagcacgcgaaggccatgatctgttgttcgctgataacccgtcggcggtgctgaaggagctgacaggcctcatccagaacacgattcgctccaaatggcacgaagttctggag

SEQ ID NO: 1842 - protein, 346 aa, synthetic construct
  REGION 1..346: note = variant of RNA ligase 2 from Klebsiella phage KP179
MHHHHHHGGSNMFAYYSSLENHTNAKFISKIRGAGFLAHTVEWVAREKIHGTNFSVIITPTEIVCAKRTGPILEGESFFGHEIIMKKYMDSFVKVQNMLNAMDLVSVQIFGEFAGGGIQKGVDYGDKDFYVFDILSDSGNEKVYWDDYRVESFCTTVGLKLAPLLGRGSFAELSQYPNDFKSLVNRYNELVETVGLEMANKHVFGPQASSETGLAEGYVLKPVYPRFFNVGTRVAIKCKNSKFSEKAKLDSPIKAKVELTENDKRLLEIFSEYVTWNRVSNVLSHIGSVTAKDFGRVSGLTMKDIINEAAREGHDLLFADNPSAVLKELTGLIQNTIRSKWHEVLE

SEQ ID NO: 1843 - DNA, 1038 bp, synthetic construct
  misc_feature 1..1038: note = variant of RNA ligase 2 from Klebsiella phage KP179
  source 1..1038: mol_type = other DNA
atgcatcaccatcaccatcacggtggcagcaacatgtttgcgtattattcaagtctggaaaaccataccaatgccaagttcattagcaagatccgtggtgcaggcttcctgacgcacaccgtggaatgggtagctcgcgagaagattcatggaacgaactttagcgttatcattactccgaccgaaatcgtgtgcgccaaacgcacagggccgatcttggaaggcgagtcgttctttggtcatgaaattatcatgaaaaaatatatggactccttcgtgaaggtgcagaacatgctgaatgcgatggatcttgttagcgtgcaaatctttggcgaatttgcgggtggtggcattcagaaaggcgtcgattacggagacaaagatttctatgtgtttgacatcctgtctgatagcgggaacgagaaagtttactgggatgactatcgcgtcgaatcgttttgcaccactgtgggtctgaaattagcgcctctgctgggacgtggtagtttcgctgaactgtcccagtacccaaacgatttcaaaagcctggtgaaccgttataatgaattggttgatacggtcggcctggagatggccaataaacacgtctttggtccgcaagcgtcttctgaaactggcctggcagaaggctacgttcttaaacccgtctatccgcgcttctttaatgtgggtacgcgcgtggcgattaaatgcaagaacagcaaattttcggagaaagccaagctggactcgccaattaaagcgaaggttgaactgacggagaacgataaacgtctgctcgaaatctttagcgagtatgttacctggaatcgcgtcagtaacgtactgtcacatattggctcagtgaccgcaaaagattttgggcgggtttcgggtctgacgatgaaagacatcattaatgaagcagcacgcgaaggccatgatctgttgttcgctgataacccgtcggcggtgctgaaggagctgacaggcctcatccagaacacgattcgctccaaatggcacgaagttctggag

SEQ ID NO: 1844 - protein, 346 aa, synthetic construct
  REGION 1..346: note = variant of RNA ligase 2 from Klebsiella phage KP179
MHHHHHHGGSNMFAYYSSLENHTNAKFISKIRGAGFLTHTVEWVAREKIHGTNFSVIITPTEIVCAKRTGPILEGESFFGHEIIMKKYMDSFVKVQNMLNAMDLVSVQIFGEFAGGGIQKGVDYGDKDFYVFDILSDSGNEKVYWDDYRVESFCTTVGLKLAPLLGRGSFAELSQYPNDFKSLVNRYNELVDTVGLEMANKHVFGPQASSETGLAEGYVLKPVYPRFFNVGTRVAIKCKNSKFSEKAKLDSPIKAKVELTENDKRLLEIFSEYVTWNRVSNVLSHIGSVTAKDFGRVSGLTMKDIINEAAREGHDLLFADNPSAVLKELTGLIQNTIRSKWHEVLE

SEQ ID NO: 1845 - DNA, 1038 bp, synthetic construct
  misc_feature 1..1038: note = variant of RNA ligase 2 from Klebsiella phage KP179
  source 1..1038: mol_type = other DNA
atgcatcaccatcaccatcacggtggcagcaacatgtttgcgtattattcaagtctggaaaaccataccaatgccaagttcattagcaagatccgtggtgcaggcttcctggcgcacaccgtggaatgggtagctcgcgagaagattcatggaacgaactttagcgttatcattactccgaccgaaatcgtgtgcgccaaacgcacagggccgatcttggaaggcgagtcgttctttggtcatgaaattatcatgaaaaaatatatggactccttcgtgaaggtgcagaacatgctgaatgcgatggatcttgttagcgtgcaaatctttggcgaatttgcgggtggtggcattcagaaaggcgtcgattacggagacaaagatttctatgtgtttgacatcctgtctgatagcgggaacgagaaagtttactgggatgactatcgcgtcgaatcgttttgcaccactgtgggtctgaaattagcgcctctgctgggacgtggtagtttcgctgaactgtcccagtacccaaacgatttcaaaagcctggtgaaccgttataatgaattggttgatacggtcggcctggagatggccaataaacacgtctttggtccgcaagcgtcttctgaaactggcctggcagaaggctacgttcttaaacccgtccgcccgcgcttctttaatgtgggtacgcgcgtggcgattaaatgcaagaactccaaattttcggagaaagccaagctggactcgccaattaaagcgaaggttgaactgacggagaacgataaacgtctgctcgaaatctttagcgagtatgttacctggaatcgcgtcagtaacgtactgtcacatattggctcagtgaccgcaaaagattttgggcgtgtttcgggtctgacgatgaaagacatcattaatgaagcagcacgcgaaggccatgatctgttgttcgctgataacccgtcggcggtgctgaaggagctgacaggcctcatccagaacacgattcgctccaaatggcatgaagttttggag

SEQ ID NO: 1846 - protein, 346 aa, synthetic construct
  REGION 1..346: note = variant of RNA ligase 2 from Klebsiella phage KP179
MHHHHHHGGSNMFAYYSSLENHTNAKFISKIRGAGFLAHTVEWVAREKIHGTNFSVIITPTEIVCAKRTGPILEGESFFGHEIIMKKYMDSFVKVQNMLNAMDLVSVQIFGEFAGGGIQKGVDYGDKDFYVFDILSDSGNEKVYWDDYRVESFCTTVGLKLAPLLGRGSFAELSQYPNDFKSLVNRYNELVDTVGLEMANKHVFGPQASSETGLAEGYVLKPVRPRFFNVGTRVAIKCKNSKFSEKAKLDSPIKAKVELTENDKRLLEIFSEYVTWNRVSNVLSHIGSVTAKDFGRVSGLTMKDIINEAAREGHDLLFADNPSAVLKELTGLIQNTIRSKWHEVLE

SEQ ID NO: 1847 - DNA, 1038 bp, synthetic construct
  misc_feature 1..1038: note = variant of RNA ligase 2 from Klebsiella phage KP179
  source 1..1038: mol_type = other DNA
atgcatcaccatcaccatcacggtggcagcaacatgtttgcgtattattcaagtctggaaaaccataccaatgccaagttcattagcaagatccgtggtgcaggcttcctggcgcacaccgtggaatgggtagctcgcgagaagattcatggaacgaactttagcgttatcattactccgaccgaaatccagccggccaaacgcacagggccgatcttggaaggcgagtcgttctttggtcatgaaattatcatgaaaaaatatatggactccttcgtgaaggtgcagaacatgctgaatgcgatggatcttgttagcgtgcaaatctttggcgaatttgcgggtggtggcattcagaaaggcgtcgattacggagacaaagatttctatgtgtttgacatcctgtctgatagcgggaacgagaaagtttactgggatgactatcgcgtcgaatcgttttgcaccactgtgggtctgaaattagcgcctctgctgggacgtggtagtttcgctgaactgtcccagtacccaaacgatttcaaaagcctggtgaaccgttataatgaattggttgacacggtcggcctggagatggccaataaacacgtctttggtccgcaagcgtcttctgaaactggcctggcagaaggctacgttcttaaacccgtctatccgcgcttctttaatgtgggtacgcgcgtggcgattaaatgcaagaactccaaattttcggagaaagccaagctggactcgccaattaaagcgaaggttgaactgacggagaacgataaacgtctgctcgaaatctttagcgagtatgttacctggaatcgcgtcagtaacgtactgtcacatattggctcagtgaccgcaaaagattttgggcgtgtttcgggtctgacgatgaaagacatcattaatgaagcagcacgcgaaggccatgatctgttgttcgctgataacccgtcggcggtgctgaaggagctgacaggcctcatccagaacacgattcgctccaaatggcacgaagttctggag

SEQ ID NO: 1848 - protein, 346 aa, synthetic construct
  REGION 1..346: note = variant of RNA ligase 2 from Klebsiella phage KP179
MHHHHHHGGSNMFAYYSSLENHTNAKFISKIRGAGFLAHTVEWVAREKIHGTNFSVIITPTEIQPAKRTGPILEGESFFGHEIIMKKYMDSFVKVQNMLNAMDLVSVQIFGEFAGGGIQKGVDYGDKDFYVFDILSDSGNEKVYWDDYRVESFCTTVGLKLAPLLGRGSFAELSQYPNDFKSLVNRYNELVDTVGLEMANKHVFGPQASSETGLAEGYVLKPVYPRFFNVGTRVAIKCKNSKFSEKAKLDSPIKAKVELTENDKRLLEIFSEYVTWNRVSNVLSHIGSVTAKDFGRVSGLTMKDIINEAAREGHDLLFADNPSAVLKELTGLIQNTIRSKWHEVLE

SEQ ID NO: 1849 - DNA, 1038 bp, synthetic construct
  misc_feature 1..1038: note = variant of RNA ligase 2 from Klebsiella phage KP179
  source 1..1038: mol_type = other DNA
atgcatcaccatcaccatcacggtggcagcaacatgtttgcgtattattcaagtctggaaaaccataccaatgccaagttcattagcaagatccgtggtgcaggcttcctgatgcacaccgtggaatgggtagctcgcgagaagattcatggaacgaactttagcgttatcattactccgaccgaaatcgtgccagccaaacgcacagggccgatcttggaaggtgagagcttctttggtcatgaaattatcatgaaaaaatatatggactccttcaaaaaggtgcagaacatgctgaatgcgatggatcttgttagcgtgcaaatctttggcgaatttgcgggtggtggcattcagaaaggcgtcgattacggagacaaagatttctatgtgtttgacatcctgtctgatagcgggaacgagaaagtttactgggatgactatcgcgtcgaatcgttttgcaccactgtgggtctgaaattagcgcctctgctgggacgtggtagtttcgctgaactgtcccagtacccaaacgatttcaaaagcctggtgaaccgttataatgaattggttgacacggtcggcctggagatggccaataaacacgtctttggtccgcaagcgtcttctgaaactggcctggcagaaggctacgttcttaaacccgtctatccgcgcttctttaatgtgggtacgcgcgtggcgattaaatgcaagaactccaaattttcggagaaagccaagctggactcgccaattaaagcgaaggttgaactgacggagaacgataaacgtctgctcgaaatctttagcgagtatgttacctggaatcgcgtcagtaacgtactgtcacatattggctcagtgaccgccaaagattttgggcgtgtttcgggtctgacgatgaaagacatcattcgcgaagcagcacgcgaaggccatgatctgttgttcgctgataacccgtcggcggtgctgaaggagctgacaggcctcatccagaacacgattcgctccaaatggcacgaagttctggag

SEQ ID NO: 1850 - protein, 346 aa, synthetic construct
  REGION 1..346: note = variant of RNA ligase 2 from Klebsiella phage KP179
MHHHHHHGGSNMFAYYSSLENHTNAKFISKIRGAGFLMHTVEWVAREKIHGTNFSVIITPTEIVPAKRTGPILEGESFFGHEIIMKKYMDSFKKVQNMLNAMDLVSVQIFGEFAGGGIQKGVDYGDKDFYVFDILSDSGNEKVYWDDYRVESFCTTVGLKLAPLLGRGSFAELSQYPNDFKSLVNRYNELVDTVGLEMANKHVFGPQASSETGLAEGYVLKPVYPRFFNVGTRVAIKCKNSKFSEKAKLDSPIKAKVELTENDKRLLEIFSEYVTWNRVSNVLSHIGSVTAKDFGRVSGLTMKDIIREAAREGHDLLFADNPSAVLKELTGLIQNTIRSKWHEVLE

SEQ ID NO: 1851 - DNA, 1038 bp, synthetic construct
  misc_feature 1..1038: note = variant of RNA ligase 2 from Klebsiella phage KP179
  source 1..1038: mol_type = other DNA
atgcatcaccatcaccatcacggtggcagcaacatgtttgcgtattattcaagtctggaaaaccataccaatgccaagttcattagcaagatccgtggtgcaggcttcctggcgcacaccgtggaatgggtagctcgcgagaagattcatggaacgaactttagcgttatcattactccgaccgaaatcgtgccagccaaacgcacagggccgatcttggaaggcgagtcgttctttggtcatgaaattatcatgaaaaaatatatggactccttcgtgaaggtgcagaacatgctgaatgcgatggatcttgttagcgtgcaaatctttggcgaatttgcgggtggtggcattcagaaaggcgtcgattacggagacaaagatttctatgtgtttgacatcctgtctgatagcgggaacgagaaagtttactgggatgactatcgcgtcgaatcgttttgcaccactgtgggtctgaaattagcgcctctgctgggacgtggtagtttcgctgaactgtcccagtacccaaacgatttcaaaagcctggtgaaccgttataatgaattggttgacacggtcggcctggagatggccaataaacacgtctttggtccgcaagcgtcttctgaaactggcctggcagaaggctacgttcttaaacccgtctatccgcgcttctttaatgtgggtacgcgcgtggcgattaaatgcaagaactccaaattttcggagaaagccaagctggactcgccaattaaagcgaaggttgaactgacggagaacgataaacgtctgctcgaaatctttagcgagtatgttacctggaatcgcgtcagtaacgtactgtcacatattggctcagtgaccgcaaaagattttgggcgtgtttcgggtctgacgatgaaagacatcattaatgaagcagcacgcgaaggccatgatctgttgttcgctgataacccgtcggcggtgctgaaggagctgacaggcctcatccagaacacgattcgctccaaatggcacgaagttctggag

SEQ ID NO: 1852 - protein, 346 aa, synthetic construct
  REGION 1..346: note = variant of RNA ligase 2 from Klebsiella phage KP179
MHHHHHHGGSNMFAYYSSLENHTNAKFISKIRGAGFLAHTVEWVAREKIHGTNFSVIITPTEIVPAKRTGPILEGESFFGHEIIMKKYMDSFVKVQNMLNAMDLVSVQIFGEFAGGGIQKGVDYGDKDFYVFDILSDSGNEKVYWDDYRVESFCTTVGLKLAPLLGRGSFAELSQYPNDFKSLVNRYNELVDTVGLEMANKHVFGPQASSETGLAEGYVLKPVYPRFFNVGTRVAIKCKNSKFSEKAKLDSPIKAKVELTENDKRLLEIFSEYVTWNRVSNVLSHIGSVTAKDFGRVSGLTMKDIINEAAREGHDLLFADNPSAVLKELTGLIQNTIRSKWHEVLE

SEQ ID NO: 1853 - DNA, 1038 bp, synthetic construct
  misc_feature 1..1038: note = variant of RNA ligase 2 from Klebsiella phage KP179
  source 1..1038: mol_type = other DNA
atgcatcaccatcaccatcacggtggcagcaacatgtttgcgtattattcaagtctggaaaaccataccaatgccaagttcattagcaagatccgtggtgcaggcttcctggcgcacaccgtggaatgggtagctcgcgagaagattcatggaacgaactttagcgttatcattactccgaccgaaatcgtgccagccaaacgcacagggccgatcttggaaggcgagtcgttctttggtcatgaaattatcatgaaaaaatatatggactccttcgtgaaggtgcagaacatgctgaatgcgatggatcttgttagcgtgcaaatctttggcgaatttgcgggtggtggcattcagaaaggcgtcgattacggagacaaagatttctatgtgtttgacatcctgtctgatagcgggaacgagaaagtttactgggatgactatcgcgtcgaatcgttttgcaccactgtgggtctgaaattagcgcctctgctgggacgtggtagtttcgctgaactgtcccagtacccaaacgatttcaaaagcctggtgaaccgttataatgaattggttgacacggtcggcctggagatggccaataaacacgtctttggtccgcaagcgtcttctgaaactggcctggcagaaggctacgttcttaaacccgtcgcgccgcgcttctttaatgtgggtacgcgcgtggcgattaaatgcaagaactccaaattttcggagaaagccaagctggactcgccaattaaagcgaaggttgaactgacggagaacgataaacgtctgctcgaaatctttagcgagtatgttacctggaatcgcgtcagtaacgtactgtcacatattggctcagtgaccgcaaaagattttgggcgtgtttcgggtctgacgatgaaagacatcattaatgaagcagcacgcgaaggccatgatctgttgttcgctgataacccgtcggcggtgctgaaggagctgacaggcctcatccagaacacgattcgctccaaatggcacgaagttctggag

SEQ ID NO: 1854 - protein, 346 aa, synthetic construct
  REGION 1..346: note = variant of RNA ligase 2 from Klebsiella phage KP179
MHHHHHHGGSNMFAYYSSLENHTNAKFISKIRGAGFLAHTVEWVAREKIHGTNFSVIITPTEIVPAKRTGPILEGESFFGHEIIMKKYMDSFVKVQNMLNAMDLVSVQIFGEFAGGGIQKGVDYGDKDFYVFDILSDSGNEKVYWDDYRVESFCTTVGLKLAPLLGRGSFAELSQYPNDFKSLVNRYNELVDTVGLEMANKHVFGPQASSETGLAEGYVLKPVAPRFFNVGTRVAIKCKNSKFSEKAKLDSPIKAKVELTENDKRLLEIFSEYVTWNRVSNVLSHIGSVTAKDFGRVSGLTMKDIINEAAREGHDLLFADNPSAVLKELTGLIQNTIRSKWHEVLE

SEQ ID NO: 1855 - DNA, 1038 bp, synthetic construct
  misc_feature 1..1038: note = variant of RNA ligase 2 from Klebsiella phage KP179
  source 1..1038: mol_type = other DNA
atgcatcaccatcaccatcacggtggcagcaacatgtttgcgtattattcaagtctggaaaaccataccaatgccaagttcattagcaagatccgtggtgcaggcttcctggcgcacaccgtggaatgggtagctcgcgagaagattcatggaacgaactttagcgttatcattactccgaccgaaatcgtgccggccaaacgcacagggccgatcttggaaggcgagtcgttctttggtcatgaaattatcatgaaaaaatatatggactccttcgtgaaggtgcagaacatgctgaatgcgatggatcttgttagcgtgcaaatctttggcgaatttgcgggtggtggcattcagaaaggcgtcgattacggagacaaagatttctatgtgtttgacatcctgtctgatagcgggaacgagaaagtttactgggatgactatcgcgtcgaatcgttttgcaccactgtgggtctgaaattagcgcctctgctgggacgtggtagtttcgctgaactgtcccagtacccaaacgatttcaaaagcctggtgaaccgttataatgaattggttgaaacggtcggcctggagatggccaataaacacgtctttggtccgcaagcgtcttctgaaactggcctggcagaaggctacgttcttaaacccgtccgcccgcgcttctttaatgtgggtacgcgcgtggcgattaaatgcaagaactccaaattttcggagaaagccaagctggactcgccaattaaagcgaaggttgaactgacggagaacgataaacgtctgctcgaaatctttagcgagtatgttacctggaatcgcgtcagtaacgtactgtcacatattggctcagtgaccgcaaaagattttgggcgggtttcgggtctgacgatgaaagacatcattaatgaagcagcacgcgaaggccatgatctgttgttcgctgataacccgtcggcggtgctgaaggagctgacaggcctcatccagaacacgattcgctccaaatggcacgaagttctggag

SEQ ID NO: 1856 - protein, 346 aa, synthetic construct
  REGION 1..346: note = variant of RNA ligase 2 from Klebsiella phage KP179
MHHHHHHGGSNMFAYYSSLENHTNAKFISKIRGAGFLAHTVEWVAREKIHGTNFSVIITPTEIVPAKRTGPILEGESFFGHEIIMKKYMDSFVKVQNMLNAMDLVSVQIFGEFAGGGIQKGVDYGDKDFYVFDILSDSGNEKVYWDDYRVESFCTTVGLKLAPLLGRGSFAELSQYPNDFKSLVNRYNELVETVGLEMANKHVFGPQASSETGLAEGYVLKPVRPRFFNVGTRVAIKCKNSKFSEKAKLDSPIKAKVELTENDKRLLEIFSEYVTWNRVSNVLSHIGSVTAKDFGRVSGLTMKDIINEAAREGHDLLFADNPSAVLKELTGLIQNTIRSKWHEVLE

SEQ ID NO: 1857 - DNA, 1038 bp, synthetic construct
  misc_feature 1..1038: note = variant of RNA ligase 2 from Klebsiella phage KP179
  source 1..1038: mol_type = other DNA
atgcatcaccatcaccatcacggtggcagcaacatgtttgcgtattattcaagtctggaaaaccataccaatgccaagttcattagcaagatccgtggtgcaggcttcctgatgcacaccgtggaatgggtagctcgcgagaagattcatggaacgaactttagcgttatcattactccgaccgaaatcgtgtgcgccaaacgcacagggccgatcttggaaggcgagtcgttctttggtcatgaaattatcatgaaaaaatatatggactccttcgtgaaggtgcagaacatgctgaatgcgatggatcttgttagcgtgcaaatctttggcgaatttgcgggtggtggcattcagaaaggcgtcgattacggagacaaagatttctatgtgtttgacatcctgtctgatagcgggaacgagaaagtttactgggatgactatcgcgtcgaatcgttttgcaccactgtgggtctgaaattagcgcctctgctgggacgtggtagtttcgctgaactgtcccagtacccaaacgatttcaaaagcctggtgaaccgttataatgaattggttgacacggtcggcctggagatggccaataaacacgtctttggtccgcaagcgtcttctgaaactggcctggcagaaggctacgttcttaaacccgtctatccgcgcttctttaatgtgggtacgcgcgtggcgattaaatgcaagaactccaaattttcggagaaagccaagctggactcgccaattaaagcgaaggttgaactgacggagaacgataaacgtctgctcgaaatctttagcgagtatgttacctggaatcgcgtcagtaacgtactgtcacatattggctcagtgaccgcaaaagattttgggcgggtttcgggtctgacgatgaaagacatcattaatgaagcagcacgcgaaggccatgatctgttgttcgctgataacccgtcggcggtgctgaaggagctgacaggcctcatccagaacacgattcgctccaaatggcacgaagttctggag

SEQ ID NO: 1858 - protein, 346 aa, synthetic construct
  REGION 1..346: note = variant of RNA ligase 2 from Klebsiella phage KP179
MHHHHHHGGSNMFAYYSSLENHTNAKFISKIRGAGFLMHTVEWVAREKIHGTNFSVIITPTEIVCAKRTGPILEGESFFGHEIIMKKYMDSFVKVQNMLNAMDLVSVQIFGEFAGGGIQKGVDYGDKDFYVFDILSDSGNEKVYWDDYRVESFCTTVGLKLAPLLGRGSFAELSQYPNDFKSLVNRYNELVDTVGLEMANKHVFGPQASSETGLAEGYVLKPVYPRFFNVGTRVAIKCKNSKFSEKAKLDSPIKAKVELTENDKRLLEIFSEYVTWNRVSNVLSHIGSVTAKDFGRVSGLTMKDIINEAAREGHDLLFADNPSAVLKELTGLIQNTIRSKWHEVLE

SEQ ID NO: 1859 - DNA, 1038 bp, synthetic construct
  misc_feature 1..1038: note = variant of RNA ligase 2 from Klebsiella phage KP179
  source 1..1038: mol_type = other DNA
atgcatcaccatcaccatcacggtggcagcaacatgtttgcgtattattcaagtctggaaaaccataccaatgccaagttcattagcaagatccgtggtgcaggcttcctggcgcacaccgtggaatgggtagctcgcgagaagattcatggaacgaactttagcgttatcattactccgaccgaaatcgtgccagccaaacgcacagggccgatcttggaaggcgagtcgttctttggtcatgaaattatcatgaaaaaatatatggactccttcgtgaaggtgcagaacatgctgaatgcgatggatcttgttagcgtgcaaatctttggcgaatttgcgggtggtggcattcagaaaggcgtcgattacggagacaaagatttctatgtgtttgacatcctgtctgatagcgggaacgagaaagtttactgggatgactatcgcgtcgaatcgttttgcaccactgtgggtctgaaattagcgcctctgctgggacgtggtagtttcgctgaactgtcccagtacccaaacgatttcaaaagcctggtgaaccgttataatgaattggttgaaacggtcggcctggagatggccaataaacacgtctttggtccgcaagcgtcttctgaaactggcctggcagaaggctacgttcttaaacccgtcgcgccgcgcttctttaatgtgggtacgcgcgtggcgattaaatgcaagaactccaaattttcggagaaagccaagctggactcgccaattaaagcgaaggttgaactgacggagaacgataaacgtctgctcgaaatctttagcgagtatgttacctggaatcgcgtcagtaacgtactgtcacatattggctcagtgaccgcaaaagattttgggcgggtttcgggtctgacgatgaaagacatcattaatgaagcagcacgcgaaggccatgatctgttgttcgctgataacccgtcggcggtgctgaaggagctgacaggcctcatccagaacacgattcgctccaaatggcacgaagttctggag

SEQ ID NO: 1860 - protein, 346 aa, synthetic construct
  REGION 1..346: note = variant of RNA ligase 2 from Klebsiella phage KP179
MHHHHHHGGSNMFAYYSSLENHTNAKFISKIRGAGFLAHTVEWVAREKIHGTNFSVIITPTEIVPAKRTGPILEGESFFGHEIIMKKYMDSFVKVQNMLNAMDLVSVQIFGEFAGGGIQKGVDYGDKDFYVFDILSDSGNEKVYWDDYRVESFCTTVGLKLAPLLGRGSFAELSQYPNDFKSLVNRYNELVETVGLEMANKHVFGPQASSETGLAEGYVLKPVAPRFFNVGTRVAIKCKNSKFSEKAKLDSPIKAKVELTENDKRLLEIFSEYVTWNRVSNVLSHIGSVTAKDFGRVSGLTMKDIINEAAREGHDLLFADNPSAVLKELTGLIQNTIRSKWHEVLE

SEQ ID NO: 1861 - DNA, 1038 bp, synthetic construct
  misc_feature 1..1038: note = variant of RNA ligase 2 from Klebsiella phage KP179
  source 1..1038: mol_type = other DNA
atgcatcaccatcaccatcacggtggcagcaacatgtttgcgtattattcaagtctggaaaaccataccaatgccaagttcattagcaagatccgtggtgcaggcttcctgatgcacaccgtggaatgggtagctcgcgagaagattcatggaacgaactttagcgttatcattactccgaccgaaatcgtgccggccaaacgcacagggccgatcttggaaggcgagtcgttctttggtcatgaaattatcatgaaaaaatatatggactccttcgtgaaggtgcagaacatgctgaatgcgatggatcttgttagcgtgcaaatctttggcgaatttgcgggtggtggcattcagaaaggcgtcgattacggagacaaagatttctatgtgtttgacatcctgtctgatagcgggaacgagaaagtttactgggatgactatcgcgtcgaatcgttttgcaccactgtgggtctgaaattagcgcctctgctgggacgtggtagtttcgctgaactgtcccagtacccaaacgatttcaaaagcctggtgaaccgttataatgaattggttgaaacggtcggcctggagatggccaataaacacgtctttggtccgcaagcgtcttctgaaactggcctggcagaaggctacgttcttaaacccgtcgcgccgcgcttctttaatgtgggtacgcgcgtggcgattaaatgcaagaactccaaattttcggagaaagccaagctggactcgccaattaaagcgaaggttgaactgacggagaacgataaacgtctgctcgaaatctttagcgagtatgttacctggaatcgcgtcagtaacgtactgtcacatattggctcagtgaccgcaaaagattttgggcgtgtttcgggtctgacgatgaaagacatcattaatgaagcagcacgcgaaggccatgatctgttgttcgctgataacccgtcggcggtgctgaaggagctgacaggcctcatccagaacacgattcgctccaaatggcacgaagttctggag

SEQ ID NO: 1862 - protein, 346 aa, synthetic construct
  REGION 1..346: note = variant of RNA ligase 2 from Klebsiella phage KP179
MHHHHHHGGSNMFAYYSSLENHTNAKFISKIRGAGFLMHTVEWVAREKIHGTNFSVIITPTEIVPAKRTGPILEGESFFGHEIIMKKYMDSFVKVQNMLNAMDLVSVQIFGEFAGGGIQKGVDYGDKDFYVFDILSDSGNEKVYWDDYRVESFCTTVGLKLAPLLGRGSFAELSQYPNDFKSLVNRYNELVETVGLEMANKHVFGPQASSETGLAEGYVLKPVAPRFFNVGTRVAIKCKNSKFSEKAKLDSPIKAKVELTENDKRLLEIFSEYVTWNRVSNVLSHIGSVTAKDFGRVSGLTMKDIINEAAREGHDLLFADNPSAVLKELTGLIQNTIRSKWHEVLE

SEQ ID NO: 1863 - DNA, 1038 bp, synthetic construct
  misc_feature 1..1038: note = variant of RNA ligase 2 from Klebsiella phage KP179
  source 1..1038: mol_type = other DNA
atgcatcaccatcaccatcacggtggcagcaacatgtttgcgtattattcaagtctggaaaaccataccaatgccaagttcattagcaagatccgtggtgcaggcttcctgatgcacaccgtggaatgggtagctcgcgagaagattcatggaacgaactttagcgttatcattactccgaccgaaatcgtgccagccaaacgcacagggccgatcttggaagatgagagcttctttggtcatgaaattatcatgaaaaaatatatggactccttcgtgaaggtgcagaacatgctgaatgcgatggatcttgttagcgtgcaaatctttggcgaatttgcgggtggtggcattcagaaaggcgtcgattacggagacaaagatttctatgtgtttgacatcctgtctgatagcgggaacgagaaagtttactgggatgactatcgcgtcgaatcgttttgcaccactgtgggtctgaaattagcgcctctgctgggacgtggtagtttcgctgaactgtcccagtacccaaacgatttcaaaagcctggtgaaccgttataatgaattggttgacacggtcggcctggagatggccaataaacacgtctttggtccgcaagcgtcttctgaaactggcctggcagaaggctacgttcttaaacccgtctatccgcgcttctttaatgtgggtacgcgcgtggcgattaaatgcaagaactccaaattttcggagaaagccaagctggactcgccaattaaagcgaaggttgaactgacggagaacgataaacgtctgctcgaaatctttagcgagtatgttacctggaatcgcgtcagtaacgtactgtcacatattggctcagtgaccgcaaaagattttgggcgtgtttcgggtctgacgatgaaagacatcattcgcgaagcagcacgcgaaggccatgatctgttgttcgctgataacccgtcggcggtgctgaaggagctgacaggcctcatccagaacacgattcgctccaaatggcacgaagttctggag

SEQ ID NO: 1864 - protein, 346 aa, synthetic construct
  REGION 1..346: note = variant of RNA ligase 2 from Klebsiella phage KP179
MHHHHHHGGSNMFAYYSSLENHTNAKFISKIRGAGFLMHTVEWVAREKIHGTNFSVIITPTEIVPAKRTGPILEDESFFGHEIIMKKYMDSFVKVQNMLNAMDLVSVQIFGEFAGGGIQKGVDYGDKDFYVFDILSDSGNEKVYWDDYRVESFCTTVGLKLAPLLGRGSFAELSQYPNDFKSLVNRYNELVDTVGLEMANKHVFGPQASSETGLAEGYVLKPVYPRFFNVGTRVAIKCKNSKFSEKAKLDSPIKAKVELTENDKRLLEIFSEYVTWNRVSNVLSHIGSVTAKDFGRVSGLTMKDIIREAAREGHDLLFADNPSAVLKELTGLIQNTIRSKWHEVLE

SEQ ID NO: 1865 - DNA, 1038 bp, synthetic construct
  misc_feature 1..1038: note = variant of RNA ligase 2 from Klebsiella phage KP179
  source 1..1038: mol_type = other DNA
atgcatcaccatcaccatcacggtggcagcaacatgtttgcgtattattcaagtctggaaaaccataccaatgccaagttcattagcaagatccgtggtgcaggcttcctgatgcacaccgtggaatgggtagctcgcgagaagattcatggaacgaactttagcgttatcattactccgaccgaaatcgtgccagccaaacgcacagggccgatcttggaagatgagagcttctttggtcatgaaattatcatgaaaaaatatatggactccttcgtgaaggtgcagaacatgctgaatgcgatggatcttgttagcgtgcaaatctttggcgaatttgcgggtggtggcattcagaaaggcgtcgattacggagacaaagatttctatgtgtttgacatcctgtctgatagcgggaacgagaaagtttactgggatgactatcgcgtcgaatcgttttgcaccactgtgggtctgaaattagcgcctctgctgggacgtggtagtttcgctgaactgtcccagtacccaaacgatttcaaaagcctggtgaaccgttataatgaattggttgacacggtcggcctggagatggccaataaacacgtctttggtccgcaagcgtcttctgaaactggcctggcagaaggctacgttcttaaacccgtctatccgcgcttctttaatgtgggtacgcgcgtggcgattaaatgcaagaactccaaattttcggagaaagccaaactgatttcgccaattaaagcgaaggttgaactgacggagaacgataaacgtctgctcggaatctttagcgaatatgttacctggaatcgcgtcagtaacgtactgtcacatattggctcagtgaccgccaaagattttgggcgtgtttcgggtctgacgatgaaagacatcattcgcgaagcagcacgcgaaggccatgatctgttgttcgctgataacccgtcggcggtgctgaaggagctgacaggcctcatccagaacacgattcgctccaaatggcacgaagttctggag

SEQ ID NO: 1866 - protein, 346 aa, synthetic construct
  REGION 1..346: note = variant of RNA ligase 2 from Klebsiella phage KP179
MHHHHHHGGSNMFAYYSSLENHTNAKFISKIRGAGFLMHTVEWVAREKIHGTNFSVIITPTEIVPAKRTGPILEDESFFGHEIIMKKYMDSFVKVQNMLNAMDLVSVQIFGEFAGGGIQKGVDYGDKDFYVFDILSDSGNEKVYWDDYRVESFCTTVGLKLAPLLGRGSFAELSQYPNDFKSLVNRYNELVDTVGLEMANKHVFGPQASSETGLAEGYVLKPVYPRFFNVGTRVAIKCKNSKFSEKAKLISPIKAKVELTENDKRLLGIFSEYVTWNRVSNVLSHIGSVTAKDFGRVSGLTMKDIIREAAREGHDLLFADNPSAVLKELTGLIQNTIRSKWHEVLE

SEQ ID NO: 1867 - DNA, 1038 bp, synthetic construct
  misc_feature 1..1038: note = variant of RNA ligase 2 from Klebsiella phage KP179
  source 1..1038: mol_type = other DNA
atgcatcaccatcaccatcacggtggcagcaacatgtttgcgtattattcaagtctggaaaaccataccaatgccaagttcattagcaagatccgtggtgcaggcttcctgatgcacaccgtggaatgggtagctcgcgagaagattcatggaacgaactttagcgttatcattactccgaccgaaatcgtgccagccaaacgcacagggccgatcttggaaggtgagagcttctttggtcatgaaattatcatgaaaaaatatatggactccttcgtgaaggtgcagaacatgctgaatgcgatggatcttgttagcgtgcaaatctttggcgaatttgcgggtggtggcattcagaaaggcgtcgattacggagacaaagatttctatgtgtttgacatcctgtctgatagcgggaacgagaaagtttactgggatgactatcgcgtcgaatcgttttgcaccactgtgggtctgaaattagcgcctctgctgggacgtggtagtttcgctgaactgtcccagtacccaaacgatttcaaaagcctggtgaaccgttataatgaattggttgacacggtcggcctggagatggccaataaacacgtctttggtccgcaagcgtcttctgaaactggcctggcagaaggctacgttcttaaacccgtctatccgcgcttctttaatgtgggtacgcgcgtggcgattaaatgcaagaactccaaattttcggagaaagccaaactgatttcgccaattaaagcgaaggttgaactgacggagaacgataaacgtctgctcggaatctttagcgaatatgttacctggaatcgcgtcagtaacgtactgtcacatattggctcagtgaccgccaaagattttgggcgtgtttcgggtctgacgatgaaagacatcattcgcgaagcagcacgcgaaggccatgatctgttgttcgctgataacccgtcggcggtgctgaaggagctgacaggcctcatccagaacacgattcgctccaaatggaccgaagttttggag

SEQ ID NO: 1868 - protein, 346 aa, synthetic construct
  REGION 1..346: note = variant of RNA ligase 2 from Klebsiella phage KP179
MHHHHHHGGSNMFAYYSSLENHTNAKFISKIRGAGFLMHTVEWVAREKIHGTNFSVIITPTEIVPAKRTGPILEGESFFGHEIIMKKYMDSFVKVQNMLNAMDLVSVQIFGEFAGGGIQKGVDYGDKDFYVFDILSDSGNEKVYWDDYRVESFCTTVGLKLAPLLGRGSFAELSQYPNDFKSLVNRYNELVDTVGLEMANKHVFGPQASSETGLAEGYVLKPVYPRFFNVGTRVAIKCKNSKFSEKAKLISPIKAKVELTENDKRLLGIFSEYVTWNRVSNVLSHIGSVTAKDFGRVSGLTMKDIIREAAREGHDLLFADNPSAVLKELTGLIQNTIRSKWTEVLE

SEQ ID NO: 1869 - DNA, 1038 bp, synthetic construct
  misc_feature 1..1038: note = variant of RNA ligase 2 from Klebsiella phage KP179
  source 1..1038: mol_type = other DNA
atgcatcaccatcaccatcacggtggcagcaacatgtttgcgtattattcaagtctggaaaaccataccaatgccaagttcattagcaagatccgtggtgcaggcttcctgatgcacaccgtggaatgggtagctcgcgagaagattcatggaacgaactttagcgttatcattactccgaccgaaatcgtgccagccaaacgcacagggccgatcttggaaggcgagtcgttctttggtcatgaaattatcatgaaaaaatatatggactccttcgtgaaggtgcagaacatgctgaatgcgatggatcttgttagcgtgcaaatctttggcgaatttgcgggtggtggcattcagaaaggcgtcgattacggagacaaagatttctatgtgtttgacatcctgtctgatagcgggaacgagaaagtttactgggatgactatcgcgtcgaatcgttttgcaccactgtgggtctgaaattagcgcctctgctgggacgtggtagtttcgctgaactgtcccagtacccaaacgatttcaaaagcctggtgaaccgttataatgaattggttgacacggtcggcctggagatggccaataaacacgtctttggtccgcaagcgtcttctgaaactggcctggcagaaggctacgttcttaaacccgtccgcccgcgcttctttaatgtgggtacgcgcgtggcgattaaatgcaagaactccaaattttcggagaaagccaagctggactcgccaattaaagcgaaggttgaactgacggagaacgataaacgtctgctcgaaatctttagcgagtatgttacctggaatcgcgtcagtaacgtactgtcacatattggctcagtgaccgcaaaagattttgggcgtgtttcgggtctgacgatgaaagacatcattaatgaagcagcacgcgaaggccatgatctgttgttcgctgataacccgtcggcggtgctgaaggagctgacaggcctcatccagaacacgattcgctccaaatggcacgaagttctggag

SEQ ID NO: 1870 - protein, 346 aa, synthetic construct
  REGION 1..346: note = variant of RNA ligase 2 from Klebsiella phage KP179
MHHHHHHGGSNMFAYYSSLENHTNAKFISKIRGAGFLMHTVEWVAREKIHGTNFSVIITPTEIVPAKRTGPILEGESFFGHEIIMKKYMDSFVKVQNMLNAMDLVSVQIFGEFAGGGIQKGVDYGDKDFYVFDILSDSGNEKVYWDDYRVESFCTTVGLKLAPLLGRGSFAELSQYPNDFKSLVNRYNELVDTVGLEMANKHVFGPQASSETGLAEGYVLKPVRPRFFNVGTRVAIKCKNSKFSEKAKLDSPIKAKVELTENDKRLLEIFSEYVTWNRVSNVLSHIGSVTAKDFGRVSGLTMKDIINEAAREGHDLLFADNPSAVLKELTGLIQNTIRSKWHEVLE

SEQ ID NO: 1871 - DNA, 1038 bp, synthetic construct
  misc_feature 1..1038: note = variant of RNA ligase 2 from Klebsiella phage KP179
  source 1..1038: mol_type = other DNA
atgcatcaccatcaccatcacggtggcagcaacatgtttgcgtattattcaagtctggaaaaccataccaatgccaagttcattagcaagatccgtggtgcaggcttcctgatgcacaccgtggaatgggtagctcgcgagaagattcatggaacgaactttagcgttatcattactccgaccgaaatcgtgtgcgccaaacgcacagggccgatcttggaaggcgagtcgttctttggtcatgaaattatcatgaaaaaatatatggactccttcgtgaaggtgcagaacatgctgaatgcgatggatcttgttagcgtgcaaatctttggcgaatttgcgggtggtggcattcagaaaggcgtcgattacggagacaaagatttctatgtgtttgacatcctgtctgatagcgggaacgagaaagtttactgggatgactatcgcgtcgaatcgttttgcaccactgtgggtctgaaattagcgcctctgctgggacgtggtagtttcgctgaactgtcccagtacccaaacgatttcaaaagcctggtgaaccgttataatgaattggttgaaacggtcggcctggagatggccaataaacacgtctttggtccgcaagcgtcttctgaaactggcctggcagaaggctacgttcttaaacccgtctatccgcgcttctttaatgtgggtacgcgcgtggcgattaaatgcaagaactccaaattttcggagaaagccaagctggactcgccaattaaagcgaaggttgaactgacggagaacgataaacgtctgctcgaaatctttagcgagtatgttacctggaatcgcgtcagtaacgtactgtcacatattggctcagtgaccgcaaaagattttgggcgtgtttcgggtctgacgatgaaagacatcattaatgaagcagcacgcgaaggccatgatctgttgttcgctgataacccgtcggcggtgctgaaggagctgacaggcctcatccagaacacgattcgctccaaatggcacgaagttctggag

SEQ ID NO: 1872 - protein, 346 aa, synthetic construct
  REGION 1..346: note = variant of RNA ligase 2 from Klebsiella phage KP179
MHHHHHHGGSNMFAYYSSLENHTNAKFISKIRGAGFLMHTVEWVAREKIHGTNFSVIITPTEIVCAKRTGPILEGESFFGHEIIMKKYMDSFVKVQNMLNAMDLVSVQIFGEFAGGGIQKGVDYGDKDFYVFDILSDSGNEKVYWDDYRVESFCTTVGLKLAPLLGRGSFAELSQYPNDFKSLVNRYNELVETVGLEMANKHVFGPQASSETGLAEGYVLKPVYPRFFNVGTRVAIKCKNSKFSEKAKLDSPIKAKVELTENDKRLLEIFSEYVTWNRVSNVLSHIGSVTAKDFGRVSGLTMKDIINEAAREGHDLLFADNPSAVLKELTGLIQNTIRSKWHEVLE

SEQ ID NO: 1873 - DNA, 1038 bp, synthetic construct
  misc_feature 1..1038: note = variant of RNA ligase 2 from Klebsiella phage KP179
  source 1..1038: mol_type = other DNA
atgcatcaccatcaccatcacggtggcagcaacatgtttgcgtattattcaagtctggaaaaccataccaatgccaagttcattagcaagatccgtggtgcaggcttcctgatgcacaccgtggaatgggtagctcgcgagaagattcatggaacgaactttagcgttatcattactccgaccgaaatcgtgccagccaaacgcacagggccgatcttggaaggtgagagcttctttggtcatgaaattatcatgaaaaaatatatggactccttcgtgaaggtgcagaacatgctgaatgcgatggatcttgttagcgtgcaaatctttggcgaatttgcgggtggtggcattcagaaaggcgtcgattacggagacaaagatttctatgtgtttgacatcctgtctgatagcgggaacgagaaagtttactgggatgactatcgcgtcgaatcgttttgcaccactgtgggtctgaaattagcgcctctgctgggacgtggtagtttcgctgaactgtcccagtacccaaacgatttcaaaagcctggtgaaccgttataatgaattggttgacacggtcggcctggagatggccaataaacacgtctttggtccgcaagcgtcttctgaaactggcctggcagaaggctacgttcttaaacccgtctatccgcgcttctttaatgtgggtacgcgcgtggcgattaaatgcaagaactccaaattttcggagaaagccaagctggactcgccaattaaagcgaaggttgaactgacggagaacgataaacgtctgctcggaatctttagcgaatatgttacctggaatcgcgtcagtaacgtactgtcacatattggctcagtgaccgccaaagattttgggcgtgtttcgggtctgacgatgaaagacatcattaatgaagcagcacgcgaaggccatgatctgttgttcgctgataacccgtcggcggtgctgaaggagctgacaggcctcatccagaacacgattcgctccaaatggcacgaagttctggag

SEQ ID NO: 1874 - protein, 346 aa, synthetic construct
  REGION 1..346: note = variant of RNA ligase 2 from Klebsiella phage KP179
MHHHHHHGGSNMFAYYSSLENHTNAKFISKIRGAGFLMHTVEWVAREKIHGTNFSVIITPTEIVPAKRTGPILEGESFFGHEIIMKKYMDSFVKVQNMLNAMDLVSVQIFGEFAGGGIQKGVDYGDKDFYVFDILSDSGNEKVYWDDYRVESFCTTVGLKLAPLLGRGSFAELSQYPNDFKSLVNRYNELVDTVGLEMANKHVFGPQASSETGLAEGYVLKPVYPRFFNVGTRVAIKCKNSKFSEKAKLDSPIKAKVELTENDKRLLGIFSEYVTWNRVSNVLSHIGSVTAKDFGRVSGLTMKDIINEAAREGHDLLFADNPSAVLKELTGLIQNTIRSKWHEVLE

SEQ ID NO: 1875 - DNA, 1038 bp, synthetic construct
  misc_feature 1..1038: note = variant of RNA ligase 2 from Klebsiella phage KP179
  source 1..1038: mol_type = other DNA
atgcatcaccatcaccatcacggtggcagcaacatgtttgcgtattattcaagtctggaaaaccataccaatgccaagttcattagcaagatccgtggtgcaggcttcctgatgcacaccgtggaatgggtagctcgcgagaagattcatggaacgaactttagcgttatcattactccgaccgaaatccagccggccaaacgcacagggccgatcttggaaggcgagtcgttctttggtcatgaaattatcatgaaaaaatatatggactccttcgtgaaggtgcagaacatgctgaatgcgatggatcttgttagcgtgcaaatctttggcgaatttgcgggtggtggcattcagaaaggcgtcgattacggagacaaagatttctatgtgtttgacatcctgtctgatagcgggaacgagaaagtttactgggatgactatcgcgtcgaatcgttttgcaccactgtgggtctgaaattagcgcctctgctgggacgtggtagtttcgctgaactgtcccagtacccaaacgatttcaaaagcctggtgaaccgttataatgaattggttgaaacggtcggcctggagatggccaataaacacgtctttggtccgcaagcgtcttctgaaactggcctggcagaaggctacgttcttaaacccgtctatccgcgcttctttaatgtgggtacgcgcgtggcgattaaatgcaagaactccaaattttcggagaaagccaagctggactcgccaattaaagcgaaggttgaactgacggagaacgataaacgtctgctcgaaatctttagcgagtatgttacctggaatcgcgtcagtaacgtactgtcacatattggctcagtgaccgcaaaagattttgggcgggtttcgggtctgacgatgaaagacatcattaatgaagcagcacgcgaaggccatgatctgttgttcgctgataacccgtcggcggtgctgaaggagctgacaggcctcatccagaacacgattcgctccaaatggcatgaagttttggag

SEQ ID NO: 1876 - protein, 346 aa, synthetic construct
  REGION 1..346: note = variant of RNA ligase 2 from Klebsiella phage KP179
MHHHHHHGGSNMFAYYSSLENHTNAKFISKIRGAGFLMHTVEWVAREKIHGTNFSVIITPTEIQPAKRTGPILEGESFFGHEIIMKKYMDSFVKVQNMLNAMDLVSVQIFGEFAGGGIQKGVDYGDKDFYVFDILSDSGNEKVYWDDYRVESFCTTVGLKLAPLLGRGSFAELSQYPNDFKSLVNRYNELVETVGLEMANKHVFGPQASSETGLAEGYVLKPVYPRFFNVGTRVAIKCKNSKFSEKAKLDSPIKAKVELTENDKRLLEIFSEYVTWNRVSNVLSHIGSVTAKDFGRVSGLTMKDIINEAAREGHDLLFADNPSAVLKELTGLIQNTIRSKWHEVLE

SEQ ID NO: 1877 - DNA, 1038 bp, synthetic construct
  misc_feature 1..1038: note = variant of RNA ligase 2 from Klebsiella phage KP179
  source 1..1038: mol_type = other DNA
atgcatcaccatcaccatcacggtggcagcaacatgtttgcgtattattcaagtctggaaaaccataccaatgccaagttcattagcaagatccgtggtgcaggcttcctgatgcacaccgtggaatgggtagctcgcgagaagattcatggaacgaactttagcgttatcattactccgaccgaaatcgtgccagccaaacgcacagggccgatcttggaaggtgagagcttctttggtcatgaaattatcatgaaaaaatatatggactccttcgtgaaggtgcagaacatgctgaatgcgatggatcttgttagcgtgcaaatctttggcgaatttgcgggtggtggcattcagaaaggcgtcgattacggagacaaagatttctatgtgtttgacatcctgtctgatagcgggaacgagaaagtttactgggatgactatcgcgtcgaatcgttttgcaccactgtgggtctgaaattagcgcctctgctgggacgtggtagtttcgctgaactgtcccagtacccaaacgatttcaaaagcctggtgaaccgttataatgaattggttgacacggtcggcctggagatggccaataaacacgtctttggtccgcaagcgtcttctgaaactggcctggcagaaggctacgttcttaaacccgtctatccgcgcttctttaatgtgggtacgcgcgtggcgattaaatgcaagaactccaaattttcggagaaagccaaactgatttcgccaattaaagcgaaggttgaactgacggagaacgataaacgtctgctcggaatctttagcgaatatgttacctggaatcgcgtcagtaacgtactgtcacatattggctcagtgaccaccaaagattttgggcgtgtttcgggtctgacgatgaaagacatcattaatgaagcagcacgcgaaggccatgatctgttgttcgctgataacccgtcggcggtgctgaaggagctgacaggcctcatccagaacacgattcgctccaaatggaccgaagttttggag

SEQ ID NO: 1878 - protein, 346 aa, synthetic construct
  REGION 1..346: note = variant of RNA ligase 2 from Klebsiella phage KP179
MHHHHHHGGSNMFAYYSSLENHTNAKFISKIRGAGFLMHTVEWVAREKIHGTNFSVIITPTEIVPAKRTGPILEGESFFGHEIIMKKYMDSFVKVQNMLNAMDLVSVQIFGEFAGGGIQKGVDYGDKDFYVFDILSDSGNEKVYWDDYRVESFCTTVGLKLAPLLGRGSFAELSQYPNDFKSLVNRYNELVDTVGLEMANKHVFGPQASSETGLAEGYVLKPVYPRFFNVGTRVAIKCKNSKFSEKAKLISPIKAKVELTENDKRLLGIFSEYVTWNRVSNVLSHIGSVTTKDFGRVSGLTMKDIINEAAREGHDLLFADNPSAVLKELTGLIQNTIRSKWTEVLE

SEQ ID NO: 1879 - DNA, 1038 bp, synthetic construct
  misc_feature 1..1038: note = variant of RNA ligase 2 from Klebsiella phage KP179
  source 1..1038: mol_type = other DNA
atgcatcaccatcaccatcacggtggcagcaacatgtttgcgtattattcaagtctggaaaaccataccaatgccaagttcattagcaagatccgtggtgcaggcttcctgatgcacaccgtggaatgggtagctcgcgagaagattcatggaacgaactttagcgttatcattactccgaccgaaatcgtgccagccaaacgcacagggccgatcttggaagatgagagcttctttggtcatgaaattatcatgaaaaaatatatggactccttcaaaaaggtgcagaacatgctgaatgcgatggatcttgttagcgtgcaaatctttggcgaatttgcgggtggtggcattcagaaaggcgtcgattacggagacaaagatttctatgtgtttgacatcctgtctgatagcgggaacgagaaagtttactgggatgactatcgcgtcgaatcgttttgcaccactgtgggtctgaaattagcgcctctgctgggacgtggtagtttcgctgaactgtcccagtacccaaacgatttcaaaagcctggtgaaccgttataatgaattggttgacacggtcggcctggagatggccaataaacacgtctttggtccgcaagcgtcttctgaaactggcctggcagaaggctacgttcttaaacccgtctatccgcgcttctttaatgtgggtacgcgcgtggcgattaaatgcaagaactccaaattttcggagaaagccaaaaaagattcgccaattaaagcgaaggttgaactgacggagaacgataaacgtctgctcgaaatctttagcgagtatgttacctggaatcgcgtcagtaacgtactgtcacatattggctcagtgaccgcaaaagattttgggcgtgtttcgggtctgacgatgaaagacatcattcgcgaagcagcacgcgaaggccatgatctgttgttcgctgataacccgtcggcggtgctgaaggagctgacaggcctcatccagaacacgattcgctccaaatggaccgaagttttggag

SEQ ID NO: 1880 - protein, 346 aa, synthetic construct
  REGION 1..346: note = variant of RNA ligase 2 from Klebsiella phage KP179
MHHHHHHGGSNMFAYYSSLENHTNAKFISKIRGAGFLMHTVEWVAREKIHGTNFSVIITPTEIVPAKRTGPILEDESFFGHEIIMKKYMDSFKKVQNMLNAMDLVSVQIFGEFAGGGIQKGVDYGDKDFYVFDILSDSGNEKVYWDDYRVESFCTTVGLKLAPLLGRGSFAELSQYPNDFKSLVNRYNELVDTVGLEMANKHVFGPQASSETGLAEGYVLKPVYPRFFNVGTRVAIKCKNSKFSEKAKKDSPIKAKVELTENDKRLLEIFSEYVTWNRVSNVLSHIGSVTAKDFGRVSGLTMKDIIREAAREGHDLLFADNPSAVLKELTGLIQNTIRSKWTEVLE

SEQ ID NO: 1881 - DNA, 1038 bp, synthetic construct
  misc_feature 1..1038: note = variant of RNA ligase 2 from Klebsiella phage KP179
  source 1..1038: mol_type = other DNA
atgcatcaccatcaccatcacggtggcagcaacatgtttgcgtattattcaagtctggaaaaccataccaatgccaagttcattagcaagatccgtggtgcaggcttcctgatgcacaccgtggaatgggtagctcgcgagaagattcatggaacgaactttagcgttatcattactccgaccgaaatcgtgccagccaaacgcacagggccgatcttggaaggcgagtcgttctttggtcatgaaattatcatgaaaaaatatatggactccttcgtgaaggtgcagaacatgctgaatgcgatggatcttgttagcgtgcaaatctttggcgaatttgcgggtggtggcattcagaaaggcgtcgattacggagacaaagatttctatgtgtttgacatcctgtctgatagcgggaacgagaaagtttactgggatgactatcgcgtcgaatcgttttgcaccactgtgggtctgaaattagcgcctctgctgggacgtggtagtttcgctgaactgtcccagtacccaaacgatttcaaaagcctggtgaaccgttataatgaattggttgacacggtcggcctggagatggccaataaacacgtctttggtccgcaagcgtcttctgaaactggcctggcagaaggctacgttcttaaacccgtctatccgcgcttctttaatgtgggtacgcgcgtggcgattaaatgcaagaactccaaattttcggagaaagccaaactgatttcgccaattaaagcgaaggttgaactgacggagaacgataaacgtctgctcgaaatctttagcgaatatgttacctggaatcgcgtcagtaacgtactgtcacatattggctcagtgaccaccaaagattttgggcgtgtttcgggtctgacgatgaaagacatcattaatgaagcagcacgcgaaggccatgatctgttgttcgctgataacccgtcggcggtgctgaaggagctgacaggcctcatccagaacacgattcgctccaaatggcacgaagttctggag

SEQ ID NO: 1882 - protein, 346 aa, synthetic construct
  REGION 1..346: note = variant of RNA ligase 2 from Klebsiella phage KP179
MHHHHHHGGSNMFAYYSSLENHTNAKFISKIRGAGFLMHTVEWVAREKIHGTNFSVIITPTEIVPAKRTGPILEGESFFGHEIIMKKYMDSFVKVQNMLNAMDLVSVQIFGEFAGGGIQKGVDYGDKDFYVFDILSDSGNEKVYWDDYRVESFCTTVGLKLAPLLGRGSFAELSQYPNDFKSLVNRYNELVDTVGLEMANKHVFGPQASSETGLAEGYVLKPVYPRFFNVGTRVAIKCKNSKFSEKAKLISPIKAKVELTENDKRLLEIFSEYVTWNRVSNVLSHIGSVTTKDFGRVSGLTMKDIINEAAREGHDLLFADNPSAVLKELTGLIQNTIRSKWHEVLE

SEQ ID NO: 1883 - DNA, 1038 bp, synthetic construct
  misc_feature 1..1038: note = variant of RNA ligase 2 from Klebsiella phage KP179
  source 1..1038: mol_type = other DNA
atgcatcaccatcaccatcacggtggcagcaacatgtttgcgtattattcaagtctggaaaaccataccaatgccaagttcattagcaagatccgtggtgcaggcttcctggcgcacaccgtggaatgggtagctcgcgagaagattcatggaacgaactttagcgttatcattactccgaccgaaatccagccggccaaacgcacagggccgatcttggaaggcgagtcgttctttggtcatgaaattatcatgaaaaaatatatggactccttcgtgaaggtgcagaacatgctgaatgcgatggatcttgttagcgtgcaaatctttggcgaatttgcgggtggtggcattcagaaaggcgtcgattacggagacaaagatttctatgtgtttgacatcctgtctgatagcgggaacgagaaagtttactgggatgactatcgcgtcgaatcgttttgcaccactgtgggtctgaaattagcgcctctgctgggacgtggtagtttcgctgaactgtcccagtacccaaacgatttcaaaagcctggtgaaccgttataatgaattggttgaaacggtcggcctggagatggccaataaacacgtctttggtccgcaagcgtcttctgaaactggcctggcagaaggctacgttcttaaacccgtctatccgcgcttctttaatgtgggtacgcgcgtggcgattaaatgcaagaactccaaattttcggagaaagccaagctggactcgccaattaaagcgaaggttgaactgacggagaacgataaacgtctgctcgaaatctttagcgagtatgttacctggaatcgcgtcagtaacgtactgtcacatattggctcagtgaccgcaaaagattttgggcgggtttcgggtctgacgatgaaagacatcattaatgaagcagcacgcgaaggccatgatctgttgttcgctgataacccgtcggcggtgctgaaggagctgacaggcctcatccagaacacgattcgctccaaatggcacgaagttctggag

SEQ ID NO: 1884 - protein, 346 aa, synthetic construct
  REGION 1..346: note = variant of RNA ligase 2 from Klebsiella phage KP179
MHHHHHHGGSNMFAYYSSLENHTNAKFISKIRGAGFLAHTVEWVAREKIHGTNFSVIITPTEIQPAKRTGPILEGESFFGHEIIMKKYMDSFVKVQNMLNAMDLVSVQIFGEFAGGGIQKGVDYGDKDFYVFDILSDSGNEKVYWDDYRVESFCTTVGLKLAPLLGRGSFAELSQYPNDFKSLVNRYNELVETVGLEMANKHVFGPQASSETGLAEGYVLKPVYPRFFNVGTRVAIKCKNSKFSEKAKLDSPIKAKVELTENDKRLLEIFSEYVTWNRVSNVLSHIGSVTAKDFGRVSGLTMKDIINEAAREGHDLLFADNPSAVLKELTGLIQNTIRSKWHEVLE

SEQ ID NO: 1885 - DNA, 1038 bp, synthetic construct
  misc_feature 1..1038: note = variant of RNA ligase 2 from Klebsiella phage KP179
  source 1..1038: mol_type = other DNA
atgcatcaccatcaccatcacggtggcagcaacatgtttgcgtattattcaagtctggaaaaccataccaatgccaagttcattagcaagatccgtggtgcaggcttcctggcgcacaccgtggaatgggtagctcgcgagaagattcatggaacgaactttagcgttatcattactccgaccgaaatccagccggccaaacgcacagggccgatcttggaaggcgagtcgttctttggtcatgaaattatcatgaaaaaatatatggactccttcgtgaaggtgcagaacatgctgaatgcgatggatcttgttagcgtgcaaatctttggcgaatttgcgggtggtggcattcagaaaggcgtcgattacggagacaaagatttctatgtgtttgacatcctgtctgatagcgggaacgagaaagtttactgggatgactatcgcgtcgaatcgttttgcaccactgtgggtctgaaattagcgcctctgctgggacgtggtagtttcgctgaactgtcccagtacccaaacgatttcaaaagcctggtgaaccgttataatgaattggttgatacggtcggcctggagatggccaataaacacgtctttggtccgcaagcgtcttctgaaactggcctggcagaaggctacgttcttaaacccgtccgcccgcgcttctttaatgtgggtacgcgcgtggcgattaaatgcaagaactccaaattttcggagaaagccaagctggactcgccaattaaagcgaaggttgaactgacggagaacgataaacgtctgctcgaaatctttagcgagtatgttacctggaatcgcgtcagtaacgtactgtcacatattggctcagtgaccgcaaaagattttgggcgggtttcgggtctgacgatgaaagacatcattaatgaagcagcacgcgaaggccatgatctgttgttcgctgataacccgtcggcggtgctgaaggagctgacaggcctcatccagaacacgattcgctccaaatggcacgaagttctggag

SEQ ID NO: 1886 - protein, 346 aa, synthetic construct
  REGION 1..346: note = variant of RNA ligase 2 from Klebsiella phage KP179
MHHHHHHGGSNMFAYYSSLENHTNAKFISKIRGAGFLAHTVEWVAREKIHGTNFSVIITPTEIQPAKRTGPILEGESFFGHEIIMKKYMDSFVKVQNMLNAMDLVSVQIFGEFAGGGIQKGVDYGDKDFYVFDILSDSGNEKVYWDDYRVESFCTTVGLKLAPLLGRGSFAELSQYPNDFKSLVNRYNELVDTVGLEMANKHVFGPQASSETGLAEGYVLKPVRPRFFNVGTRVAIKCKNSKFSEKAKLDSPIKAKVELTENDKRLLEIFSEYVTWNRVSNVLSHIGSVTAKDFGRVSGLTMKDIINEAAREGHDLLFADNPSAVLKELTGLIQNTIRSKWHEVLE

SEQ ID NO: 1887 - DNA, 1038 bp, synthetic construct
  misc_feature 1..1038: note = variant of RNA ligase 2 from Klebsiella phage KP179
  source 1..1038: mol_type = other DNA
atgcatcaccatcaccatcacggtggcagcaacatgtttgcgtattattcaagtctggaaaaccataccaatgccaagttcattagcaagatccgtggtgcaggcttcctgatgcacaccgtggaatgggtagctcgcgagaagattcatggaacgaactttagcgttatcattactccgaccgaaatcgtgccagccaaacgcacagggccgatcttggaaggtgagagcttctttggtcatgaaattatcatgaaaaaatatatggactccttcaaaaaggtgcagaacatgctgaatgcgatggatcttgttagcgtgcaaatctttggcgaatttgcgggtggtggcattcagaaaggcgtcgattacggagacaaagatttctatgtgtttgacatcctgtctgatagcgggaacgagaaagtttactgggatgactatcgcgtcgaatcgttttgcaccactgtgggtctgaaattagcgcctctgctgggacgtggtagtttcgctgaactgtcccagtacccaaacgatttcaaaagcctggtgaaccgttataatgaattggttgacacggtcggcctggagatggccaataaacacgtctttggtccgcaagcgtcttctgaaactggcctggcagaaggctacgttcttaaacccgtctatccgcgcttctttaatgtgggtacgcgcgtggcgattaaatgcaagaactccaaattttcggagaaagccaaaaaagattcgccaattaaagcgaaggttgaactgacggagaacgataaacgtctgctcgaaatctttagcgagtatgttacctggaatcgcgtcagtaacgtactgtcacatattggctcagtgaccgcaaaagattttgggcgtgtttcgggtctgacgatgaaagacatcattcgcgaagcagcacgcgaaggccatgatctgttgttcgctgataacccgtcggcggtgctgaaggagctgacaggcctcatccagaacacgattcgctccaaatggcacgaagttctggag

SEQ ID NO: 1888 - protein, 346 aa, synthetic construct
  REGION 1..346: note = variant of RNA ligase 2 from Klebsiella phage KP179
MHHHHHHGGSNMFAYYSSLENHTNAKFISKIRGAGFLMHTVEWVAREKIHGTNFSVIITPTEIVPAKRTGPILEGESFFGHEIIMKKYMDSFKKVQNMLNAMDLVSVQIFGEFAGGGIQKGVDYGDKDFYVFDILSDSGNEKVYWDDYRVESFCTTVGLKLAPLLGRGSFAELSQYPNDFKSLVNRYNELVDTVGLEMANKHVFGPQASSETGLAEGYVLKPVYPRFFNVGTRVAIKCKNSKFSEKAKKDSPIKAKVELTENDKRLLEIFSEYVTWNRVSNVLSHIGSVTAKDFGRVSGLTMKDIIREAAREGHDLLFADNPSAVLKELTGLIQNTIRSKWHEVLE

SEQ ID NO: 1889 - DNA, 1038 bp, synthetic construct
  misc_feature 1..1038: note = variant of RNA ligase 2 from Klebsiella phage KP179
  source 1..1038: mol_type = other DNA
atgcatcaccatcaccatcacggtggcagcaacatgtttgcgtattattcaagtctggaaaaccataccaatgccaagttcattagcaagatccgtggtgcaggcttcctggcgcacaccgtggaatgggtagctcgcgagaagattcatggaacgaactttagcgttatcattactccgaccgaaatccagccggccaaacgcacagggccgatcttggaaggcgagtcgttctttggtcatgaaattatcatgggcaaatatatggactccttcgtgaaggtgcagaacatgctgaatgcgatggatcttgttagcgtgcaaatctttggcgaatttgcgggtggtggcattcagaaaggcgtcgattacggagacaaagatttctatgtgtttgacatcctgtctgatagcgggaacgagaaagtttactgggatgactatcgcgtcgaatcgttttgcaccactgtgggtctgaaattagcgcctctgctgggacgtggtagtttcgctgaactgtcccagtacccaaacgatttcaaaagcctggtgaaccgttataatgaattggttgaaacggtcggcctggagatggccaataaacacgtctttggtccgcaagcgtcttctgaaactggcctggcagaaggctacgttcttaaacccgtctatccgcgcttctttaatgtgggtacgcgcgtggcgattaaatgcaagaaccgcaaattttcggagaaagccaagctggactcgccaattaaagcgaaggttgaactgacggagaacgataaacgtctgctcgaaatctttagcgagtatgttacctggaatcgcgtcagtaacgtactgtcacatattggctcagtgaccgcaaaagattttgggcgtgtttcgggtctgacgatgaaagacatcattaatgaagcagcacgcgaaggccatgatctgttgttcgctgataacccgtcggcggtgctgaaggagctgacaggcctcatccagaacacgattcgctccaaatggcacgaagttctggag

SEQ ID NO: 1890 - protein, 346 aa, synthetic construct
  REGION 1..346: note = variant of RNA ligase 2 from Klebsiella phage KP179
MHHHHHHGGSNMFAYYSSLENHTNAKFISKIRGAGFLAHTVEWVAREKIHGTNFSVIITPTEIQPAKRTGPILEGESFFGHEIIMGKYMDSFVKVQNMLNAMDLVSVQIFGEFAGGGIQKGVDYGDKDFYVFDILSDSGNEKVYWDDYRVESFCTTVGLKLAPLLGRGSFAELSQYPNDFKSLVNRYNELVETVGLEMANKHVFGPQASSETGLAEGYVLKPVYPRFFNVGTRVAIKCKNRKFSEKAKLDSPIKAKVELTENDKRLLEIFSEYVTWNRVSNVLSHIGSVTAKDFGRVSGLTMKDIINEAAREGHDLLFADNPSAVLKELTGLIQNTIRSKWHEVLE

SEQ ID NO: 1891 - DNA, 1038 bp, synthetic construct
  misc_feature 1..1038: note = variant of RNA ligase 2 from Klebsiella phage KP179
  source 1..1038: mol_type = other DNA
atgcatcaccatcaccatcacggtggcagcaacatgtttgcgtattattcaagtctggaaaaccataccaatgccaagttcattagcaagatccgtggtgcaggcttcctggcgcacaccgtggaatgggtagctcgcgagaagattcatggaacgaactttagcgttatcattactccgaccgaaatcgtgccggccaaacgcacagggccgatcttggaaggcgagtcgttctttggtcatgaaattatcatgaaaaaatatatggactccttcgtgaaggtgcagaacatgctgaatgcgatggatcttgttagcgtgcaaatctttggcgaatttgcgggtggtggcattcagaaaggcgtcgattacggagacaaagatttctatgtgtttgacatcctgtctgatagcgggaacgagaaagtttactgggatgactatcgcgtcgaatcgttttgcaccactgtgggtctgaaattagcgcctctgctgggacgtggtagtttcgctgaactgtcccagtacccaaacgatttcaaaagcctggtgaaccgttataatgaattggttgacacggtcggcctggagatggccaataaacacgtctttggtccgcaagcgtcttctgaaactggcctggcagaaggctacgttcttaaacccgtctatccgcgcttctttaatgtgggtacgcgcgtggcgattaaatgcaagaactccaaattttcggagaaagccaagctggactcgccaattaaagcgaaggttgaactgacggagaacgataaacgtctgctcgaaatctttagcgagtatgttacctggaatcgcgtcagtaacgtactgtcacatattggctcagtgaccgcaaaagattttgggcgggtttcgggtctgacgatgaaagacatcattaatgaagcagcacgcgaaggccatgatctgttgttcgctgataacccgtcggcggtgctgaaggagctgacaggcctcatccagaacacgattcgctccaaatggaccgaagttttggag

SEQ ID NO: 1892 - protein, 346 aa, synthetic construct
  REGION 1..346: note = variant of RNA ligase 2 from Klebsiella phage KP179
MHHHHHHGGSNMFAYYSSLENHTNAKFISKIRGAGFLAHTVEWVAREKIHGTNFSVIITPTEIVPAKRTGPILEGESFFGHEIIMKKYMDSFVKVQNMLNAMDLVSVQIFGEFAGGGIQKGVDYGDKDFYVFDILSDSGNEKVYWDDYRVESFCTTVGLKLAPLLGRGSFAELSQYPNDFKSLVNRYNELVDTVGLEMANKHVFGPQASSETGLAEGYVLKPVYPRFFNVGTRVAIKCKNSKFSEKAKLDSPIKAKVELTENDKRLLEIFSEYVTWNRVSNVLSHIGSVTAKDFGRVSGLTMKDIINEAAREGHDLLFADNPSAVLKELTGLIQNTIRSKWTEVLE

SEQ ID NO: 1893 - DNA, 1038 bp, synthetic construct
  misc_feature 1..1038: note = variant of RNA ligase 2 from Klebsiella phage KP179
  source 1..1038: mol_type = other DNA
atgcatcaccatcaccatcacggtggcagcaacatgtttgcgtattattcaagtctggaaaaccataccaatgccaagttcattagcaagatccgtggtgcaggcttcctgatgcacaccgtggaatgggtagctcgcgagaagattcatggaacgaactttagcgttatcattactccgaccgaaatcgtgccggccaaacgcacagggccgatcttggaaggcgagtcgttctttggtcatgaaattatcatgaaaaaatatatggactccttcgtgaaggtgcagaacatgctgaatgcgatggatcttgttagcgtgcaaatctttggcgaatttgcgggtggtggcattcagaaaggcgtcgattacggagacaaagatttctatgtgtttgacatcctgtctgatagcgggaacgagaaagtttactgggatgactatcgcgtcgaatcgttttgcaccactgtgggtctgaaattagcgcctctgctgggacgtggtagtttcgctgaactgtcccagtacccaaacgatttcaaaagcctggtgaaccgttataatgaattggttgaaacggtcggcctggagatggccaataaacacgtctttggtccgcaagcgtcttctgaaactggcctggcagaaggctacgttcttaaacccgtccgcccgcgcttctttaatgtgggtacgcgcgtggcgattaaatgcaagaactccaaattttcggagaaagccaagctggactcgccaattaaagcgaaggttgaactgacggagaacgataaacgtctgctcgaaatctttagcgagtatgttacctggaatcgcgtcagtaacgtactgtcacatattggctcagtgaccgcaaaagattttgggcgggtttcgggtctgacgatgaaagacatcattaatgaagcagcacgcgaaggccatgatctgttgttcgctgataacccgtcggcggtgctgaaggagctgacaggcctcatccagaacacgattcgctccaaatggcacgaagttctggag

SEQ ID NO: 1894 - protein, 346 aa, synthetic construct
  REGION 1..346: note = variant of RNA ligase 2 from Klebsiella phage KP179
MHHHHHHGGSNMFAYYSSLENHTNAKFISKIRGAGFLMHTVEWVAREKIHGTNFSVIITPTEIVPAKRTGPILEGESFFGHEIIMKKYMDSFVKVQNMLNAMDLVSVQIFGEFAGGGIQKGVDYGDKDFYVFDILSDSGNEKVYWDDYRVESFCTTVGLKLAPLLGRGSFAELSQYPNDFKSLVNRYNELVETVGLEMANKHVFGPQASSETGLAEGYVLKPVRPRFFNVGTRVAIKCKNSKFSEKAKLDSPIKAKVELTENDKRLLEIFSEYVTWNRVSNVLSHIGSVTAKDFGRVSGLTMKDIINEAAREGHDLLFADNPSAVLKELTGLIQNTIRSKWHEVLE

SEQ ID NO: 1895 - DNA, 1038 bp, synthetic construct
  misc_feature 1..1038: note = variant of RNA ligase 2 from Klebsiella phage KP179
  source 1..1038: mol_type = other DNA
atgcatcaccatcaccatcacggtggcagcaacatgtttgcgtattattcaagtctggaaaaccataccaatgccaagttcattagcaagatccgtggtgcaggcttcctgatgcacaccgtggaatgggtagctcgcgagaagattcatggaacgaactttagcgttatcattactccgaccgaaatcgtgccagccaaacgcacagggccgatcttggaaggtgagagcttctttggtcatgaaattatcatgaaaaaatatatggactccttcgtgaaggtgcagaacatgctgaatgcgatggatcttgttagcgtgcaaatctttggcgaatttgcgggtggtggcattcagaaaggcgtcgattacggagacaaagatttctatgtgtttgacatcctgtctgatagcgggaacgagaaagtttactgggatgactatcgcgtcgaatcgttttgcaccactgtgggtctgaaattagcgcctctgctgggacgtggtagtttcgctgaactgtcccagtacccaaacgatttcaaaagcctggtgaaccgttataatgaattggttgacacggtcggcctggagatggccaataaacacgtctttggtccgcaagcgtcttctgaaactggcctggcagaaggctacgttcttaaacccgtctatccgcgcttctttaatgtgggtacgcgcgtggcgattaaatgcaagaactccaaattttcggagaaagccggcctgatttcgccaattaaagcgaaggttgaactgacggagaacgataaacgtctgctcgaaatctttagcgaatatgttacctggaatcgcgtcagtaacgtactgtcacatattggctcagtgaccgccaaagattttgggcgtgtttcgggtctgacgatgaaagacatcattcgcgaagcagcacgcgaaggccatgatctgttgttcgctgataacccgtcggcggtgctgaaggagctgacaggcctcatccagaacacgattcgctccaaatggcacgaagttctggag

SEQ ID NO: 1896 - protein, 346 aa, synthetic construct
  REGION 1..346: note = variant of RNA ligase 2 from Klebsiella phage KP179
MHHHHHHGGSNMFAYYSSLENHTNAKFISKIRGAGFLMHTVEWVAREKIHGTNFSVIITPTEIVPAKRTGPILEGESFFGHEIIMKKYMDSFVKVQNMLNAMDLVSVQIFGEFAGGGIQKGVDYGDKDFYVFDILSDSGNEKVYWDDYRVESFCTTVGLKLAPLLGRGSFAELSQYPNDFKSLVNRYNELVDTVGLEMANKHVFGPQASSETGLAEGYVLKPVYPRFFNVGTRVAIKCKNSKFSEKAGLISPIKAKVELTENDKRLLEIFSEYVTWNRVSNVLSHIGSVTAKDFGRVSGLTMKDIIREAAREGHDLLFADNPSAVLKELTGLIQNTIRSKWHEVLE

SEQ ID NO: 1897 - DNA, 1038 bp, synthetic construct
  misc_feature 1..1038: note = variant of RNA ligase 2 from Klebsiella phage KP179
  source 1..1038: mol_type = other DNA
atgcatcaccatcaccatcacggtggcagcaacatgtttgcgtattattcaagtctggaaaaccataccaatgccaagttcattagcaagatccgtggtgcaggcttcctgatgcacaccgtggaatgggtagctcgcgagaagattcatggaacgaactttagcgttatcattactccgaccgaaatcgtgccagccaaacgcacagggccgatcttggaagatgagatgttctttggtcatgaaattatcatgaaaaaatatatggactccttcgtgaaggtgcagaacatgctgaatgcgatggatcttgttagcgtgcaaatctttggcgaatttgcgggtggtggcattcagaaaggcgtcgattacggagacaaagatttctatgtgtttgacatcctgtctgatagcgggaacgagaaagtttactgggatgactatcgcgtcgaatcgttttgcaccactgtgggtctgaaattagcgcctctgctgggacgtggtagtttcgctgaactgtcccagtacccaaacgatttcaaaagcctggtgaaccgttataatgaattggttgacacggtcggcctggagatggccaataaacacgtctttggtccgcaagcgtcttctgaaactggcctggcagaaggctacgttcttaaacccgtctatccgcgcttctttaatgtgggtacgcgcgtggcgattaaatgcaagaactccaaattttcggagaaagccaaactgatttcgccaattaaagcgaaggttgaactgacggagaacgataaacgtctgctcggaatctttagcgaatatgttacctggaatcgcgtcagtaacgtactgtcacatattggctcagtgaccgcaaaagattttgggcgtgtttcgggtctgacgatgaaagacatcattcgcgaagcagcacgcgaaggccatgatctgttgttcgctgataacccgtcggcggtgctgaaggagctgacaggcctcatccagaacacgattcgctccaaatggaccgaagttttggag

SEQ ID NO: 1898 - protein, 346 aa, synthetic construct
  REGION 1..346: note = variant of RNA ligase 2 from Klebsiella phage KP179
MHHHHHHGGSNMFAYYSSLENHTNAKFISKIRGAGFLMHTVEWVAREKIHGTNFSVIITPTEIVPAKRTGPILEDEMFFGHEIIMKKYMDSFVKVQNMLNAMDLVSVQIFGEFAGGGIQKGVDYGDKDFYVFDILSDSGNEKVYWDDYRVESFCTTVGLKLAPLLGRGSFAELSQYPNDFKSLVNRYNELVDTVGLEMANKHVFGPQASSETGLAEGYVLKPVYPRFFNVGTRVAIKCKNSKFSEKAKLISPIKAKVELTENDKRLLGIFSEYVTWNRVSNVLSHIGSVTAKDFGRVSGLTMKDIIREAAREGHDLLFADNPSAVLKELTGLIQNTIRSKWTEVLE

SEQ ID NO: 1899 - DNA, 1038 bp, synthetic construct
  misc_feature 1..1038: note = variant of RNA ligase 2 from Klebsiella phage KP179
  source 1..1038: mol_type = other DNA
atgcatcaccatcaccatcacggtggcagcaacatgtttgcgtattattcaagtctggaaaaccataccaatgccaagttcattagcaagatccgtggtgcaggcttcctgatgcacaccgtggaatgggtagctcgcgagaagattcatggaacgaactttagcgttatcattactccgaccgaaatcgtgccagccaaacgcacagggccgatcttggaaggtgagagcttctttggtcatgaaattatcatgaaaaaatatatggactccttcaaaaaggtgcagaacatgctgaatgcgatggatcttgttagcgtgcaaatctttggcgaatttgcgggtggtggcattcagaaaggcgtcgattacggagacaaagatttctatgtgtttgacatcctgtctgatagcgggaacgagaaagtttactgggatgactatcgcgtcgaatcgttttgcaccactgtgggtctgaaattagcgcctctgctgggacgtggtagtttcgctgaactgtcccagtacccaaacgatttcaaaagcctggtgaaccgttataatgaattggttgacacggtcggcctggagatggccaataaacacgtctttggtccgcaagcgtcttctgaaactggcctggcagaaggctacgttcttaaacccgtctatccgcgcttctttaatgtgggtacgcgcgtggcgattaaatgcaagaactccaaattttcggagaaagccaagctggactcgccaattaaagcgaaggttgaactgacggagaacgataaacgtctgctcggaatctttagcgaatatgttacctggaatcgcgtcagtaacgtactgtcacatattggctcagtgaccgcaaaagattttgggcgtgtttcgggtctgacgatgaaagacatcattaatgaagcagcacgcgaaggccatgatctgttgttcgctgataacccgtcggcggtgctgaaggagctgacaggcctcatccagaacacgattcgctccaaatggcacgaagttctggag

SEQ ID NO: 1900 - protein, 346 aa, synthetic construct
  REGION 1..346: note = variant of RNA ligase 2 from Klebsiella phage KP179
MHHHHHHGGSNMFAYYSSLENHTNAKFISKIRGAGFLMHTVEWVAREKIHGTNFSVIITPTEIVPAKRTGPILEGESFFGHEIIMKKYMDSFKKVQNMLNAMDLVSVQIFGEFAGGGIQKGVDYGDKDFYVFDILSDSGNEKVYWDDYRVESFCTTVGLKLAPLLGRGSFAELSQYPNDFKSLVNRYNELVDTVGLEMANKHVFGPQASSETGLAEGYVLKPVYPRFFNVGTRVAIKCKNSKFSEKAKLDSPIKAKVELTENDKRLLGIFSEYVTWNRVSNVLSHIGSVTAKDFGRVSGLTMKDIINEAAREGHDLLFADNPSAVLKELTGLIQNTIRSKWHEVLE

SEQ ID NO: 1901 - DNA, 1038 bp, synthetic construct
  misc_feature 1..1038: note = variant of RNA ligase 2 from Klebsiella phage KP179
  source 1..1038: mol_type = other DNA
atgcatcaccatcaccatcacggtggcagcaacatgtttgcgtattattcaagtctggaaaaccataccaatgccaagttcattagcaagatccgtggtgcaggcttcctgatgcacaccgtggaatgggtagctcgcgagaagattcatggaacgaactttagcgttatcattactccgaccgaaatcgtgccggccaaacgcacagggccgatcttggaaggcgagtcgttctttggtcatgaaattatcatgaaaaaatatatggactccttcgtgaaggtgcagaacatgctgaatgcgatggatcttgttagcgtgcaaatctttggcgaatttgcgggtggtggcattcagaaaggcgtcgattacggagacaaagatttctatgtgtttgacatcctgtctgatagcgggaacgagaaagtttactgggatgactatcgcgtcgaatcgttttgcaccactgtgggtctgaaattagcgcctctgctgggacgtggtagtttcgctgaactgtcccagtacccaaacgatttcaaaagcctggtgaaccgttataatgaattggttgaaacggtcggcctggagatggccaataaacacgtctttggtccgcaagcgtcttctgaaactggcctggcagaaggctacgttcttaaacccgtctatccgcgcttctttaatgtgggtacgcgcgtggcgattaaatgcaagaactccaaattttcggagaaagccaagctggactcgccaattaaagcgaaggttgaactgacggagaacgataaacgtctgctcgaaatctttagcgagtatgttacctggaatcgcgtcagtaacgtactgtcacatattggctcagtgaccgcaaaagattttgggcgtgtttcgggtctgacgatgaaagacatcattaatgaagcagcacgcgaaggccatgatctgttgttcgctgataacccgtcggcggtgctgaaggagctgacaggcctcatccagaacacgattcgctccaaatggcacgaagttctggag

SEQ ID NO: 1902 - protein, 346 aa, synthetic construct
  REGION 1..346: note = variant of RNA ligase 2 from Klebsiella phage KP179
MHHHHHHGGSNMFAYYSSLENHTNAKFISKIRGAGFLMHTVEWVAREKIHGTNFSVIITPTEIVPAKRTGPILEGESFFGHEIIMKKYMDSFVKVQNMLNAMDLVSVQIFGEFAGGGIQKGVDYGDKDFYVFDILSDSGNEKVYWDDYRVESFCTTVGLKLAPLLGRGSFAELSQYPNDFKSLVNRYNELVETVGLEMANKHVFGPQASSETGLAEGYVLKPVYPRFFNVGTRVAIKCKNSKFSEKAKLDSPIKAKVELTENDKRLLEIFSEYVTWNRVSNVLSHIGSVTAKDFGRVSGLTMKDIINEAAREGHDLLFADNPSAVLKELTGLIQNTIRSKWHEVLE

SEQ ID NO: 1903 - DNA, 1038 bp, synthetic construct
  misc_feature 1..1038: note = variant of RNA ligase 2 from Klebsiella phage KP179
  source 1..1038: mol_type = other DNA
atgcatcaccatcaccatcacggtggcagcaacatgtttgcgtattattcaagtctggaaaaccataccaatgccaagttcattagcaagatccgtggtgcaggcttcctggcgcacaccgtggaatgggtagctcgcgagaagattcatggaacgaactttagcgttatcattactccgaccgaaatcgtgccggccaaacgcacagggccgatcttggaaggcgagtcgttctttggtcatgaaattatcatgaaaaaatatatggactccttcgtgaaggtgcagaacatgctgaatgcgatggatcttgttagcgtgcaaatctttggcgaatttgcgggtggtggcattcagaaaggcgtcgattacggagacaaagatttctatgtgtttgacatcctgtctgatagcgggaacgagaaagtttactgggatgactatcgcgtcgaatcgttttgcaccactgtgggtctgaaattagcgcctctgctgggacgtggtagtttcgctgaactgtcccagtacccaaacgatttcaaaagcctggtgaaccgttataatgaattggttgaaacggtcggcctggagatggccaataaacacgtctttggtccgcaagcgtcttctgaaactggcctggcagaaggctacgttcttaaacccgtctatccgcgcttctttaatgtgggtacgcgcgtggcgattaaatgcaagaactccaaattttcggagaaagccaagctggactcgccaattaaagcgaaggttgaactgacggagaacgataaacgtctgctcgaaatctttagcgagtatgttacctggaatcgcgtcagtaacgtactgtcacatattggctcagtgaccgcaaaagattttgggcgggtttcgggtctgacgatgaaagacatcattaatgaagcagcacgcgaaggccatgatctgttgttcgctgataacccgtcggcggtgctgaaggagctgacaggcctcatccagaacacgattcgctccaaatggcacgaagttctggag

SEQ ID NO: 1904 - protein, 346 aa, synthetic construct
  REGION 1..346: note = variant of RNA ligase 2 from Klebsiella phage KP179
MHHHHHHGGSNMFAYYSSLENHTNAKFISKIRGAGFLAHTVEWVAREKIHGTNFSVIITPTEIVPAKRTGPILEGESFFGHEIIMKKYMDSFVKVQNMLNAMDLVSVQIFGEFAGGGIQKGVDYGDKDFYVFDILSDSGNEKVYWDDYRVESFCTTVGLKLAPLLGRGSFAELSQYPNDFKSLVNRYNELVETVGLEMANKHVFGPQASSETGLAEGYVLKPVYPRFFNVGTRVAIKCKNSKFSEKAKLDSPIKAKVELTENDKRLLEIFSEYVTWNRVSNVLSHIGSVTAKDFGRVSGLTMKDIINEAAREGHDLLFADNPSAVLKELTGLIQNTIRSKWHEVLE

SEQ ID NO: 1905 - DNA, 1038 bp, synthetic construct
  misc_feature 1..1038: note = variant of RNA ligase 2 from Klebsiella phage KP179
  source 1..1038: mol_type = other DNA
atgcatcaccatcaccatcacggtggcagcaacatgtttgcgtattattcaagtctggaaaaccataccaatgccaagttcattagcaagatccgtggtgcaggcttcctgatgcacaccgtggaatgggtagctcgcgagaagattcatggaacgaactttagcgttatcattactccgaccgaaatccagccggccaaacgcacagggccgatcttggaaggcgagtcgttctttggtcatgaaattatcatgaaaaaatatatggactccttcgtgaaggtgcagaacatgctgaatgcgatggatcttgttagcgtgcaaatctttggcgaatttgcgggtggtggcattcagaaaggcgtcgattacggagacaaagatttctatgtgtttgacatcctgtctgatagcgggaacgagaaagtttactgggatgactatcgcgtcgaatcgttttgcaccactgtgggtctgaaattagcgcctctgctgggacgtggtagtttcgctgaactgtcccagtacccaaacgatttcaaaagcctggtgaaccgttataatgaattggttgacacggtcggcctggagatggccaataaacacgtctttggtccgcaagcgtcttctgaaactggcctggcagaaggctacgttcttaaacccgtctatccgcgcttctttaatgtgggtacgcgcgtggcgattaaatgcaagaactccaaattttcggagaaagccaagctggactcgccaattaaagcgaaggttgaactgacggagaacgataaacgtctgctcgaaatctttagcgagtatgttacctggaatcgcgtcagtaacgtactgtcacatattggctcagtgaccgcaaaagattttgggcgtgtttcgggtctgacgatgaaagacatcattaatgaagcagcacgcgaaggccatgatctgttgttcgctgataacccgtcggcggtgctgaaggagctgacaggcctcatccagaacacgattcgctccaaatggcacgaagttctggag

SEQ ID NO: 1906 - protein, 346 aa, synthetic construct
  REGION 1..346: note = variant of RNA ligase 2 from Klebsiella phage KP179
MHHHHHHGGSNMFAYYSSLENHTNAKFISKIRGAGFLMHTVEWVAREKIHGTNFSVIITPTEIQPAKRTGPILEGESFFGHEIIMKKYMDSFVKVQNMLNAMDLVSVQIFGEFAGGGIQKGVDYGDKDFYVFDILSDSGNEKVYWDDYRVESFCTTVGLKLAPLLGRGSFAELSQYPNDFKSLVNRYNELVDTVGLEMANKHVFGPQASSETGLAEGYVLKPVYPRFFNVGTRVAIKCKNSKFSEKAKLDSPIKAKVELTENDKRLLEIFSEYVTWNRVSNVLSHIGSVTAKDFGRVSGLTMKDIINEAAREGHDLLFADNPSAVLKELTGLIQNTIRSKWHEVLE

SEQ ID NO: 1907 - DNA, 1038 bp, synthetic construct
  misc_feature 1..1038: note = variant of RNA ligase 2 from Klebsiella phage KP179
  source 1..1038: mol_type = other DNA
atgcatcaccatcaccatcacggtggcagcaacatgtttgcgtattattcaagtctggaaaaccattacaatgctaagttcattgagaagatccgtggtgcaggcttcctgatgcacaccgtggaatgggtagctcgcgagaagattcatggaacgaactttagcgttatcattactccgaccgaaatcgtcccagccaaacgcacagggccgatcttggaaggcgagtcgttctttggtcacgaaattatcatggataaatatatggactccttcgtgaaggtgcagaacatgctgaatgccatggatcttgttagcgtgcaaatctttggcgaatttgcgggtggtggcattcagaaaggcgtcgattacggagacaaagatttctatgtgtttgacatcctgtctgatagcgggaacgagaaagtttactgggatgactatcgcgtcgaatcgttttgcaccactgtgggtctgaaattagcgcctctgctgggacgtggtagtttcgctgaactgtcccagtacccaaacgatttcaaaagcctggtgaaccgttataatgaattggttgacacggtcggcctggagatggccaataaacacgtctttggtccgcaagcgtcttctgaaactggcctggcagaaggctacgttcttaaacccgtctatccgatcttctttaataccggtacgcgcgtggcgattaaatgcaagaactccaaattttcggagaaagccaagctggactcgccaattagtgcgaaggttgaactgacggagaacgataaacgtctgctcgaaatctttagcgagtatgttacctggaatcgcgtcagtaacgtactgtcacatattggctcagtgaccgcaaaagattttgggcgtgtttcgggtctgacgatgaaagacatcattaatgaagcagcacgcgaaggccatgatctgttgttcgctgataacccgtcggcggtgctgaaggagctgactggcctcatccagaacacgattcgctccaaatggcacgaagttctggag

SEQ ID NO: 1908 - protein, 346 aa, synthetic construct
  REGION 1..346: note = variant of RNA ligase 2 from Klebsiella phage KP179
MHHHHHHGGSNMFAYYSSLENHYNAKFIEKIRGAGFLMHTVEWVAREKIHGTNFSVIITPTEIVPAKRTGPILEGESFFGHEIIMDKYMDSFVKVQNMLNAMDLVSVQIFGEFAGGGIQKGVDYGDKDFYVFDILSDSGNEKVYWDDYRVESFCTTVGLKLAPLLGRGSFAELSQYPNDFKSLVNRYNELVDTVGLEMANKHVFGPQASSETGLAEGYVLKPVYPIFFNTGTRVAIKCKNSKFSEKAKLDSPISAKVELTENDKRLLEIFSEYVTWNRVSNVLSHIGSVTAKDFGRVSGLTMKDIINEAAREGHDLLFADNPSAVLKELTGLIQNTIRSKWHEVLE

SEQ ID NO: 1909 - DNA, 1038 bp, synthetic construct
  misc_feature 1..1038: note = variant of RNA ligase 2 from Klebsiella phage KP179
  source 1..1038: mol_type = other DNA
atgcatcaccatcaccatcacggtggcagcaacatgtttgcgtattattcaagtctggaaaaccattacaatgctaagttcattgagaagatccgtggtgcaggcttcctgatgcacaccgtggaatgggtagctcgcgagaagattcatggaacgaactttagcgttatcattactccgaccgaaatcgtcccagccaaacgcacagggccgatcttggaaggcgagtcgttctttggtcacgaaattatcatgaaaaaatatatggactccttcgtgaaggtgcagaacatgctgaatgccatggatcttgttagcgtgcaaatctttggcgaatttgcgggtggtggcattcagaaaggcgtcgattacggagacaaagatttctatgtgtttgacatcctgtctgatagcgggaacgagaaagtttactgggatgactatcgcgtcgaatcgttttgcaccactgtgggtctgaaattagcgcctctgctgggacgtggtagtttcgctgaactgtcccagtacccaaacgatttcaaaagcctggtgaaccgttataatgaattggttgacacggtcggcctggagatggccaataaacacgtctttggtccgcaagcgtcttctgaaactggcctggcagaaggctacgttcttaaacccgtctatccgatcttctttaataccggtacgcgcgtggcgattaaatgcaagaactccaaattttcggagaaagccaagctggactcgccaattagtgtgaaggttgaactgacggagaacgataaacgtctgctcgaaatctttagcgagtatgttacctggaatcgcgtcagtaacgtactgtcacatattggctcagtgaccgcaaaagattttgggcgtgtttcgggtctgacgatgaaagacatcattaatgaagcagcacgcgaaggccatgatctgttgttcgctgataacccgtcggcggtgctgaaggagctgactggcctcatccagaacacgattcgctccaaatggcacgaagttctggag

SEQ ID NO: 1910 - protein, 346 aa, synthetic construct
  REGION 1..346: note = variant of RNA ligase 2 from Klebsiella phage KP179
MHHHHHHGGSNMFAYYSSLENHYNAKFIEKIRGAGFLMHTVEWVAREKIHGTNFSVIITPTEIVPAKRTGPILEGESFFGHEIIMKKYMDSFVKVQNMLNAMDLVSVQIFGEFAGGGIQKGVDYGDKDFYVFDILSDSGNEKVYWDDYRVESFCTTVGLKLAPLLGRGSFAELSQYPNDFKSLVNRYNELVDTVGLEMANKHVFGPQASSETGLAEGYVLKPVYPIFFNTGTRVAIKCKNSKFSEKAKLDSPISVKVELTENDKRLLEIFSEYVTWNRVSNVLSHIGSVTAKDFGRVSGLTMKDIINEAAREGHDLLFADNPSAVLKELTGLIQNTIRSKWHEVLE

SEQ ID NO: 1911 - DNA, 1038 bp, synthetic construct
  misc_feature 1..1038: note = variant of RNA ligase 2 from Klebsiella phage KP179
  source 1..1038: mol_type = other DNA
atgcatcaccatcaccatcacggtggcagcaacatgtttgcgtattattcaagtctggaaaaccattacaatgctaagttcattgagaagatccgtggtgcaggcttcctgatgcacaccgtggaatgggtagctcgcgagaagattcatggaacgaactttagcgttatcattactccgaccgaaatcgtcccagccaaacgcacagggccgatcttggaaggcgagtcgttctttggtcacgaaattatcatgaaaaaatatatggactccttcgtgaaggtgcagaacatgctgaatgccatggatcttgttagcgtgcaaatctttggcgaatttgcgggtggtggcattcagaaaggcgtcgattacggagacaaagatttctatgtgtttgacatcctgtctgatagcgggaacgagaaagtttactgggatgactatcgcgtcgaatcgttttgcaccactgtgggtctgaaattagcgcctctgctgggacgtggtagtttcgctgaactgtcccagtacccaaacgatttcaaaagcctggtgaaccgttataatgaattggttgacacggtcggcctggagatggccaataaacacgtctttggtccgcaagcgtcttctgaaactggcctggcagaaggctacgttcttaaacccgtctatccgatcttctttaataccggtacgcgcgtggcgattaaatgcaagaactccaaattttcggagaaagccaagctggactcgccaattagtgcgaaggttgaactgacggagaacgataaacgtctgctcgaaatctttagcgagtatgttacctggaatcgcgtcagtaacgtactgtcacatattggctcagtgaccgcaaaagattttgggcgtgtttcgggtctgacgatgaaagacatcactaatgaagcagcacgcgaaggccatgatctgttgttcgctgataacccgtcggcggtgctgaaggagctgactggcctcatccagaacacgattcgctccaaatggcacgaagttctggag

SEQ ID NO: 1912 - protein, 346 aa, synthetic construct
  REGION 1..346: note = variant of RNA ligase 2 from Klebsiella phage KP179
MHHHHHHGGSNMFAYYSSLENHYNAKFIEKIRGAGFLMHTVEWVAREKIHGTNFSVIITPTEIVPAKRTGPILEGESFFGHEIIMKKYMDSFVKVQNMLNAMDLVSVQIFGEFAGGGIQKGVDYGDKDFYVFDILSDSGNEKVYWDDYRVESFCTTVGLKLAPLLGRGSFAELSQYPNDFKSLVNRYNELVDTVGLEMANKHVFGPQASSETGLAEGYVLKPVYPIFFNTGTRVAIKCKNSKFSEKAKLDSPISAKVELTENDKRLLEIFSEYVTWNRVSNVLSHIGSVTAKDFGRVSGLTMKDITNEAAREGHDLLFADNPSAVLKELTGLIQNTIRSKWHEVLE

SEQ ID NO: 1913 - DNA, 1038 bp, synthetic construct
  misc_feature 1..1038: note = variant of RNA ligase 2 from Klebsiella phage KP179
  source 1..1038: mol_type = other DNA
atgcatcaccatcaccatcacggtggcagcaacatgtttgcgtattattcaagtctggaaaaccattacaatgctaagttcattgagaagatccgtggtgcaggcttcctgatgcacaccgtggaatgggtagctcgcgagaagattcatggaacgaactttagcgttatcattactccgaccgaaatcgtcccagccaaacgcacagggccgatcttggaaggcgagtcgttctttggtcacgaaattatcatgaaaaaatatatggactccttcgtgaaggtgcagaacatgctgaatgccatggatcttgttagcgtgcaaatctttggcgaatttgcgggtggtggcattcagaaaggcgtcgattacggagacaaagatttctatgtgtttgacatcctgtctgatagcgggaacgagaaagtttactgggatgactatcgcgtcgaatcgttttgcaccactgtgggtctgaaattagcgcctctgctgggacgtggtagtttcgctgaactgtcccagtacccaaacgatttcaaaagcctggtgaaccgttataatgaattggttgacacggtcggcctggagatggccaataaacacgtctttggtccgcaagcgtcttctgaaactggcctggcagaaggctacgttcttaaacccgtctatccgatcttctttaataccggtacgcgcgtggcgattaaatgcaagaactccaaattttcggagaaagccaagctgatttcgccaattagtgcgaaggttgaactgacggagaacgataaacgtctgctcgaaatctttagcgagtatgttacctggaatcgcgtcagtaacgtactgtcacatattggctcagtgaccgcaaaagattttgggcgtgtttcgggtctgacgatgaaagacatcattaatgaagcagcacgcgaaggccatgatctgttgttcgctgataacccgtcggcggtgctgaaggagctgactggcctcatccagaacacgattcgctccaaatggcacgaagttctggag

SEQ ID NO: 1914 - protein, 346 aa, synthetic construct
  REGION 1..346: note = variant of RNA ligase 2 from Klebsiella phage KP179
MHHHHHHGGSNMFAYYSSLENHYNAKFIEKIRGAGFLMHTVEWVAREKIHGTNFSVIITPTEIVPAKRTGPILEGESFFGHEIIMKKYMDSFVKVQNMLNAMDLVSVQIFGEFAGGGIQKGVDYGDKDFYVFDILSDSGNEKVYWDDYRVESFCTTVGLKLAPLLGRGSFAELSQYPNDFKSLVNRYNELVDTVGLEMANKHVFGPQASSETGLAEGYVLKPVYPIFFNTGTRVAIKCKNSKFSEKAKLISPISAKVELTENDKRLLEIFSEYVTWNRVSNVLSHIGSVTAKDFGRVSGLTMKDIINEAAREGHDLLFADNPSAVLKELTGLIQNTIRSKWHEVLE

SEQ ID NO: 1915 - DNA, 1038 bp, synthetic construct
  misc_feature 1..1038: note = variant of RNA ligase 2 from Klebsiella phage KP179
  source 1..1038: mol_type = other DNA
atgcatcaccatcaccatcacggtggcagcaacatgtttgcgtattattcaagtctggaaaaccattacaatgctaagttcattgagaagatccgtggtgcaggcttcctgatgcacaccgtggaatgggtagctcgcgagaagattcatggaacgaactttagcgttatcattactccgaccgaaatcgtcccagccaaacgcacagggccgatcttggaagcggagtcgttctttggtcacgaaattatcatgaaaaaatatatggactccttcgtgaaggtgcagaacatgctgaatgccatggatcttgttagcgtgcaaatctttggcgaatttgcgggtggtggcattcagaaaggcgtcgattacggagacaaagatttctatgtgtttgacatcctgtctgatagcgggaacgagaaagtttactgggatgactatcgcgtcgaatcgttttgcaccactgtgggtctgaaattagcgcctctgctgggacgtggtagtttcgctgaactgtcccagtacccaaacgatttcaaaagcctggtgaaccgttataatgaattggttgacacggtcggcctggagatggccaataaacacgtctttggtccgcaagcgtcttctgaaactggcctggcagaaggctacgttcttaaacccgtctatccgatcttctttaataccggtacgcgcgtggcgattaaatgcaagaactccaaattttcggagaaagccaagctggactcgccaattagtgcgaaggttgaactgacggagaacgataaacgtctgctcgaaatctttagcgagtatgttacctggaatcgcgtcagtaacgtactgtcacatattggctcagtgaccgcaaaagattttgggcgtgtttcgggtctgacgatgaaagacatcattaatgaagcagcacgcgaaggccatgatctgttgttcgctgataacccgtcggcggtgctgaaggagctgactggcctcatccagaacacgattcgctccaaatggcacgaagttctggag

SEQ ID NO: 1916 - protein, 346 aa, synthetic construct
  REGION 1..346: note = variant of RNA ligase 2 from Klebsiella phage KP179
MHHHHHHGGSNMFAYYSSLENHYNAKFIEKIRGAGFLMHTVEWVAREKIHGTNFSVIITPTEIVPAKRTGPILEAESFFGHEIIMKKYMDSFVKVQNMLNAMDLVSVQIFGEFAGGGIQKGVDYGDKDFYVFDILSDSGNEKVYWDDYRVESFCTTVGLKLAPLLGRGSFAELSQYPNDFKSLVNRYNELVDTVGLEMANKHVFGPQASSETGLAEGYVLKPVYPIFFNTGTRVAIKCKNSKFSEKAKLDSPISAKVELTENDKRLLEIFSEYVTWNRVSNVLSHIGSVTAKDFGRVSGLTMKDIINEAAREGHDLLFADNPSAVLKELTGLIQNTIRSKWHEVLE

SEQ ID NO: 1917 - DNA, 1038 bp, synthetic construct
  misc_feature 1..1038: note = variant of RNA ligase 2 from Klebsiella phage KP179
  source 1..1038: mol_type = other DNA
atgcatcaccatcaccatcacggtggcagcaacatgtttgcgtattattcaagtctggaaaaccattacaatgctaagttcattgagaagatccgtggtgcaggcttcctgatgcacaccgtggaatgggtagctcgcgagaagattcatggaacgaactttagcgttatcattactccgaccgaaatcgtcccagccaaacgcacagggccgatcttggaaggcgagtcgttctttggtcacgaaattatcatgaaaaaatatatggactccttcgtgaaggtgcagaacatgctgaatgccatggatcttgttagcgtgcaaatctttggcgaatttgcgggtggtggcattcagaaaggcgtcgattacggagacaaagatttctatgtgtttgacatcctgtctgatagcgggaacgagaaagtttactgggatgactatcgcgtcgaatcgttttgcaccactgtgggtctgaaattagcgcctctgctgggacgtggtagtttcgctgaactgtcccagtacccaaacgatttcaaaagcctggtgaaccgttataatgaattggttgacacggtcggcctggagatggccaataaacacgtctttggtccgcaagcgtcttctgaaactggcctggcagaaggctacgttcttaaacccgtctatccgatcttctttaataccggtacgcgcgtggcgattaaatgcaagaactccaaattttcggagaaagccaagctggactcgccaattagtgcgaaggttgaactgacggagaacgataaacgtctgctcgaaatctttagcgagtatgttacctggaatcgcgtcagtaacgtactgtcacatattggctcagtgaccgcaaaagattttgggcgtgtttcgggtctgacgatgaaagacatcattaatgaagcagcacgcgaaggccatgatctgttgtctgctgataacccgtcggcggtgctgaaggagctgactggcctcatccagaacacgattcgctccaaatggcacgaagttctggag

SEQ ID NO: 1918 - protein, 346 aa, synthetic construct
  REGION 1..346: note = variant of RNA ligase 2 from Klebsiella phage KP179
MHHHHHHGGSNMFAYYSSLENHYNAKFIEKIRGAGFLMHTVEWVAREKIHGTNFSVIITPTEIVPAKRTGPILEGESFFGHEIIMKKYMDSFVKVQNMLNAMDLVSVQIFGEFAGGGIQKGVDYGDKDFYVFDILSDSGNEKVYWDDYRVESFCTTVGLKLAPLLGRGSFAELSQYPNDFKSLVNRYNELVDTVGLEMANKHVFGPQASSETGLAEGYVLKPVYPIFFNTGTRVAIKCKNSKFSEKAKLDSPISAKVELTENDKRLLEIFSEYVTWNRVSNVLSHIGSVTAKDFGRVSGLTMKDIINEAAREGHDLLSADNPSAVLKELTGLIQNTIRSKWHEVLE

SEQ ID NO: 1919 - DNA, 1038 bp, synthetic construct
  misc_feature 1..1038: note = variant of RNA ligase 2 from Klebsiella phage KP179
  source 1..1038: mol_type = other DNA
atgcatcaccatcaccatcacggtggcagcaacatgtttgcgtattattcaagtctggaaaaccattacaatgctaagttcattgagaagatccgtggtgcaggcttcctgatgcacaccgtggaatgggtagctcgcgagaagattcatggaacgaactttagcgttatcattactccgaccgaaatcgtcccagccaaacgcacagggccgatcttggaaggcgagtcgttctttggtcacgaaattatcatgaaaaaatatatggactccttcgtgaaggtgcagaacatgctgaatgccatggatcttgttagcgtgcaaatctttggcgaatttgcgggtggtggcattcagaaaggcgtcgattacggagacaaagatttctatgtgtttgacatcctgtctgatagcgggaacgagaaagtttactgggatgactatcgcgtcgaatcgttttgcaccactgtgggtctgaaattagcgcctctgctgggacgtggtagtttcgctgaactgtcccagtacccaaacgatttcaaaagcctggtgaaccgttataatgaattggttgacacggtcggcctggagatggccaataaacacgtctttggtccgcaagcgtcttctgaaactggcctggcagaaggctacgttcttaaacccgtctatccgatcttctttaataccggtacgcgcgtggcgattaaatgcaagaactccaaattttcggagaaagccaagctggactcgccaattagtgcgaaggttgaactgacggagaacgataaacgtctgctcgaaatctttagcgagtatgttacctggaatcgcgtcagtaacgtactgtcacatattggctcagtgaccgcaaaagattttgggcgtgtttcgggtctgacgatgaaagacatcattaatgaagcagcacgcgaaggccatgatctgttgttcgctgataacccgtcggcggtgctgaaggagctgactggcctcatccagcagacgattcgctccaaatggcacgaagttctggag

SEQ ID NO: 1920 - protein, 346 aa, synthetic construct
  REGION 1..346: note = variant of RNA ligase 2 from Klebsiella phage KP179
MHHHHHHGGSNMFAYYSSLENHYNAKFIEKIRGAGFLMHTVEWVAREKIHGTNFSVIITPTEIVPAKRTGPILEGESFFGHEIIMKKYMDSFVKVQNMLNAMDLVSVQIFGEFAGGGIQKGVDYGDKDFYVFDILSDSGNEKVYWDDYRVESFCTTVGLKLAPLLGRGSFAELSQYPNDFKSLVNRYNELVDTVGLEMANKHVFGPQASSETGLAEGYVLKPVYPIFFNTGTRVAIKCKNSKFSEKAKLDSPISAKVELTENDKRLLEIFSEYVTWNRVSNVLSHIGSVTAKDFGRVSGLTMKDIINEAAREGHDLLFADNPSAVLKELTGLIQQTIRSKWHEVLE

SEQ ID NO: 1921 - DNA, 1038 bp, synthetic construct
  misc_feature 1..1038: note = variant of RNA ligase 2 from Klebsiella phage KP179
  source 1..1038: mol_type = other DNA
atgcatcaccatcaccatcacggtggcagcaacatgtttgcgtattattcaagtctggaaaaccattacaatgctaagttcattgagaagatccgtggtgcaggcttcctgatgcacaccgtggaatgggtagctcgcgagaagattcatggaacgaactttagcgttatcattactccgaccgaaatcgtcccagccaaacgcacagggccgatcttggaaggcgagtcgttctttggtcacgaaattatcatgaaaaaatatatggactccttcgtgaaggtgcagaacatgctgaatgccatggatcttgttagcgtgcaaatctttggcgaatttgcgggtggtggcattcagaaaggcgtcgattacggagacaaagatttctatgtgtttgacatcctgtctgatagcgggaacgagaaagtttactgggatgactatcgcgtcgaatcgttttgcaccactgtgggtctgaaattagcgcctctgctgggacgtggtagtttcgctgaactgtcccagtacccaaacgatttcaaaagcctggtgaaccgttataatgaattggttgacacggtcggcctggagatggccaataaacacgtctttggtccgcaagcgtcttctgaaactggcctggcagaaggctacgttcttaaacccgtctatccgatcttctttaataccggtacgcgcgtggcgattaaatgcaagaacgggaaattttcggagaaagccaagctggactcgccaattagtgcgaaggttgaactgacggagaacgataaacgtctgctcgaaatctttagcgagtatgttacctggaatcgcgtcagtaacgtactgtcacatattggctcagtgaccgcaaaagattttgggcgtgtttcgggtctgacgatgaaagacatcattaatgaagcagcacgcgaaggccatgatctgttgttcgctgataacccgtcggcggtgctgaaggagctgactggcctcatccagaacacgattcgctccaaatggcacgaagttctggag

SEQ ID NO: 1922 - protein, 346 aa, synthetic construct
  REGION 1..346: note = variant of RNA ligase 2 from Klebsiella phage KP179
MHHHHHHGGSNMFAYYSSLENHYNAKFIEKIRGAGFLMHTVEWVAREKIHGTNFSVIITPTEIVPAKRTGPILEGESFFGHEIIMKKYMDSFVKVQNMLNAMDLVSVQIFGEFAGGGIQKGVDYGDKDFYVFDILSDSGNEKVYWDDYRVESFCTTVGLKLAPLLGRGSFAELSQYPNDFKSLVNRYNELVDTVGLEMANKHVFGPQASSETGLAEGYVLKPVYPIFFNTGTRVAIKCKNGKFSEKAKLDSPISAKVELTENDKRLLEIFSEYVTWNRVSNVLSHIGSVTAKDFGRVSGLTMKDIINEAAREGHDLLFADNPSAVLKELTGLIQNTIRSKWHEVLE

SEQ ID NO: 1923 - DNA, 1038 bp, synthetic construct
  misc_feature 1..1038: note = variant of RNA ligase 2 from Klebsiella phage KP179
  source 1..1038: mol_type = other DNA
atgcatcaccatcaccatcacggtggcagcaacatgtttgcgtattattcaagtctggaaaaccattacaatgctaagttcattgagaagatccgtggtgcaggcttcctgatgcacaccgtggaatgggtagctcgcgagaagattcatggaacgaactttagcgttatcattactccgaccgaaatcgtcccagccaaacgcacagggccgatcttggaaggcgagtcgttctttggtcacgaaattatcatgaaaaaatatatggactccttcgtgaaggtgcagaacatgctgaatgccatggatcttgttagcgtgcaaatctttggcgaatttgcgggtggtggcattcagaaaggcgtcgattacggagacaaagatttctatgtgtttgacatcctgtctgatagcgggaacgagaaagtttactgggatgactatcgcgtcgaatcgttttgcaccactgtgggtctgaaattagcgcctctgctgggacgtggtagtttcgctgaactgtcccagtacccaaacgatttcaaaagcctggtgaaccgttataatgaattggttgacacggtcggcctggagatggccaataaacacgtctttggtccgcaagcgtcttctgaaactggcctggcagaaggctacgttcttaaacccgtctatccgatcttctttaataccggtacgcgcgtggcgattaaatgcaagaactccaaattttcggagaaagccaagctggagtcgccaattagtgcgaaggttgaactgacggagaacgataaacgtctgctcgaaatctttagcgagtatgttacctggaatcgcgtcagtaacgtactgtcacatattggctcagtgaccgcaaaagattttgggcgtgtttcgggtctgacgatgaaagacatcattaatgaagcagcacgcgaaggccatgatctgttgttcgctgataacccgtcggcggtgctgaaggagctgactggcctcatccagaacacgattcgctccaaatggcacgaagttctggag

SEQ ID NO: 1924 - protein, 346 aa, synthetic construct
  REGION 1..346: note = variant of RNA ligase 2 from Klebsiella phage KP179
MHHHHHHGGSNMFAYYSSLENHYNAKFIEKIRGAGFLMHTVEWVAREKIHGTNFSVIITPTEIVPAKRTGPILEGESFFGHEIIMKKYMDSFVKVQNMLNAMDLVSVQIFGEFAGGGIQKGVDYGDKDFYVFDILSDSGNEKVYWDDYRVESFCTTVGLKLAPLLGRGSFAELSQYPNDFKSLVNRYNELVDTVGLEMANKHVFGPQASSETGLAEGYVLKPVYPIFFNTGTRVAIKCKNSKFSEKAKLESPISAKVELTENDKRLLEIFSEYVTWNRVSNVLSHIGSVTAKDFGRVSGLTMKDIINEAAREGHDLLFADNPSAVLKELTGLIQNTIRSKWHEVLE

SEQ ID NO: 1925 - DNA, 1038 bp, synthetic construct
  misc_feature 1..1038: note = variant of RNA ligase 2 from Klebsiella phage KP179
  source 1..1038: mol_type = other DNA
atgcatcaccatcaccatcacggtggcagcaacatgtttgcgtattattcaagtctggaaaaccattacaatgctaagttcattgagaagatccgtggtgcaggcttcctgatgcacaccgtggaatgggtagctcgcgagaagattcatggaacgaactttagcgttatcattactccgaccgaaatcgtcccagccaaacgcacagggccgatcttggaaggcgagtcgttctttggtcacgaaattatcatgaaaaaatatatggactccttcgtgaaggtgcagaacatgctgaatgccatggatcttgttagcgtgcaaatctttggcgaatttgcgggtggtggcattcagaaaggcgtcgattacggagacaaagatttctatgtgtttgacatcctgtctgatagcgggaacgagaaagtttactgggatgactatcgcgtcgaatcgttttgcaccactgtgggtctgaaattagcgcctctgctgggacgtggtagtttcgctgaactgtcccagtacccaaacgatttcaaaagcctggtgaaccgttataatgaattggttgacacggtcggcctggagatggccaataaacacgtctttggtccgcaagcgtcttctgaaactggcctggcagaaggctacgttcttaaacccgtctatccgatcttctttaataccggtacgcgcgtggcgattaaatgcaagaactccaaattttcggagaaagcctttctggactcgccaattagtgcgaaggttgaactgacggagaacgataaacgtctgctcgaaatctttagcgagtatgttacctggaatcgcgtcagtaacgtactgtcacatattggctcagtgaccgcaaaagattttgggcgtgtttcgggtctgacgatgaaagacatcattaatgaagcagcacgcgaaggccatgatctgttgttcgctgataacccgtcggcggtgctgaaggagctgactggcctcatccagaacacgattcgctccaaatggcacgaagttctggag

SEQ ID NO: 1926 - protein, 346 aa, synthetic construct
  REGION 1..346: note = variant of RNA ligase 2 from Klebsiella phage KP179
MHHHHHHGGSNMFAYYSSLENHYNAKFIEKIRGAGFLMHTVEWVAREKIHGTNFSVIITPTEIVPAKRTGPILEGESFFGHEIIMKKYMDSFVKVQNMLNAMDLVSVQIFGEFAGGGIQKGVDYGDKDFYVFDILSDSGNEKVYWDDYRVESFCTTVGLKLAPLLGRGSFAELSQYPNDFKSLVNRYNELVDTVGLEMANKHVFGPQASSETGLAEGYVLKPVYPIFFNTGTRVAIKCKNSKFSEKAFLDSPISAKVELTENDKRLLEIFSEYVTWNRVSNVLSHIGSVTAKDFGRVSGLTMKDIINEAAREGHDLLFADNPSAVLKELTGLIQNTIRSKWHEVLE

SEQ ID NO: 1927 - DNA, 1038 bp, synthetic construct
  misc_feature 1..1038: note = variant of RNA ligase 2 from Klebsiella phage KP179
  source 1..1038: mol_type = other DNA
atgcatcaccatcaccatcacggtggcagcaacatgtttgcgtattattcaagtctggaaaaccattacaatgctaagttcattgagaagatccgtggtgcaggcttcctgatgcacaccgtggaatgggtagctcgcgagaagattcatggaacgaactttagcgttatcattactccgaccgaaatcgtcccagccaaacgcacagggccgatcttggaaggcgagtcgttctttggtcacgaaattatcatgaaaaaatatatggactccttcgtgaaggtgcagaacatgctgaatgccatggatcttgttagcgtgcaaatctttggcgaatttgcgggtggtggcattcagaaaggcgtcgattacggagacaaagatttctatgtgtttgacatcctgtctgatagcgggaacgagaaagtttactgggatgactatcgcgtcgaatcgttttgcaccactgtgggtctgaaattagcgcctctgctgggacgtggtagtttcgctgaactgtcccagtacccaaacgatttcaaaagcctggtgaaccgttataatgaattggttgacacggtcggcctggagatggccaataaacacgtctttggtccgcaagcgtcttctgaaactggcctggcagaaggctacgttcttaaacccgtctatccgatcttctttaataccggtacgcgcgtggcgattaaatgcaagaactccaaattttcggagaaagccaagctggactcgccaattagtgcgaaggttgaactgacggagaacgataaacgtctgctcgaaatctttagcgagtatgttacctggaatcgcgtcagtaacgtactgtcacatattggctcagtgaccgcaaaagattttgggcgtgtttcgggtctgacgatgaaagacatcattaatgaagcagcacgcgaaggccatgatctgttgttcgctgataacccgtcggcggtgctgaaggagctgactggcctcatccagaacacgattcgctccaaatggcacgaaaaactggag

SEQ ID NO: 1928 - protein, 346 aa, synthetic construct
  REGION 1..346: note = variant of RNA ligase 2 from Klebsiella phage KP179
MHHHHHHGGSNMFAYYSSLENHYNAKFIEKIRGAGFLMHTVEWVAREKIHGTNFSVIITPTEIVPAKRTGPILEGESFFGHEIIMKKYMDSFVKVQNMLNAMDLVSVQIFGEFAGGGIQKGVDYGDKDFYVFDILSDSGNEKVYWDDYRVESFCTTVGLKLAPLLGRGSFAELSQYPNDFKSLVNRYNELVDTVGLEMANKHVFGPQASSETGLAEGYVLKPVYPIFFNTGTRVAIKCKNSKFSEKAKLDSPISAKVELTENDKRLLEIFSEYVTWNRVSNVLSHIGSVTAKDFGRVSGLTMKDIINEAAREGHDLLFADNPSAVLKELTGLIQNTIRSKWHEKLE

SEQ ID NO: 1929 - DNA, 1038 bp, synthetic construct
  misc_feature 1..1038: note = variant of RNA ligase 2 from Klebsiella phage KP179
  source 1..1038: mol_type = other DNA
atgcatcaccatcaccatcacggtggcagcaacatgtttgcgtattattcaagtctggaaaaccattacaatgctaagttcattgagaagatccgtggtgcaggcttcctgagtcacaccgtggaatgggtagctcgcgagaagattcatggaacgaactttagcgttatcattactccgaccgaaatcgtcccagccaaacgcacagggccgatcttggaaggcgagtcgttctttggtcacgaaattatcatgaaaaaatatatggactccttcgtgaaggtgcagaacatgctgaatgccatggatcttgttagcgtgcaaatctttggcgaatttgcgggtggtggcattcagaaaggcgtcgattacggagacaaagatttctatgtgtttgacatcctgtctgatagcgggaacgagaaagtttactgggatgactatcgcgtcgaatcgttttgcaccactgtgggtctgaaattagcgcctctgctgggacgtggtagtttcgctgaactgtcccagtacccaaacgatttcaaaagcctggtgaaccgttataatgaattggttgacacggtcggcctggagatggccaataaacacgtctttggtccgcaagcgtcttctgaaactggcctggcagaaggctacgttcttaaacccgtctatccgatcttctttaataccggtacgcgcgtggcgattaaatgcaagaactccaaattttcggagaaagccaagctggactcgccaattagtgcgaaggttgaactgacggagaacgataaacgtctgctcgaaatctttagcgagtatgttacctggaatcgcgtcagtaacgtactgtcacatattggctcagtgaccgcaaaagattttgggcgtgtttcgggtctgacgatgaaagacatcattaatgaagcagcacgcgaaggccatgatctgttgttcgctgataacccgtcggcggtgctgaaggagctgactggcctcatccagaacacgattcgctccaaatggcacgaagttctggag

SEQ ID NO: 1930 - protein, 346 aa, synthetic construct
  REGION 1..346: note = variant of RNA ligase 2 from Klebsiella phage KP179
MHHHHHHGGSNMFAYYSSLENHYNAKFIEKIRGAGFLSHTVEWVAREKIHGTNFSVIITPTEIVPAKRTGPILEGESFFGHEIIMKKYMDSFVKVQNMLNAMDLVSVQIFGEFAGGGIQKGVDYGDKDFYVFDILSDSGNEKVYWDDYRVESFCTTVGLKLAPLLGRGSFAELSQYPNDFKSLVNRYNELVDTVGLEMANKHVFGPQASSETGLAEGYVLKPVYPIFFNTGTRVAIKCKNSKFSEKAKLDSPISAKVELTENDKRLLEIFSEYVTWNRVSNVLSHIGSVTAKDFGRVSGLTMKDIINEAAREGHDLLFADNPSAVLKELTGLIQNTIRSKWHEVLE

SEQ ID NO: 1931 - DNA, 1038 bp, synthetic construct
  misc_feature 1..1038: note = variant of RNA ligase 2 from Klebsiella phage KP179
  source 1..1038: mol_type = other DNA
atgcatcaccatcaccatcacggtggcagcaacatgtttgcgtattattcaagtctggaaaaccattacaatgctaagttcattgagaagatccgtggtgcaggcttcctgatgcacaccgtggaatgggtagctcgcgagaagattcatggaacgaactttagcgttatcattactccgaccgaaatcgtcccagccaaacgcacagggccgatcttggaaggcgagtcgttctttggtcacgaaattatcatgaaaaaatatatggactccttcgtgaaggtgcagaacatgctgaatgccatggatcttgttagcgtgcaaatctttggcgaatttgcgggtggtggcattcagaaaggcgtcgattacggagacaaagatttctatgtgtttgacatcctgtctgatagcgggaacgagaaagtttactgggatgactatcgcgtcgaatcgttttgcaccactgtgggtctgaaattagcgcctctgctgggacgtggtagtttcgctgaactgtcccagtacccaaacgatttcaaaagcctggtgaaccgttataatgaattggttgacacggtcggcctggagatggccaataaacacgtctttggtccgcaagcgtcttctgaaactggcctggcagaaggctacgttcttaaacccgtctatccgatcttctttaataccggtacgcgcgtggcgattaaatgcaagaactccaaattttcggagaaagccaagctggactcgccaattagtgcgaaggttgaactgacggagaacgataaacgtctgctcgaaatctttagcagttatgttacctggaatcgcgtcagtaacgtactgtcacatattggctcagtgaccgcaaaagattttgggcgtgtttcgggtctgacgatgaaagacatcattaatgaagcagcacgcgaaggccatgatctgttgttcgctgataacccgtcggcggtgctgaaggagctgactggcctcatccagaacacgattcgctccaaatggcacgaagttctggag

SEQ ID NO: 1932 - protein, 346 aa, synthetic construct
  REGION 1..346: note = variant of RNA ligase 2 from Klebsiella phage KP179
MHHHHHHGGSNMFAYYSSLENHYNAKFIEKIRGAGFLMHTVEWVAREKIHGTNFSVIITPTEIVPAKRTGPILEGESFFGHEIIMKKYMDSFVKVQNMLNAMDLVSVQIFGEFAGGGIQKGVDYGDKDFYVFDILSDSGNEKVYWDDYRVESFCTTVGLKLAPLLGRGSFAELSQYPNDFKSLVNRYNELVDTVGLEMANKHVFGPQASSETGLAEGYVLKPVYPIFFNTGTRVAIKCKNSKFSEKAKLDSPISAKVELTENDKRLLEIFSSYVTWNRVSNVLSHIGSVTAKDFGRVSGLTMKDIINEAAREGHDLLFADNPSAVLKELTGLIQNTIRSKWHEVLE

SEQ ID NO: 1933 - DNA, 1038 bp, synthetic construct
  misc_feature 1..1038: note = variant of RNA ligase 2 from Klebsiella phage KP179
  source 1..1038: mol_type = other DNA
atgcatcaccatcaccatcacggtggcagcaacatgtttgcgtattattcaagtctggaaaaccattacaatgctaagttcattgagaagatccgtggtgcaggcttcctgatgcacaccgtggaatgggtagctcgcgagaagattcatggaacgaactttagcgttatcattactccgaccgaaatcgtcccagccaaacgcacagggccgatcttggaaggcgagtcgttctttggtcacgaaggtatcatgaaaaaatatatggactccttcgtgaaggtgcagaacatgctgaatgccatggatcttgttagcgtgcaaatctttggcgaatttgcgggtggtggcattcagaaaggcgtcgattacggagacaaagatttctatgtgtttgacatcctgtctgatagcgggaacgagaaagtttactgggatgactatcgcgtcgaatcgttttgcaccactgtgggtctgaaattagcgcctctgctgggacgtggtagtttcgctgaactgtcccagtacccaaacgatttcaaaagcctggtgaaccgttataatgaattggttgacacggtcggcctggagatggccaataaacacgtctttggtccgcaagcgtcttctgaaactggcctggcagaaggctacgttcttaaacccgtctatccgatcttctttaataccggtacgcgcgtggcgattaaatgcaagaactccaaattttcggagaaagccaagctggactcgccaattagtgcgaaggttgaactgacggagaacgataaacgtctgctcgaaatctttagcgagtatgttacctggaatcgcgtcagtaacgtactgtcacatattggctcagtgaccgcaaaagattttgggcgtgtttcgggtctgacgatgaaagacatcattaatgaagcagcacgcgaaggccatgatctgttgttcgctgataacccgtcggcggtgctgaaggagctgactggcctcatccagaacacgattcgctccaaatggcacgaagttctggag

SEQ ID NO: 1934 - protein, 346 aa, synthetic construct
  REGION 1..346: note = variant of RNA ligase 2 from Klebsiella phage KP179
MHHHHHHGGSNMFAYYSSLENHYNAKFIEKIRGAGFLMHTVEWVAREKIHGTNFSVIITPTEIVPAKRTGPILEGESFFGHEGIMKKYMDSFVKVQNMLNAMDLVSVQIFGEFAGGGIQKGVDYGDKDFYVFDILSDSGNEKVYWDDYRVESFCTTVGLKLAPLLGRGSFAELSQYPNDFKSLVNRYNELVDTVGLEMANKHVFGPQASSETGLAEGYVLKPVYPIFFNTGTRVAIKCKNSKFSEKAKLDSPISAKVELTENDKRLLEIFSEYVTWNRVSNVLSHIGSVTAKDFGRVSGLTMKDIINEAAREGHDLLFADNPSAVLKELTGLIQNTIRSKWHEVLE

SEQ ID NO: 1935 - DNA, 1038 bp, synthetic construct
  misc_feature 1..1038: note = variant of RNA ligase 2 from Klebsiella phage KP179
  source 1..1038: mol_type = other DNA
atgcatcaccatcaccatcacggtggcagcaacatgtttgcgtattattcaagtctggaaaaccattacaatgctaagttcattgagaagatccgtggtgcaggcttcctgatgcacaccgtggaatgggtagctcgcgagaagattcatggaacgaactttagcgttatcattactccgaccgaaatcgtcccagccaaacgcacagggccgatcttggaaggcgagtcgttctttggtcacgaaattatcatgaaaaaatatatggactccttcgtgaaggtgcagaacatgctgaatgccatggatcttgttagcgtgcaaatctttggcgaatttgcgggtggtggcattcagaaaggcgtcgattacggagacaaagatttctatgtgtttgacatcctgtctgatagcgggaacgagaaagtttactgggatgactatcgcgtcgaatcgttttgcaccactgtgggtctgaaattagcgcctctgctgggacgtggtagtttcgctgaactgtcccagtacccaaacgatttcaaaagcctggtgaaccgttataatgaattggttgacacggtcggcctggagatggccaataaacacgtctttggtccgcaagcgtcttctgaaactggcctggcagaaggctacgttcttaaacccgtctatccgatcttctttaataccggtacgcgcgtggcgattaaatgcaagaactccaaattttcggagaaagccaagctggactcgccaattagtgcgaaggttgaactgacggagaacgataaacgtctgctcgaaatctttagcgagtatgttacctggaatcgcgtcagtaacgtactgtcacatattggctcagtgaccgcaaaagattttgggcgtgtttcgggtctgacgatgaaagacatcctgaatgaagcagcacgcgaaggccatgatctgttgttcgctgataacccgtcggcggtgctgaaggagctgactggcctcatccagaacacgattcgctccaaatggcacgaagttctggag

SEQ ID NO: 1936 - protein, 346 aa, synthetic construct
  REGION 1..346: note = variant of RNA ligase 2 from Klebsiella phage KP179
MHHHHHHGGSNMFAYYSSLENHYNAKFIEKIRGAGFLMHTVEWVAREKIHGTNFSVIITPTEIVPAKRTGPILEGESFFGHEIIMKKYMDSFVKVQNMLNAMDLVSVQIFGEFAGGGIQKGVDYGDKDFYVFDILSDSGNEKVYWDDYRVESFCTTVGLKLAPLLGRGSFAELSQYPNDFKSLVNRYNELVDTVGLEMANKHVFGPQASSETGLAEGYVLKPVYPIFFNTGTRVAIKCKNSKFSEKAKLDSPISAKVELTENDKRLLEIFSEYVTWNRVSNVLSHIGSVTAKDFGRVSGLTMKDILNEAAREGHDLLFADNPSAVLKELTGLIQNTIRSKWHEVLE

SEQ ID NO: 1937 - DNA, 1038 bp, synthetic construct
  misc_feature 1..1038: note = variant of RNA ligase 2 from Klebsiella phage KP179
  source 1..1038: mol_type = other DNA
atgcatcaccatcaccatcacggtggcagcaacatgtttgcgtattattcaagtctggaaaaccattacaatgctaagttcattgagaagatccgtggtgcaggcttcctgatgcacaccgtggaatgggtagctcgcgagaagattcatggaacgaactttagcgttatcattactccgaccgaaatcgtcccagccaaacgcacagggccgatcttggaaggcgagtcgttctttggtcacgaaattatcatgaaaaaatatatggactccttcgtgaaggtgcagaacatgctgaatgccatggatcttgttagcgtgcaaatctttggcgaatttgcgggtggtggcattcagaaaggcgtcgattacggagacaaagatttctatgtgtttgacatcctgtctgatagcgggaacgagaaagtttactgggatgactatcgcgtcgaatcgttttgcaccactgtgggtctgaaattagcgcctctgctgggacgtggtagtttcgctgaactgtcccagtacccaaacgatttcaaaagcctggtgaaccgttataatgaattggttgacacggtcggcctggagatggccaataaacacgtctttggtccgcaagcgtcttctgaaactggcctggcagaaggctacgttcttaaacccgtctatccgatcttctttaataccggtacgcgcgtggcgattaaatgcaagaactccaaattttcggagaaagccaagctggactcgccaattagtgcgaaggttgaactgacggagaacgataaacgtctgctcgaaatctttagcatgtatgttacctggaatcgcgtcagtaacgtactgtcacatattggctcagtgaccgcaaaagattttgggcgtgtttcgggtctgacgatgaaagacatcattaatgaagcagcacgcgaaggccatgatctgttgttcgctgataacccgtcggcggtgctgaaggagctgactggcctcatccagaacacgattcgctccaaatggcacgaagttctggag

SEQ ID NO: 1938 - protein, 346 aa, synthetic construct
  REGION 1..346: note = variant of RNA ligase 2 from Klebsiella phage KP179
MHHHHHHGGSNMFAYYSSLENHYNAKFIEKIRGAGFLMHTVEWVAREKIHGTNFSVIITPTEIVPAKRTGPILEGESFFGHEIIMKKYMDSFVKVQNMLNAMDLVSVQIFGEFAGGGIQKGVDYGDKDFYVFDILSDSGNEKVYWDDYRVESFCTTVGLKLAPLLGRGSFAELSQYPNDFKSLVNRYNELVDTVGLEMANKHVFGPQASSETGLAEGYVLKPVYPIFFNTGTRVAIKCKNSKFSEKAKLDSPISAKVELTENDKRLLEIFSMYVTWNRVSNVLSHIGSVTAKDFGRVSGLTMKDIINEAAREGHDLLFADNPSAVLKELTGLIQNTIRSKWHEVLE

SEQ ID NO: 1939 - DNA, 1038 bp, synthetic construct
  misc_feature 1..1038: note = variant of RNA ligase 2 from Klebsiella phage KP179
  source 1..1038: mol_type = other DNA
atgcatcaccatcaccatcacggtggcagcaacatgtttgcgtattattcaagtctggaaaaccattacaatgctaagttcattgagaagatccgtggtgcaggcttcctgatgcacaccgtggaatgggtagctcgcgagaagattcatggaacgaactttagcgttatcattactccgaccgaaatcgtcccagccaaacgcacagggccgatcttggaaggcgagtcgttctttggtcacgaaattatcatgaaaaaatatatggactccttcgtgaaggtgcagaacatgctgaatgccatggatcttgttagcgtgcaaatctttggcgaatttgcgggtggtggcattcagaaaggcgtcgattacggagacaaagatttctatgtgtttgacatcctgtctgatagcgggaacgagaaagtttactgggatgactatcgcgtcgaatcgttttgcaccactgtgggtctgaaattagcgcctctgctgggacgtggtagtttcgctgaactgtcccagtacccaaacgatttcaaaagcctggtgaaccgttataatgaattggttgacacggtcggcctggagatggccaataaacacgtctttggtccgcaagcgtcttctgaaactggcctggcagaaggctacgttcttaaacccgtctatccgatcttctttaataccggtacgcgcgtggcgattaaatgcaagaactccaaattttcggagaaagccggtctggactcgccaattagtgcgaaggttgaactgacggagaacgataaacgtctgctcgaaatctttagcgagtatgttacctggaatcgcgtcagtaacgtactgtcacatattggctcagtgaccgcaaaagattttgggcgtgtttcgggtctgacgatgaaagacatcattaatgaagcagcacgcgaaggccatgatctgttgttcgctgataacccgtcggcggtgctgaaggagctgactggcctcatccagaacacgattcgctccaaatggcacgaagttctggag

SEQ ID NO: 1940 - protein, 346 aa, synthetic construct
  REGION 1..346: note = variant of RNA ligase 2 from Klebsiella phage KP179
MHHHHHHGGSNMFAYYSSLENHYNAKFIEKIRGAGFLMHTVEWVAREKIHGTNFSVIITPTEIVPAKRTGPILEGESFFGHEIIMKKYMDSFVKVQNMLNAMDLVSVQIFGEFAGGGIQKGVDYGDKDFYVFDILSDSGNEKVYWDDYRVESFCTTVGLKLAPLLGRGSFAELSQYPNDFKSLVNRYNELVDTVGLEMANKHVFGPQASSETGLAEGYVLKPVYPIFFNTGTRVAIKCKNSKFSEKAGLDSPISAKVELTENDKRLLEIFSEYVTWNRVSNVLSHIGSVTAKDFGRVSGLTMKDIINEAAREGHDLLFADNPSAVLKELTGLIQNTIRSKWHEVLE

SEQ ID NO: 1941 - DNA, 1038 bp, synthetic construct
  misc_feature 1..1038: note = variant of RNA ligase 2 from Klebsiella phage KP179
  source 1..1038: mol_type = other DNA
atgcatcaccatcaccatcacggtggcagcaacatgtttgcgtattattcaagtctggaaaaccattacaatgctaagttcattgagaagatccgtggtgcaggcttcctgatgcacaccgtggaatgggtagctcgcgagaagattcatggaacgaactttagcgttatcattactccgaccgaaatcgtcccagccaaacgcacagggccgatcttggaaggcgagtcgttctttggtcacgaaattatcatgaaaaaatatatggactccttcgtgaaggtgcagaacatgctgaatgccatggatcttgttagcgtgcaaatctttggcgaatttgcgggtggtggcattcagaaaggcgtcgattacggagacaaagatttctatgtgtttgacatcctgtctgatagcgggaacgagaaagtttactgggatgactatcgcgtcgaatcgttttgcaccactgtgggtctgaaattagcgcctctgctgggacgtggtagtttcgctgaactgtcccagtacccaaacgatttcaaaagcctggtgaaccgttataatgaattggttgacacggtcggcctggagatggccaataaacacgtctttggtccgcaagcgtcttctgaaactggcctggcagaaggctacgttcttaaacccgtctatccgatcttctttaataccggtacgcgcgtggcgattaaatgcaagaactccaaattttcggagaaagccaagctggactcgccaattagtgcgaaggaggaactgacggagaacgataaacgtctgctcgaaatctttagcgagtatgttacctggaatcgcgtcagtaacgtactgtcacatattggctcagtgaccgcaaaagattttgggcgtgtttcgggtctgacgatgaaagacatcattaatgaagcagcacgcgaaggccatgatctgttgttcgctgataacccgtcggcggtgctgaaggagctgactggcctcatccagaacacgattcgctccaaatggcacgaagttctggag

SEQ ID NO: 1942 - protein, 346 aa, synthetic construct
  REGION 1..346: note = variant of RNA ligase 2 from Klebsiella phage KP179
MHHHHHHGGSNMFAYYSSLENHYNAKFIEKIRGAGFLMHTVEWVAREKIHGTNFSVIITPTEIVPAKRTGPILEGESFFGHEIIMKKYMDSFVKVQNMLNAMDLVSVQIFGEFAGGGIQKGVDYGDKDFYVFDILSDSGNEKVYWDDYRVESFCTTVGLKLAPLLGRGSFAELSQYPNDFKSLVNRYNELVDTVGLEMANKHVFGPQASSETGLAEGYVLKPVYPIFFNTGTRVAIKCKNSKFSEKAKLDSPISAKEELTENDKRLLEIFSEYVTWNRVSNVLSHIGSVTAKDFGRVSGLTMKDIINEAAREGHDLLFADNPSAVLKELTGLIQNTIRSKWHEVLE

SEQ ID NO: 1943 - DNA, 1038 bp, synthetic construct
  misc_feature 1..1038: note = variant of RNA ligase 2 from Klebsiella phage KP179
  source 1..1038: mol_type = other DNA
atgcatcaccatcaccatcacggtggcagcaacatgtttgcgtattattcaagtctggaaaaccattacaatgctaagttcattgagaagatccgtggtgcaggcttcctgatgcacaccgtggaatgggtagctcgcgagaagattcatggaacgaactttagcgttatcattactccgaccgaaatcgtcccagccaaacgcacagggccgatcttggaaggcgagtcgttctttggtcacgaaattatcatgaaaaaatatatggactccttcgtgaaggtgcagaacatgctgaatgccatggatcttgttagcgtgcaaatctttggcgaatttgcgggtggtggcattcagaaaggcgtcgattacggagacaaagatttctatgtgtttgacatcctgtctgatagcgggaacgagaaagtttactgggatgactatcgcgtcgaatcgttttgcaccactgtgggtctgaaattagcgcctctgctgggacgtggtagtttcgctgaactgtcccagtacccaaacgatttcaaaagcctggtgaaccgttataatgaattggttgacacggtcggcctggagatggccaataaacacgtctttggtccgcaagcgtcttctgaaactggcctggcagaaggctacgttcttaaacccgtctatccgatcttctttaataccggtacgcgcgtggcgattaaatgcaagaactccaaattttcggagaaagccaagctggactcgccaattagtgcgaaggttatgctgacggagaacgataaacgtctgctcgaaatctttagcgagtatgttacctggaatcgcgtcagtaacgtactgtcacatattggctcagtgaccgcaaaagattttgggcgtgtttcgggtctgacgatgaaagacatcattaatgaagcagcacgcgaaggccatgatctgttgttcgctgataacccgtcggcggtgctgaaggagctgactggcctcatccagaacacgattcgctccaaatggcacgaagttctggag

SEQ ID NO: 1944 - protein, 346 aa, synthetic construct
  REGION 1..346: note = variant of RNA ligase 2 from Klebsiella phage KP179
MHHHHHHGGSNMFAYYSSLENHYNAKFIEKIRGAGFLMHTVEWVAREKIHGTNFSVIITPTEIVPAKRTGPILEGESFFGHEIIMKKYMDSFVKVQNMLNAMDLVSVQIFGEFAGGGIQKGVDYGDKDFYVFDILSDSGNEKVYWDDYRVESFCTTVGLKLAPLLGRGSFAELSQYPNDFKSLVNRYNELVDTVGLEMANKHVFGPQASSETGLAEGYVLKPVYPIFFNTGTRVAIKCKNSKFSEKAKLDSPISAKVMLTENDKRLLEIFSEYVTWNRVSNVLSHIGSVTAKDFGRVSGLTMKDIINEAAREGHDLLFADNPSAVLKELTGLIQNTIRSKWHEVLE

SEQ ID NO: 1945 - DNA, 1038 bp, synthetic construct
  misc_feature 1..1038: note = variant of RNA ligase 2 from Klebsiella phage KP179
  source 1..1038: mol_type = other DNA
atgcatcaccatcaccatcacggtggcagcaacatgtttgcgtattattcaagtctggaaaaccattacaatgctaagttcattgagaagatccgtggtgcaggcttcctgatgcacaccgtggaatgggtagctcgcgagaagattcatggaacgaactttagcgttatcattactccgaccgaaatcgtcccagccaaacgcacagggccgatcttggaaggcgagtcgttctttggtcacgaaattatcatgaaaaaatatatggactccttcgtgaaggtgcagaacatgctgaatgccatggatcttgttagcgtgcaaatctttggcgaatttgcgggtggtggcattcagaaaggcgtcgattacggagacaaagatttctatgtgtttgacatcctgtctgatagcgggaacgagaaagtttactgggatgactatcgcgtcgaatcgttttgcaccactgtgggtctgaaattagcgcctctgctgggacgtggtagtttcgctgaactgtcccagtacccaaacgatttcaaaagcctggtgaaccgttataatgaattggttgacacggtcggcctggagatggccaataaacacgtctttggtccgcaagcgtcttctgaaactggcctggcagaaggctacgttcttaaacccgtctatccgatcttctttaataccggtacgcgcgtggcgattaaatgcaagaactccaaattttcggagaaagccaagctggactcgccaattagtgcgaaggttgaactgacggagaacgataaacgtctgctcgaaatctttagcgagtatgttacctggaatcgcgtcagtaacgtactgtcacatattggctcagtgaccgcaaaagattttgggcgtgtttcgggtctgacgatgaaagacatcattaatgaagcagcacgcgaaggccatgatctgttgttcgctgataacccgggggcggtgctgaaggagctgactggcctcatccagaacacgattcgctccaaatggcacgaagttctggag

SEQ ID NO: 1946 - protein, 346 aa, synthetic construct
  REGION 1..346: note = variant of RNA ligase 2 from Klebsiella phage KP179
MHHHHHHGGSNMFAYYSSLENHYNAKFIEKIRGAGFLMHTVEWVAREKIHGTNFSVIITPTEIVPAKRTGPILEGESFFGHEIIMKKYMDSFVKVQNMLNAMDLVSVQIFGEFAGGGIQKGVDYGDKDFYVFDILSDSGNEKVYWDDYRVESFCTTVGLKLAPLLGRGSFAELSQYPNDFKSLVNRYNELVDTVGLEMANKHVFGPQASSETGLAEGYVLKPVYPIFFNTGTRVAIKCKNSKFSEKAKLDSPISAKVELTENDKRLLEIFSEYVTWNRVSNVLSHIGSVTAKDFGRVSGLTMKDIINEAAREGHDLLFADNPGAVLKELTGLIQNTIRSKWHEVLE

SEQ ID NO: 1947 - DNA, 1038 bp, synthetic construct
  misc_feature 1..1038: note = variant of RNA ligase 2 from Klebsiella phage KP179
  source 1..1038: mol_type = other DNA
atgcatcaccatcaccatcacggtggcagcaacatgtttgcgtattattcaagtctggaaaaccataccaatgccaagttcattagcaagatccgtggtgcaggcttcctgagccacaccgtggaatgggtagctcgcgagaagattcatggaacgaactttagcgttatcattactccgaccgaaatcgtgccagccaaacgcacagggccgatcttggaagatgagagcttctttggtcatgaaattatcatgaaaaaatatatggactccttcgtgaaggtgcagaacatgctgaatgcgatggatcttgttagcgtgcaaatctttggcgaatttgcgggtggtggcattcagaaaggcgtcgattacggagacaaagatttctatgtgtttgacatcctgtctgatagcgggaacgagaaagtttactgggatgactatcgcgtcgaatcgttttgcaccactgtgggtctgaaattagcgcctctgctgggacgtggtagtttcgctgaactgtcccagtacccaaacgatttcaaaagcctggtgaaccgttataatgaattggttgacacggtcggcctggagatggccaataaacacgtctttggtccgcaagcgtcttctgaaactggcctggcagaaggctacgttcttaaacccgtctatccgcgcttctttaatgtgggtacgcgcgtggcgattaaatgcaagaactccaaattttcggagaaagcctttctgattgaaccaattaaagcgaaggttgaactgacggagaacgataaacgtctgctcggaatctttagcgaatatgttacctggaatcgcgtcagtaacgtactgtcacatattggctcagtgaccgccaaagattttgggcgtgtttcgggtctgacgatgaaagacatcattcgcgaagcagcacgcgaaggccatgatctgttgttcgctgataacccgtcggcggtgctgaaggagctgacaggcctcatccagaacacgattcgctccaaatggcacgaagttctggag

SEQ ID NO: 1948 - protein, 346 aa, synthetic construct
  REGION 1..346: note = variant of RNA ligase 2 from Klebsiella phage KP179
MHHHHHHGGSNMFAYYSSLENHTNAKFISKIRGAGFLSHTVEWVAREKIHGTNFSVIITPTEIVPAKRTGPILEDESFFGHEIIMKKYMDSFVKVQNMLNAMDLVSVQIFGEFAGGGIQKGVDYGDKDFYVFDILSDSGNEKVYWDDYRVESFCTTVGLKLAPLLGRGSFAELSQYPNDFKSLVNRYNELVDTVGLEMANKHVFGPQASSETGLAEGYVLKPVYPRFFNVGTRVAIKCKNSKFSEKAFLIEPIKAKVELTENDKRLLGIFSEYVTWNRVSNVLSHIGSVTAKDFGRVSGLTMKDIIREAAREGHDLLFADNPSAVLKELTGLIQNTIRSKWHEVLE

SEQ ID NO: 1949 - DNA, 1038 bp, synthetic construct
  misc_feature 1..1038: note = variant of RNA ligase 2 from Klebsiella phage KP179
  source 1..1038: mol_type = other DNA
atgcatcaccatcaccatcacggtggcagcaacatgtttgcgtattattcaagtctggaaaaccataccaatgccaagttcattagcaagatccgtggtgcaggcttcctgagccacaccgtggaatgggtagctcgcgagaagattcatggaacgaactttagcgttatcattactccgaccgaaatcgtgccagccaaacgcacagggccgatcttggaagacgagagcttctttggtcatgaaattatcatgaaaaaatatatggactccttcgtgaaggtgcagaacatgctgaatgcgatggatcttgttagcgtgcaaatctttggcgaatttgcgggtggtggcattcagaaaggcgtcgattacggagacaaagatttctatgtgtttgacatcctgtctgatagcgggaacgagaaagtttactgggatgactatcgcgtcgaatcgttttgcaccactgtgggtctgaaattagcgcctctgctgggacgtggtagtttcgctgaactgtcccagtacccaaacgatttcaaaagcctggtgaaccgttataatgaattggttgatacggtcggcctggagatggccaataaacacgtctttggtccgcaagcgtcttctgaaactggcctggcagaaggctacgttcttaaacccgtctatccgcgcttctttaatgtgggtacgcgcgtggcgattaaatgcaagaactccaaattttcggagaaagcctttctggaagaaccaattaaagcgaaggttgaactgacggagaacgataaacgtctgctcggaatctttagcgaatatgttacctgggcgcgcgtcagtaacgtactgtcacatattggctcagtgaccgccaaagattttgggcgtgtttcgggtctgacgatgaaagacatcattcgcgaagcagcacgcgaaggccatgatctgttgttcgctgataacccgtcggcggtgctgaaggagctgacaggcctcatccagaacacgattcgctccaaatggcacgaagttctggag

SEQ ID NO: 1950 - protein, 346 aa, synthetic construct
  REGION 1..346: note = variant of RNA ligase 2 from Klebsiella phage KP179
MHHHHHHGGSNMFAYYSSLENHTNAKFISKIRGAGFLSHTVEWVAREKIHGTNFSVIITPTEIVPAKRTGPILEDESFFGHEIIMKKYMDSFVKVQNMLNAMDLVSVQIFGEFAGGGIQKGVDYGDKDFYVFDILSDSGNEKVYWDDYRVESFCTTVGLKLAPLLGRGSFAELSQYPNDFKSLVNRYNELVDTVGLEMANKHVFGPQASSETGLAEGYVLKPVYPRFFNVGTRVAIKCKNSKFSEKAFLEEPIKAKVELTENDKRLLGIFSEYVTWARVSNVLSHIGSVTAKDFGRVSGLTMKDIIREAAREGHDLLFADNPSAVLKELTGLIQNTIRSKWHEVLE

SEQ ID NO: 1951 - DNA, 1038 bp, synthetic construct
  misc_feature 1..1038: note = variant of RNA ligase 2 from Klebsiella phage KP179
  source 1..1038: mol_type = other DNA
atgcatcaccatcaccatcacggtggcagcaacatgtttgcgtattattcaagtctggaaaaccataccaatgccaagttcattagcaagatccgtggtgcaggcttcctgatgcacaccgtggaatgggtagctcgcgagaagattcatggaacgaactttagcgttatcattactccgaccgaaatcgtgccagccaaacgcacagggccgatcttggaagatgagagcttctttggtcatgaaattatcatgaaaaaatatatggactccttcgtgaaggtgcagaacatgctgaatgcgatggatcttgttagcgtgcaaatctttggcgaatttgcgggtggtggcattcagaaaggcgtcgattacggagacaaagatttctatgtgtttgacatcctgtctgatagcgggaacgagaaagtttactgggatgactatcgcgtcgaatcgttttgcaccactgtgggtctgaaattagcgcctctgctgggacgtggtagtttcgctgaactgtcccagtacccaaacgatttcaaaagcctggtgaaccgttataatgaattggttgacacggtcggcctggagatggccaataaacacgtctttggtccgcaagcgtcttctgaaactggcctggcagaaggctacgttcttaaacccgtctatccgcgcttctttaatgtgggtacgcgcgtggcgattaaatgcaagaactccaaattttcggagaaagcctttctggaagaaccaattaaagcgaaggttgaactgacggagaacgataaacgtctgctcggaatctttagcgaatatgttacctggaatcgcgtcagtaacgtactgtcacatattggctcagtgaccgccaaagattttgggcgtgtttcgggtctgacgatgaaagacatcattcgcgaagcagcacgcgaaggccatgatctgttgttcgctgataacccgtcggcggtgctgaaggagctgacaggcctcatccagaacacgattcgctccaaatggcacgaagttctggag

SEQ ID NO: 1952 - protein, 346 aa, synthetic construct
  REGION 1..346: note = variant of RNA ligase 2 from Klebsiella phage KP179
MHHHHHHGGSNMFAYYSSLENHTNAKFISKIRGAGFLMHTVEWVAREKIHGTNFSVIITPTEIVPAKRTGPILEDESFFGHEIIMKKYMDSFVKVQNMLNAMDLVSVQIFGEFAGGGIQKGVDYGDKDFYVFDILSDSGNEKVYWDDYRVESFCTTVGLKLAPLLGRGSFAELSQYPNDFKSLVNRYNELVDTVGLEMANKHVFGPQASSETGLAEGYVLKPVYPRFFNVGTRVAIKCKNSKFSEKAFLEEPIKAKVELTENDKRLLGIFSEYVTWNRVSNVLSHIGSVTAKDFGRVSGLTMKDIIREAAREGHDLLFADNPSAVLKELTGLIQNTIRSKWHEVLE

SEQ ID NO: 1953 - DNA, 1038 bp, synthetic construct
  misc_feature 1..1038: note = variant of RNA ligase 2 from Klebsiella phage KP179
  source 1..1038: mol_type = other DNA
atgcatcaccatcaccatcacggtggcagcaacatgtttgcgtattattcaagtctggaaaaccataccaatgccaagttcattagcaagatccgtggtgcaggcttcctgagccacaccgtggaatgggtagctcgcgagaagattcatggaacgaactttagcgttatcattactccgaccgaaatcgtgccagccaaacgcacagggccgatcttggaagacgagagcttctttggtcatgaaattatcatgaaaaaatatatggactccttcaaaaaggtgcagaacatgctgaatgcgatggatcttgttagcgtgcaaatctttggcgaatttgcgggtggtggcattcagaaaggcgtcgattacggagacaaagatttctatgtgtttgacatcctgtctgatagcgggaacgagaaagtttactgggatgactatcgcgtcgaatcgttttgcaccactgtgggtctgaaattagcgcctctgctgggacgtggtagtttcgctgaactgtcccagtacccaaacgatttcaaaagcctggtgaaccgttataatgaattggttgaaacggtcggcctggagatggccaataaacacgtctttggtccgcaagcgtcttctgaaactggcctggcagaaggctacgttcttaaacccgtctatccgcgcttctttaatgtgggtacgcgcgtggcgattaaatgcaagaactccaaattttcggagaaagcctttctgattgaaccaattaaagcgaaggttgaactgacggagaacgataaacgtctgctcggaatctttagcgaatatgttacctggaaccgcgtcagtaacgtactgtcacatattggctcagtgaccgccaaagattttgggcgtgtttcgggtctgacgatgaaagacatcattcgcgaagcagcacgcgaaggccatgatctgttgttcgctgataacccgtcggcggtgctgaaggagctgacaggcctcatccagaacacgattcgctccaaatggcacgaagttctggag

SEQ ID NO: 1954 - protein, 346 aa, synthetic construct
  REGION 1..346: note = variant of RNA ligase 2 from Klebsiella phage KP179
MHHHHHHGGSNMFAYYSSLENHTNAKFISKIRGAGFLSHTVEWVAREKIHGTNFSVIITPTEIVPAKRTGPILEDESFFGHEIIMKKYMDSFKKVQNMLNAMDLVSVQIFGEFAGGGIQKGVDYGDKDFYVFDILSDSGNEKVYWDDYRVESFCTTVGLKLAPLLGRGSFAELSQYPNDFKSLVNRYNELVETVGLEMANKHVFGPQASSETGLAEGYVLKPVYPRFFNVGTRVAIKCKNSKFSEKAFLIEPIKAKVELTENDKRLLGIFSEYVTWNRVSNVLSHIGSVTAKDFGRVSGLTMKDIIREAAREGHDLLFADNPSAVLKELTGLIQNTIRSKWHEVLE

SEQ ID NO: 1955 - DNA, 1038 bp, synthetic construct
  misc_feature 1..1038: note = variant of RNA ligase 2 from Klebsiella phage KP179
  source 1..1038: mol_type = other DNA
atgcatcaccatcaccatcacggtggcagcaacatgtttgcgtattattcaagtctggaaaaccataccaatgccaagttcattagcaagatccgtggtgcaggcttcctgagccacaccgtggaatgggtagctcgcgagaagattcatggaacgaactttagcgttatcattactccgaccgaaatcgtgccagccaaacgcacagggccgatcttggaagacgagagcttctttggtcatgaaattatcatgaaaaaatatatggactccttcgtgaaggtgcagaacatgctgaatgcgatggatcttgttagcgtgcaaatctttggcgaatttgcgggtggtggcattcagaaaggcgtcgattacggagacaaagatttctatgtgtttgacatcctgtctgatagcgggaacgagaaagtttactgggatgactatcgcgtcgaatcgttttgcaccactgtgggtctgaaattagcgcctctgctgggacgtggtagtttcgctgaactgtcccagtacccaaacgatttcaaaagcctggtgaaccgttataatgaattggttgaaacggtcggcctggagatggccaataaacacgtctttggtccgcaagcgtcttctgaaactggcctggcagaaggctacgttcttaaacccgtctatccgcgcttctttaatgtgggtacgcgcgtggcgattaaatgcaagaactccaaattttcggagaaagcctttctgattgaaccaattaaagcgaaggttgaactgacggagaacgataaacgtctgctcggaatctttagcgaatatgttacctggaaccgcgtcagtaacgtactgtcacatattggctcagtgaccgccaaagattttgggcgtgtttcgggtctgacgatgaaagacatcattcgcgaagcagcacgcgaaggccatgatctgttgttcgctgataacccgtcggcggtgctgaaggagctgacaggcctcatccagaacacgattcgctccaaatggcacgaagttctggag

SEQ ID NO: 1956 - protein, 346 aa, synthetic construct
  REGION 1..346: note = variant of RNA ligase 2 from Klebsiella phage KP179
MHHHHHHGGSNMFAYYSSLENHTNAKFISKIRGAGFLSHTVEWVAREKIHGTNFSVIITPTEIVPAKRTGPILEDESFFGHEIIMKKYMDSFVKVQNMLNAMDLVSVQIFGEFAGGGIQKGVDYGDKDFYVFDILSDSGNEKVYWDDYRVESFCTTVGLKLAPLLGRGSFAELSQYPNDFKSLVNRYNELVETVGLEMANKHVFGPQASSETGLAEGYVLKPVYPRFFNVGTRVAIKCKNSKFSEKAFLIEPIKAKVELTENDKRLLGIFSEYVTWNRVSNVLSHIGSVTAKDFGRVSGLTMKDIIREAAREGHDLLFADNPSAVLKELTGLIQNTIRSKWHEVLE

SEQ ID NO: 1957 - DNA, 1038 bp, synthetic construct
  misc_feature 1..1038: note = variant of RNA ligase 2 from Klebsiella phage KP179
  source 1..1038: mol_type = other DNA
atgcatcaccatcaccatcacggtggcagcaacatgtttgcgtattattcaagtctggaaaaccataccaatgccaagttcattagcaagatccgtggtgcaggcttcctgatgcacaccgtggaatgggtagctcgcgagaagattcatggaacgaactttagcgttatcattactccgaccgaaatcgtgccagccaaacgcacagggccgatcttggaagacgagagcttctttggtcatgaaattatcatgaaaaaatatatggactccttcgtgaaggtgcagaacatgctgaatgcgatggatcttgttagcgtgcaaatctttggcgaatttgcgggtggtggcattcagaaaggcgtcgattacggagacaaagatttctatgtgtttgacatcctgtctgatagcgggaacgagaaagtttactgggatgactatcgcgtcgaatcgttttgcaccactgtgggtctgaaattagcgcctctgctgggacgtggtagtttcgctgaactgtcccagtacccaaacgatttcaaaagcctggtgaaccgttataatgaattggttgatacggtcggcctggagatggccaataaacacgtctttggtccgcaagcgtcttctgaaactggcctggcagaaggctacgttcttaaacccgtctatccgcgcttctttaatgtgggtacgcgcgtggcgattaaatgcaagaactccaaattttcggagaaagccaaactggaagaaccaattaaagcgaaggttgaactgacggagaacgataaacgtctgctcggaatctttagcgaatatgttacctggaaccgcgtcagtaacgtactgtcacatattggctcagtgaccgccaaagattttgggcgtgtttcgggtctgacgatgaaagacatcatccgcgaagcagcacgcgaaggccatgatctgttgttcgctgataacccgtcggcggtgctgaaggagctgacaggcctcatccagaacacgattcgctccaaatggcacgaagttctggag

SEQ ID NO: 1958 - protein, 346 aa, synthetic construct
  REGION 1..346: note = variant of RNA ligase 2 from Klebsiella phage KP179
MHHHHHHGGSNMFAYYSSLENHTNAKFISKIRGAGFLMHTVEWVAREKIHGTNFSVIITPTEIVPAKRTGPILEDESFFGHEIIMKKYMDSFVKVQNMLNAMDLVSVQIFGEFAGGGIQKGVDYGDKDFYVFDILSDSGNEKVYWDDYRVESFCTTVGLKLAPLLGRGSFAELSQYPNDFKSLVNRYNELVDTVGLEMANKHVFGPQASSETGLAEGYVLKPVYPRFFNVGTRVAIKCKNSKFSEKAKLEEPIKAKVELTENDKRLLGIFSEYVTWNRVSNVLSHIGSVTAKDFGRVSGLTMKDIIREAAREGHDLLFADNPSAVLKELTGLIQNTIRSKWHEVLE

SEQ ID NO: 1959 - DNA, 1038 bp, synthetic construct
  misc_feature 1..1038: note = variant of RNA ligase 2 from Klebsiella phage KP179
  source 1..1038: mol_type = other DNA
atgcatcaccatcaccatcacggtggcagcaacatgtttgcgtattattcaagtctggaaaaccataccaatgccaagttcattagcaagatccgtggtgcaggcttcctgagccacaccgtggaatgggtagctcgcgagaagattcatggaacgaactttagcgttatcattactccgaccgaaatcgtgccagccaaacgcacagggccgatcttggaagacgagagcttctttggtcatgaaattatcatgaaaaaatatatggactccttcgtgaaggtgcagaacatgctgaatgcgatggatcttgttagcgtgcaaatctttggcgaatttgcgggtggtggcattcagaaaggcgtcgattacggagacaaagatttctatgtgtttgacatcctgtctgatagcgggaacgagaaagtttactgggatgactatcgcgtcgaatcgttttgcaccactgtgggtctgaaattagcgcctctgctgggacgtggtagtttcgctgaactgtcccagtacccaaacgatttcaaaagcctggtgaaccgttataatgaattggttgacacggtcggcctggagatggccaataaacacgtctttggtccgcaagcgtcttctgaaactggcctggcagaaggctacgttcttaaacccgtctatccgcgcttctttaatgtgggtacgcgcgtggcgattaaatgcaagaactccaaattttcggagaaagcctttctggaagaaccaattaaagcgaaggttgaactgacggagaacgataaacgtctgctcggaatctttagcgaatatgttacctggaatcgcgtcagtaacgtactgtcacatattggctcagtgaccgccaaagattttgggcgtgtttcgggtctgacgatgaaagacatcatccgcgaagcagcacgcgaaggccatgatctgttgttcgctgataacccgtcggcggtgctgaaggagctgacaggcctcatccagaacacgattcgctccaaatggcacgaagttctggag

SEQ ID NO: 1960 - protein, 346 aa, synthetic construct
  REGION 1..346: note = variant of RNA ligase 2 from Klebsiella phage KP179
MHHHHHHGGSNMFAYYSSLENHTNAKFISKIRGAGFLSHTVEWVAREKIHGTNFSVIITPTEIVPAKRTGPILEDESFFGHEIIMKKYMDSFVKVQNMLNAMDLVSVQIFGEFAGGGIQKGVDYGDKDFYVFDILSDSGNEKVYWDDYRVESFCTTVGLKLAPLLGRGSFAELSQYPNDFKSLVNRYNELVDTVGLEMANKHVFGPQASSETGLAEGYVLKPVYPRFFNVGTRVAIKCKNSKFSEKAFLEEPIKAKVELTENDKRLLGIFSEYVTWNRVSNVLSHIGSVTAKDFGRVSGLTMKDIIREAAREGHDLLFADNPSAVLKELTGLIQNTIRSKWHEVLE

SEQ ID NO: 1961 - DNA, 1038 bp, synthetic construct
  misc_feature 1..1038: note = variant of RNA ligase 2 from Klebsiella phage KP179
  source 1..1038: mol_type = other DNA
atgcatcaccatcaccatcacggtggcagcaacatgtttgcgtattattcaagtctggaaaaccataccaatgccaagttcattagcaagatccgtggtgcaggcttcctgatgcacaccgtggaatgggtagctcgcgagaagattcatggaacgaactttagcgttatcattactccgaccgaaatcgtgccagccaaacgcacagggccgatcttggaagacgagagcttctttggtcatgaaattatcatgaaaaaatatatggactccttcgtgaaggtgcagaacatgctgaatgcgatggatcttgttagcgtgcaaatctttggcgaatttgcgggtggtggcattcagaaaggcgtcgattacggagacaaagatttctatgtgtttgacatcctgtctgatagcgggaacgagaaagtttactgggatgactatcgcgtcgaatcgttttgcaccactgtgggtctgaaattagcgcctctgctgggacgtggtagtttcgctgaactgtcccagtacccaaacgatttcaaaagcctggtgaaccgttataatgaattggttgatacggtcggcctggagatggccaataaacacgtctttggtccgcaagcgtcttctgaaactggcctggcagaaggctacgttcttaaacccgtctatccgcgcttctttaatgtgggtacgcgcgtggcgattaaatgcaagaactccaaattttcggagaaagcctttctgattgaaccaattaaagcgaaggttgaactgacggagaacgataaacgtctgctcggaatctttagcgaatatgttacctggaaccgcgtcagtaacgtactgtcacatattggctcagtgaccgccaaagattttgggcgtgtttcgggtctgacgatgaaagacatcatccgcgaagcagcacgcgaaggccatgatctgttgttcgctgataacccgtcggcggtgctgaaggagctgacaggcctcatccagaacacgattcgctccaaatggcacgaaaaactggag

SEQ ID NO: 1962 - protein, 346 aa, synthetic construct
  REGION 1..346: note = variant of RNA ligase 2 from Klebsiella phage KP179
MHHHHHHGGSNMFAYYSSLENHTNAKFISKIRGAGFLMHTVEWVAREKIHGTNFSVIITPTEIVPAKRTGPILEDESFFGHEIIMKKYMDSFVKVQNMLNAMDLVSVQIFGEFAGGGIQKGVDYGDKDFYVFDILSDSGNEKVYWDDYRVESFCTTVGLKLAPLLGRGSFAELSQYPNDFKSLVNRYNELVDTVGLEMANKHVFGPQASSETGLAEGYVLKPVYPRFFNVGTRVAIKCKNSKFSEKAFLIEPIKAKVELTENDKRLLGIFSEYVTWNRVSNVLSHIGSVTAKDFGRVSGLTMKDIIREAAREGHDLLFADNPSAVLKELTGLIQNTIRSKWHEKLE

SEQ ID NO: 1963 - DNA, 1038 bp, synthetic construct
  misc_feature 1..1038: note = variant of RNA ligase 2 from Klebsiella phage KP179
  source 1..1038: mol_type = other DNA
atgcatcaccatcaccatcacggtggcagcaacatgtttgcgtattattcaagtctggaaaaccataccaatgccaagttcattagcaagatccgtggtgcaggcttcctgatgcacaccgtggaatgggtagctcgcgagaagattcatggaacgaactttagcgttatcattactccgaccgaaatcgtgccagccaaacgcacagggccgatcttggaagatgagagcttctttggtcatgaaattatcatgaaaaaatatatggactccttcgtgaaggtgcagaacatgctgaatgcgatggatcttgttagcgtgcaaatctttggcgaatttgcgggtggtggcattcagaaaggcgtcgattacggagacaaagatttctatgtgtttgacatcctgtctgatagcgggaacgagaaagtttactgggatgactatcgcgtcgaatcgttttgcaccactgtgggtctgaaattagcgcctctgctgggacgtggtagtttcgctgaactgtcccagtacccaaacgatttcaaaagcctggtgaaccgttataatgaattggttgaaacggtcggcctggagatggccaataaacacgtctttggtccgcaagcgtcttctgaaactggcctggcagaaggctacgttcttaaacccgtctatccgcgcttctttaatgtgggtacgcgcgtggcgattaaatgcaagaactccaaattttcggagaaagcctttctggaaaggccaattaaagcgaaggttgaactgacggagaacgataaacgtctgctcggaatctttagcgaatatgttacctggaaccgcgtcagtaacgtactgtcacatattggctcagtgaccgccaaagattttgggcgtgtttcgggtctgacgatgaaagacatcattcgcgaagcagcacgcgaaggccatgatctgttgttcgctgataacccgtcggcggtgctgaaggagctgacaggcctcatccagaacacgattcgctccaaatggcacgaagttctggag

SEQ ID NO: 1964 - protein, 346 aa, synthetic construct
  REGION 1..346: note = variant of RNA ligase 2 from Klebsiella phage KP179
MHHHHHHGGSNMFAYYSSLENHTNAKFISKIRGAGFLMHTVEWVAREKIHGTNFSVIITPTEIVPAKRTGPILEDESFFGHEIIMKKYMDSFVKVQNMLNAMDLVSVQIFGEFAGGGIQKGVDYGDKDFYVFDILSDSGNEKVYWDDYRVESFCTTVGLKLAPLLGRGSFAELSQYPNDFKSLVNRYNELVETVGLEMANKHVFGPQASSETGLAEGYVLKPVYPRFFNVGTRVAIKCKNSKFSEKAFLERPIKAKVELTENDKRLLGIFSEYVTWNRVSNVLSHIGSVTAKDFGRVSGLTMKDIIREAAREGHDLLFADNPSAVLKELTGLIQNTIRSKWHEVLE

SEQ ID NO: 1965 - DNA, 1038 bp, synthetic construct
  misc_feature 1..1038: note = variant of RNA ligase 2 from Klebsiella phage KP179
  source 1..1038: mol_type = other DNA
atgcatcaccatcaccatcacggtggcagcaacatgtttgcgtattattcaagtctggaaaaccataccaatgccaagttcattagcaagatccgtggtgcaggcttcctgagccacaccgtggaatgggtagctcgcgagaagattcatggaacgaactttagcgttatcattactccgaccgaaatcgtgccagccaaacgcacagggccgatcttggaagatgagagcttctttggtcatgaaattatcatgaaaaaatatatggactccttcgtgaaggtgcagaacatgctgaatgcgatggatcttgttagcgtgcaaatctttggcgaatttgcgggtggtggcattcagaaaggcgtcgattacggagacaaagatttctatgtgtttgacatcctgtctgatagcgggaacgagaaagtttactgggatgactatcgcgtcgaatcgttttgcaccactgtgggtctgaaattagcgcctctgctgggacgtggtagtttcgctgaactgtcccagtacccaaacgatttcaaaagcctggtgaaccgttataatgaattggttgacacggtcggcctggagatggccaataaacacgtctttggtccgcaagcgtcttctgaaactggcctggcagaaggctacgttcttaaacccgtctatccgcgcttctttaatgtgggtacgcgcgtggcgattaaatgcaagaactccaaattttcggagaaagcctttctggaaagcccaattaaagcgaaggttgaactgacggagaacgataaacgtctgctcggaatctttagcgaatatgttacctggaatcgcgtcagtaacgtactgtcacatattggctcagtgaccgccaaagattttgggcgtgtttcgggtctgacgatgaaagacatcattcgcgaagcagcacgcgaaggccatgatctgttgttcgctgataacccgtcggcggtgctgaaggagctgacaggcctcatccagaacacgattcgctccaaatggcacgaagttctggag

SEQ ID NO: 1966 - protein, 346 aa, synthetic construct
  REGION 1..346: note = variant of RNA ligase 2 from Klebsiella phage KP179
MHHHHHHGGSNMFAYYSSLENHTNAKFISKIRGAGFLSHTVEWVAREKIHGTNFSVIITPTEIVPAKRTGPILEDESFFGHEIIMKKYMDSFVKVQNMLNAMDLVSVQIFGEFAGGGIQKGVDYGDKDFYVFDILSDSGNEKVYWDDYRVESFCTTVGLKLAPLLGRGSFAELSQYPNDFKSLVNRYNELVDTVGLEMANKHVFGPQASSETGLAEGYVLKPVYPRFFNVGTRVAIKCKNSKFSEKAFLESPIKAKVELTENDKRLLGIFSEYVTWNRVSNVLSHIGSVTAKDFGRVSGLTMKDIIREAAREGHDLLFADNPSAVLKELTGLIQNTIRSKWHEVLE

SEQ ID NO: 1967 - DNA, 1038 bp, synthetic construct
  misc_feature 1..1038: note = variant of RNA ligase 2 from Klebsiella phage KP179
  source 1..1038: mol_type = other DNA
atgcatcaccatcaccatcacggtggcagcaacatgtttgcgtattattcaagtctggaaaaccataccaatgccaagttcattagcaagatccgtggtgcaggcttcctgagccacaccgtggaatgggtagctcgcgagaagattcatggaacgaactttagcgttatcattactccgaccgaaatcgtgccagccaaacgcacagggccgatcttggaagatgagagcttctttggtcatgaaattatcatgaaaaaatatatggactccttcaaaaaggtgcagaacatgctgaatgcgatggatcttgttagcgtgcaaatctttggcgaatttgcgggtggtggcattcagaaaggcgtcgattacggagacaaagatttctatgtgtttgacatcctgtctgatagcgggaacgagaaagtttactgggatgactatcgcgtcgaatcgttttgcaccactgtgggtctgaaattagcgcctctgctgggacgtggtagtttcgctgaactgtcccagtacccaaacgatttcaaaagcctggtgaaccgttataatgaattggttgacacggtcggcctggagatggccaataaacacgtctttggtccgcaagcgtcttctgaaactggcctggcagaaggctacgttcttaaacccgtctatccgcgcttctttaatgtgggtacgcgcgtggcgattaaatgcaagaactccaaattttcggagaaagccaaactggaagaaccaattaaagcgaaggttgaactgacggagaacgataaacgtctgctcggaatctttagcgaatatgttacctgggcgcgcgtcagtaacgtactgtcacatattggctcagtgaccgccaaagattttgggcgtgtttcgggtctgacgatgaaagacatcatccgcgaagcagcacgcgaaggccatgatctgttgttcgctgataacccgtcggcggtgctgaaggagctgacaggcctcatccagaacacgattcgctccaaatggcacgaagttctggag

SEQ ID NO: 1968 - protein, 346 aa, synthetic construct
  REGION 1..346: note = variant of RNA ligase 2 from Klebsiella phage KP179
MHHHHHHGGSNMFAYYSSLENHTNAKFISKIRGAGFLSHTVEWVAREKIHGTNFSVIITPTEIVPAKRTGPILEDESFFGHEIIMKKYMDSFKKVQNMLNAMDLVSVQIFGEFAGGGIQKGVDYGDKDFYVFDILSDSGNEKVYWDDYRVESFCTTVGLKLAPLLGRGSFAELSQYPNDFKSLVNRYNELVDTVGLEMANKHVFGPQASSETGLAEGYVLKPVYPRFFNVGTRVAIKCKNSKFSEKAKLEEPIKAKVELTENDKRLLGIFSEYVTWARVSNVLSHIGSVTAKDFGRVSGLTMKDIIREAAREGHDLLFADNPSAVLKELTGLIQNTIRSKWHEVLE

SEQ ID NO: 1969 - DNA, 1038 bp, synthetic construct
  misc_feature 1..1038: note = variant of RNA ligase 2 from Klebsiella phage KP179
  source 1..1038: mol_type = other DNA
atgcatcaccatcaccatcacggtggcagcaacatgtttgcgtattattcaagtctggaaaaccataccaatgccaagttcattagcaagatccgtggtgcaggcttcctggcgcacaccgtggaatgggtagctcgcgagaagattcatggaacgaactttagcgttatcattactccgaccgaaatcgtgccggccaaacgcacagggccgatcttggaagatgagagcttctttggtcatgaaattatcatgaaaaaatatatggactccttcgtgaaggtgcagaacatgctgaatgcgatggatcttgttagcgtgcaaatctttggcgaatttgcgggtggtggcattcagaaaggcgtcgattacggagacaaagatttctatgtgtttgacatcctgtctgatagcgggaacgagaaagtttactgggatgactatcgcgtcgaatcgttttgcaccactgtgggtctgaaattagcgcctctgctgggacgtggtagtttcgctgaactgtcccagtacccaaacgatttcaaaagcctggtgaaccgttataatgaattggttgacacggtcggcctggagatggccaataaacacgtctttggtccgcaagcgtcttctgaaactggcctggcagaaggctacgttcttaaacccgtctatccgcgcttctttaatgtgggtacgcgcgtggcgattaaatgcaagaactccaaattttcggagaaagccaaactgatttcgccaattaaagtgaaggttgaactgacggagaacgataaacgtctgctcggaatctttagcgaatatgttacctggaatcgcgtcaacaacgtactgtcacatattggctcagtgaccgccaaagattttgggcgtgtttcgggtctgacgatgaaagacatcattcgcgaagcagcacgcgaaggccatgatctgttgtctgctgataacccgtcggcggtgctgaaggagctgacaggcctcatccagaacacgattcgctccaaatggcacgaagttctggag

SEQ ID NO: 1970 - protein, 346 aa, synthetic construct
  REGION 1..346: note = variant of RNA ligase 2 from Klebsiella phage KP179
MHHHHHHGGSNMFAYYSSLENHTNAKFISKIRGAGFLAHTVEWVAREKIHGTNFSVIITPTEIVPAKRTGPILEDESFFGHEIIMKKYMDSFVKVQNMLNAMDLVSVQIFGEFAGGGIQKGVDYGDKDFYVFDILSDSGNEKVYWDDYRVESFCTTVGLKLAPLLGRGSFAELSQYPNDFKSLVNRYNELVDTVGLEMANKHVFGPQASSETGLAEGYVLKPVYPRFFNVGTRVAIKCKNSKFSEKAKLISPIKVKVELTENDKRLLGIFSEYVTWNRVNNVLSHIGSVTAKDFGRVSGLTMKDIIREAAREGHDLLSADNPSAVLKELTGLIQNTIRSKWHEVLE

SEQ ID NO: 1971 - DNA, 1038 bp, synthetic construct
  misc_feature 1..1038: note = variant of RNA ligase 2 from Klebsiella phage KP179
  source 1..1038: mol_type = other DNA
atgcatcaccatcaccatcacggtggcagcaacatgtttgcgtattattcaagtctggaaaaccataccaatgccaagttcattagcaagatccgtggtgcaggcttcctgatgcacaccgtggaatgggtagctcgcgagaagattcatggaacgaactttagcgttatcattactccgaccgaaatcgtgccagccaaacgcacagggccgatcttggaagatgagagcttctttggtcatgaaattatcatgaaaaaatatatggactccttcgtgaaggtgcagaacatgctgaatgcgatggatcttgttagcgtgcaaatctttggcgaatttgcgggtggtggcattcagaaaggcgtcgattacggagacaaagatttctatgtgtttgacatcctgtctgatagcgggaacgagaaagtttactgggatgactatcgcgtcgaatcgttttgcaccactgtgggtctgaaattagcgcctctgctgggacgtggtagtttcgctgaactgtcccagtacccaaacgatttcaaaagcctggtgaaccgttataatgaattggttgacacggtcggcctggagatggccaataaacacgtctttggtccgcaagcgtcttctgaaactggcctggcagaaggctacgttcttaaacccgtctatccgcgcttctttaatgtgggtacgcgcgtggcgattaaatgcaagaactccaaattttcggagaaagcctttctgattagcccaattaaagcgaaggttgaactgacggagaacgataaacgtctgctcggaatctttagcgaatatgttacctggaatcgcgtcagtaacgtactgtcacatattggctcagtgaccgccaaagattttgggcgtgtttcgggtctgacgatgaaagacatcattcgcgaagcagcacgcgaaggccatgatctgttgttcgctgataacccgtcggcggtgctgaaggagctgacaggcctcatccagaacacgattcgctccaaatggcacgaagttctggag

SEQ ID NO: 1972 - protein, 346 aa, synthetic construct
  REGION 1..346: note = variant of RNA ligase 2 from Klebsiella phage KP179
MHHHHHHGGSNMFAYYSSLENHTNAKFISKIRGAGFLMHTVEWVAREKIHGTNFSVIITPTEIVPAKRTGPILEDESFFGHEIIMKKYMDSFVKVQNMLNAMDLVSVQIFGEFAGGGIQKGVDYGDKDFYVFDILSDSGNEKVYWDDYRVESFCTTVGLKLAPLLGRGSFAELSQYPNDFKSLVNRYNELVDTVGLEMANKHVFGPQASSETGLAEGYVLKPVYPRFFNVGTRVAIKCKNSKFSEKAFLISPIKAKVELTENDKRLLGIFSEYVTWNRVSNVLSHIGSVTAKDFGRVSGLTMKDIIREAAREGHDLLFADNPSAVLKELTGLIQNTIRSKWHEVLE

SEQ ID NO: 1973 - DNA, 1038 bp, synthetic construct
  misc_feature 1..1038: note = variant of RNA ligase 2 from Klebsiella phage KP179
  source 1..1038: mol_type = other DNA
atgcatcaccatcaccatcacggtggcagcaacatgtttgcgtattattcaagtctggaaaaccataccaatgccaagttcattagcaagatccgtggtgcaggcttcctggcgcacaccgtggaatgggtagctcgcgagaagattcatggaacgaactttagcgttatcattactccgaccgaaatcgtgccggccaaacgcacagggccgatcttggaagatgagagcttctttggtcatgaaattatcatggataaatatatggactccttcgtgaaggtgcagaacatgctgaatgcgatggatcttgttagcgtgcaaatctttggcgaatttgcgggtggtggcattcagaaaggcgtcgattacggagacaaagatttctatgtgtttgacatcctgtctgatagcgggaacgagaaagtttactgggatgactatcgcgtcgaatcgttttgcaccactgtgggtctgaaattagcgcctctgctgggacgtggtagtttcgctgaactgtcccagtacccaaacgatttcaaaagcctggtgaaccgttataatgaattggttgacacggtcggcctggagatggccaataaacacgtctttggtccgcaagcgtcttctgaaactggcctggcagaaggctacgttcttaaacccgtctatccgcgcttctttaatgtgggtacgcgcgtggcgattaaatgcaagaacggcaaattttcggagaaagccaaactgatttcgccaattaaagtgaaggttgaactgacggagaacgataaacgtctgctcggaatctttagcgaatatgttacctggaatcgcgtcaacaacgtactgtcacatattggctcagtgaccgccaaagattttgggcgtgtttcgggtctgacgatgaaagacatcattcgcgaagcagcacgcgaaggccatgatctgttgtctgctgataacccgtcggcggtgctgaaggagctgacaggcctcatccagcagacgattcgctccaaatggcacgaagttctggag

SEQ ID NO: 1974 - protein, 346 aa, synthetic construct
  REGION 1..346: note = variant of RNA ligase 2 from Klebsiella phage KP179
MHHHHHHGGSNMFAYYSSLENHTNAKFISKIRGAGFLAHTVEWVAREKIHGTNFSVIITPTEIVPAKRTGPILEDESFFGHEIIMDKYMDSFVKVQNMLNAMDLVSVQIFGEFAGGGIQKGVDYGDKDFYVFDILSDSGNEKVYWDDYRVESFCTTVGLKLAPLLGRGSFAELSQYPNDFKSLVNRYNELVDTVGLEMANKHVFGPQASSETGLAEGYVLKPVYPRFFNVGTRVAIKCKNGKFSEKAKLISPIKVKVELTENDKRLLGIFSEYVTWNRVNNVLSHIGSVTAKDFGRVSGLTMKDIIREAAREGHDLLSADNPSAVLKELTGLIQQTIRSKWHEVLE

SEQ ID NO: 1975 - DNA, 1038 bp, synthetic construct
  misc_feature 1..1038: note = variant of RNA ligase 2 from Klebsiella phage KP179
  source 1..1038: mol_type = other DNA
atgcatcaccatcaccatcacggtggcagcaacatgtttgcgtattattcaagtctggaaaaccataccaatgccaagttcattagcaagatccgtggtgcaggcttcctggcgcacaccgtggaatgggtagctcgcgagaagattcatggaacgaactttagcgttatcattactccgaccgaaatcgtgccagccaaacgcacagggccgatcttggaagatgagagcttctttggtcatgaaattatcatgaaaaaatatatggactccttcgtgaaggtgcagaacatgctgaatgcgatggatcttgttagcgtgcaaatctttggcgaatttgcgggtggtggcattcagaaaggcgtcgattacggagacaaagatttctatgtgtttgacatcctgtctgatagcgggaacgagaaagtttactgggatgactatcgcgtcgaatcgttttgcaccactgtgggtctgaaattagcgcctctgctgggacgtggtagtttcgctgaactgtcccagtacccaaacgatttcaaaagcctggtgaaccgttataatgaattggttgacacggtcggcctggagatggccaataaacacgtctttggtccgcaagcgtcttctgaaactggcctggcagaaggctacgttcttaaacccgtctatccgcgcttctttaatgtgggtacgcgcgtggcgattaaatgcaagaactccaaattttcggagaaagccaaactgatttcgccaattaaatcgaaggttgaactgacggagaacgataaacgtctgctcggaatctttagcgaatatgttacctggaatcgcgtcagtaacgtactgtcacatattggctcagtgaccgccaaagattttgggcgtgtttcgggtctgacgatgaaagacatcattcgcgaagcagcacgcgaaggccatgatctgttgttcgctgataacccgtcggcggtgctgaaggagctgacaggcctcatccagaacacgattcgctccaaatggcacgaagttctggag

SEQ ID NO: 1976 - protein, 346 aa, synthetic construct
  REGION 1..346: note = variant of RNA ligase 2 from Klebsiella phage KP179
MHHHHHHGGSNMFAYYSSLENHTNAKFISKIRGAGFLAHTVEWVAREKIHGTNFSVIITPTEIVPAKRTGPILEDESFFGHEIIMKKYMDSFVKVQNMLNAMDLVSVQIFGEFAGGGIQKGVDYGDKDFYVFDILSDSGNEKVYWDDYRVESFCTTVGLKLAPLLGRGSFAELSQYPNDFKSLVNRYNELVDTVGLEMANKHVFGPQASSETGLAEGYVLKPVYPRFFNVGTRVAIKCKNSKFSEKAKLISPIKSKVELTENDKRLLGIFSEYVTWNRVSNVLSHIGSVTAKDFGRVSGLTMKDIIREAAREGHDLLFADNPSAVLKELTGLIQNTIRSKWHEVLE

SEQ ID NO: 1977 - DNA, 1038 bp, synthetic construct
  misc_feature 1..1038: note = variant of RNA ligase 2 from Klebsiella phage KP179
  source 1..1038: mol_type = other DNA
atgcatcaccatcaccatcacggtggcagcaacatgtttgcgtattattcaagtctggaaaaccataccaatgccaagttcattagcaagatccgtggtgcaggcttcctggcgcacaccgtggaatgggtagctcgcgagaagattcatggaacgaactttagcgttatcattactccgaccgaaatcgtgccggccaaacgcacagggccgatcttggaagatgagagcttctttggtcatgaaattatcatgaaaaaatatatggactccttcgtgaaggtgcagaacatgctgaatgcgatggatcttgttagcgtgcaaatctttggcgaatttgcgggtggtggcattcagaaaggcgtcgattacggagacaaagatttctatgtgtttgacatcctgtctgatagcgggaacgagaaagtttactgggatgactatcgcgtcgaatcgttttgcaccactgtgggtctgaaattagcgcctctgctgggacgtggtagtttcgctgaactgtcccagtacccaaacgatttcaaaagcctggtgaaccgttataatgaattggttgacacggtcggcctggagatggccaataaacacgtctttggtccgcaagcgtcttctgaaactggcctggcagaaggctacgttcttaaacccgtctatccgcgcttctttaatgtgggtacgcgcgtggcgattaaatgcaagaactccaaattttcggagaaagccaaactgatttcgccaattaaagcgaaggttgaactgacggagaacgataaacgtctgctcggaatctttagcgaatatgttacctggaatcgcgtcagtaacgtactgtcacatattggctcagtgaccgccaaagattttgggcgtgtttcgggtctgacgatgaaagacatcattcgcgaagcagcacgcgaaggccatgatctgttgttcgctgataacccgtcggcggtgctgaaggagctgacaggcctcatccagaacacgattcgctccaaatggcacgaagttctggag

SEQ ID NO: 1978 - protein, 346 aa, synthetic construct
  REGION 1..346: note = variant of RNA ligase 2 from Klebsiella phage KP179
MHHHHHHGGSNMFAYYSSLENHTNAKFISKIRGAGFLAHTVEWVAREKIHGTNFSVIITPTEIVPAKRTGPILEDESFFGHEIIMKKYMDSFVKVQNMLNAMDLVSVQIFGEFAGGGIQKGVDYGDKDFYVFDILSDSGNEKVYWDDYRVESFCTTVGLKLAPLLGRGSFAELSQYPNDFKSLVNRYNELVDTVGLEMANKHVFGPQASSETGLAEGYVLKPVYPRFFNVGTRVAIKCKNSKFSEKAKLISPIKAKVELTENDKRLLGIFSEYVTWNRVSNVLSHIGSVTAKDFGRVSGLTMKDIIREAAREGHDLLFADNPSAVLKELTGLIQNTIRSKWHEVLE

SEQ ID NO: 1979 - DNA, 1038 bp, synthetic construct
  misc_feature 1..1038: note = variant of RNA ligase 2 from Klebsiella phage KP179
  source 1..1038: mol_type = other DNA
atgcatcaccatcaccatcacggtggcagcaacatgtttgcgtattattcaagtctggaaaaccataccaatgccaagttcattagcaagatccgtggtgcaggcttcctgatgcacaccgtggaatgggtagctcgcgagaagattcatggaacgaactttagcgttatcattactccgaccgaaatcgtgccggccaaacgcacagggccgatcttggaagatgagagcttctttggtcatgaaattatcatgaaaaaatatatggactccttcgtgaaggtgcagaacatgctgaatgcgatggatcttgttagcgtgcaaatctttggcgaatttgcgggtggtggcattcagaaaggcgtcgattacggagacaaagatttctatgtgtttgacatcctgtctgatagcgggaacgagaaagtttactgggatgactatcgcgtcgaatcgttttgcaccactgtgggtctgaaattagcgcctctgctgggacgtggtagtttcgctgaactgtcccagtacccaaacgatttcaaaagcctggtgaaccgttataatgaattggttgacacggtcggcctggagatggccaataaacacgtctttggtccgcaagcgtcttctgaaactggcctggcagaaggctacgttcttaaacccgtctatccgcgcttctttaatgtgggtacgcgcgtggcgattaaatgcaagaactccaaattttcggagaaagccaaactgatttcgccaattaaagcgaaggttgaactgacggagaacgataaacgtctgctcggaatctttagcgaatatgttacctggaatcgcgtcagtaacgtactgtcacatattggctcagtgaccgccaaagattttgggcgtgtttcgggtctgacgatgaaagacatcattcgcgaagcagcacgcgaaggccatgatctgttgtctgctgataacccgtcggcggtgctgaaggagctgacaggcctcatccagaacacgattcgctccaaatggcacgaagttctggag

SEQ ID NO: 1980 - protein, 346 aa, synthetic construct
  REGION 1..346: note = variant of RNA ligase 2 from Klebsiella phage KP179
MHHHHHHGGSNMFAYYSSLENHTNAKFISKIRGAGFLMHTVEWVAREKIHGTNFSVIITPTEIVPAKRTGPILEDESFFGHEIIMKKYMDSFVKVQNMLNAMDLVSVQIFGEFAGGGIQKGVDYGDKDFYVFDILSDSGNEKVYWDDYRVESFCTTVGLKLAPLLGRGSFAELSQYPNDFKSLVNRYNELVDTVGLEMANKHVFGPQASSETGLAEGYVLKPVYPRFFNVGTRVAIKCKNSKFSEKAKLISPIKAKVELTENDKRLLGIFSEYVTWNRVSNVLSHIGSVTAKDFGRVSGLTMKDIIREAAREGHDLLSADNPSAVLKELTGLIQNTIRSKWHEVLE

SEQ ID NO: 1981 - DNA, 1038 bp, synthetic construct
  misc_feature 1..1038: note = variant of RNA ligase 2 from Klebsiella phage KP179
  source 1..1038: mol_type = other DNA
atgcatcaccatcaccatcacggtggcagcaacatgtttgcgtattattcaagtctggaaaaccataccaatgccaagttcattagcaagatccgtggtgcaggcttcctggcgcacaccgtggaatgggtagctcgcgagaagattcatggaacgaactttagcgttatcattactccgaccgaaatcgtgccggccaaacgcacagggccgatcttggaagatgagagcttctttggtcatgaaattatcatgaaaaaatatatggactccttcgtgaaggtgcagaacatgctgaatccgatggatcttgttagcgtgcaaatctttggcgaatttgcgggtggtggcattcagaaaggcgtcgattacggagacaaagatttctatgtgtttgacatcctgtctgatagcgggaacgagaaagtttactgggatgactatcgcgtcgaatcgttttgcaccactgtgggtctgaaattagcgcctctgctgggacgtggtagtttcgctgaactgtcccagtacccaaacgatttcaaaagcctggtgaaccgttataatgaattggttgacacggtcggcctggagatggccaataaacacgtctttggtccgcaagcgtcttctgaaactggcctggcagaaggctacgttcttaaacccgtctatccgcgcttctttaatgtgggtacgcgcgtggcgattaaatgcaagaactccaaattttcggagaaagccaaactgatttcgccaattaaatcgaaggttgaactgacggagaacgataaacgtctgctcggaatctttagcgaatatgttacctggaatcgcgtcaacaacgtactgtcacatattggctcagtgaccgccaaagattttgggcgtgtttcgggtctgacgatgaaagacatcattcgcgaagcagcacgcgaaggccatgatctgttgtttgctgataacccgtcggcggtgctgaaggagctgacaggcctcatccagaacacgattcgctccaaatggcacgaagttctggag

SEQ ID NO: 1982 - protein, 346 aa, synthetic construct
  REGION 1..346: note = variant of RNA ligase 2 from Klebsiella phage KP179
MHHHHHHGGSNMFAYYSSLENHTNAKFISKIRGAGFLAHTVEWVAREKIHGTNFSVIITPTEIVPAKRTGPILEDESFFGHEIIMKKYMDSFVKVQNMLNPMDLVSVQIFGEFAGGGIQKGVDYGDKDFYVFDILSDSGNEKVYWDDYRVESFCTTVGLKLAPLLGRGSFAELSQYPNDFKSLVNRYNELVDTVGLEMANKHVFGPQASSETGLAEGYVLKPVYPRFFNVGTRVAIKCKNSKFSEKAKLISPIKSKVELTENDKRLLGIFSEYVTWNRVNNVLSHIGSVTAKDFGRVSGLTMKDIIREAAREGHDLLFADNPSAVLKELTGLIQNTIRSKWHEVLE

SEQ ID NO: 1983 - DNA, 1038 bp, synthetic construct
  misc_feature 1..1038: note = variant of RNA ligase 2 from Klebsiella phage KP179
  source 1..1038: mol_type = other DNA
atgcatcaccatcaccatcacggtggcagcaacatgtttgcgtattattcaagtctggaaaaccataccaatgccaagttcattagcaagatccgtggtgcaggcttcctggcgcacaccgtggaatgggtagctcgcgagaagattcatggaacgaactttagcgttatcattactccgaccgaaatcgtgccggccaaacgcacagggccgatcttggaagatgagagcttctttggtcatgaaattatcatgaaaaaatatatggactccttcgtgaaggtgcagaacatgctgaatgcgatggatcttgttagcgtgcaaatctttggcgaatttgcgggtggtggcattcagaaaggcgtcgattacggagacaaagatttctatgtgtttgacatcctgtctgatagcgggaacgagaaagtttactgggatgactatcgcgtcgaatcgttttgcaccactgtgggtctgaaattagcgcctctgctgggacgtggtagtttcgctgaactgtcccagtacccaaacgatttcaaaagcctggtgaaccgttataatgaattggttgacacggtcggcctggagatggccaataaacacgtctttggtccgcaagcgtcttctgaaactggcctggcagaaggctacgttcttaaacccgtctatccgcgcttctttaatgtgggtacgcgcgtggcgattaaatgcaagaactccaaattttcggagaaagccaaactgatttcgccaattaaagcgaaggttgaactgacggagaacgataaacgtctgctcggaatctttagcgaatatgttacctggaatcgcgtcagtaacgtactgtcacatattggctcagtgaccgccaaagattttgggcgtgtttcgggtctgacgatgaaagacatcattcgcgaagcagcacgcgaaggccatgatctgttgtctgctgataacccgtcggcggtgctgaaggagctgacaggcctcatccagcagacgattcgctccaaatggcacgaagttctggag

SEQ ID NO: 1984 - protein, 346 aa, synthetic construct
  REGION 1..346: note = variant of RNA ligase 2 from Klebsiella phage KP179
MHHHHHHGGSNMFAYYSSLENHTNAKFISKIRGAGFLAHTVEWVAREKIHGTNFSVIITPTEIVPAKRTGPILEDESFFGHEIIMKKYMDSFVKVQNMLNAMDLVSVQIFGEFAGGGIQKGVDYGDKDFYVFDILSDSGNEKVYWDDYRVESFCTTVGLKLAPLLGRGSFAELSQYPNDFKSLVNRYNELVDTVGLEMANKHVFGPQASSETGLAEGYVLKPVYPRFFNVGTRVAIKCKNSKFSEKAKLISPIKAKVELTENDKRLLGIFSEYVTWNRVSNVLSHIGSVTAKDFGRVSGLTMKDIIREAAREGHDLLSADNPSAVLKELTGLIQQTIRSKWHEVLE

SEQ ID NO: 1985 - DNA, 1038 bp, synthetic construct
  misc_feature 1..1038: note = variant of RNA ligase 2 from Klebsiella phage KP179
  source 1..1038: mol_type = other DNA
atgcatcaccatcaccatcacggtggcagcaacatgtttgcgtattattcaagtctggaaaaccataccaatgccaagttcattagcaagatccgtggtgcaggcttcctggcgcacaccgtggaatgggtagctcgcgagaagattcatggaacgaactttagcgttatcattactccgaccgaaatcgtgccggccaaacgcacagggccgatcttggaagatgagagcttctttggtcatgaaattatcatgaaaaaatatatggactccttcgtgaaggtgcagaacatgctgaatgcgatggatcttgttagcgtgcaaatctttggcgaatttgcgggtggtggcattcagaaaggcgtcgattacggagacaaagatttctatgtgtttgacatcctgtctgatagcgggaacgagaaagtttactgggatgactatcgcgtcgaatcgttttgcaccactgtgggtctgaaattagcgcctctgctgggacgtggtagtttcgctgaactgtcccagtacccaaacgatttcaaaagcctggtgaaccgttataatgaattggttgacacggtcggcctggagatggccaataaacacgtctttggtccgcaagcgtcttctgaaactggcctggcagaaggctacgttcttaaacccgtctatccgcgcttctttaatgtgggtacgcgcgtggcgattaaatgcaagaacagcaaattttcggagaaagccaaactgatttcgccaattaaagtgaaggttgaactgacggagaacgataaacgtctgctcggaatctttagcgaatatgttacctggaatcgcgtcagtaacgtactgtcacatattggctcagtgaccgccaaagattttgggcgtgtttcgggtctgacgatgaaagacatcattcgcgaagcagcacgcgaaggccatgatctgttgtctgctgataacccgtcggcggtgctgaaggagctgacaggcctcatccagaacacgattcgctccaaatggcacgaagttctggag

SEQ ID NO: 1986 - protein, 346 aa, synthetic construct
  REGION 1..346: note = variant of RNA ligase 2 from Klebsiella phage KP179
MHHHHHHGGSNMFAYYSSLENHTNAKFISKIRGAGFLAHTVEWVAREKIHGTNFSVIITPTEIVPAKRTGPILEDESFFGHEIIMKKYMDSFVKVQNMLNAMDLVSVQIFGEFAGGGIQKGVDYGDKDFYVFDILSDSGNEKVYWDDYRVESFCTTVGLKLAPLLGRGSFAELSQYPNDFKSLVNRYNELVDTVGLEMANKHVFGPQASSETGLAEGYVLKPVYPRFFNVGTRVAIKCKNSKFSEKAKLISPIKVKVELTENDKRLLGIFSEYVTWNRVSNVLSHIGSVTAKDFGRVSGLTMKDIIREAAREGHDLLSADNPSAVLKELTGLIQNTIRSKWHEVLE

SEQ ID NO: 1987 - DNA, 1038 bp, synthetic construct
  misc_feature 1..1038: note = variant of RNA ligase 2 from Klebsiella phage KP179
  source 1..1038: mol_type = other DNA
atgcatcaccatcaccatcacggtggcagcaacatgtttgcgtattattcaagtctggaaaaccataccaatgccaagttcattagcaagatccgtggtgcaggcttcctgatgcacaccgtggaatgggtagctcgcgagaagattcatggaacgaactttagcgttatcattactccgaccgaaatcgtgccagccaaacgcacagggccgatcttggaagatgagagcttctttggtcatgaaattatcatgaaaaaatatatggactccttcgtgaaggtgcagaacatgctgaatgcgatggatcttgttagcgtgcaaatctttggcgaatttgcgggtggtggcattcagaaaggcgtcgattacggagacaaagatttctatgtgtttgacatcctgtctgatagcgggaacgagaaagtttactgggatgactatcgcgtcgaatcgttttgcaccactgtgggtctgaaattagcgcctctgctgggacgtggtagtttcgctgaactgtcccagtacccaaacgatttcaaaagcctggtgaaccgttataatgaattggttgaaacggtcggcctggagatggccaataaacacgtctttggtccgcaagcgtcttctgaaactggcctggcagaaggctacgttcttaaacccgtctatccgcgcttctttaatgtgggtacgcgcgtggcgattaaatgcaagaactccaaattttcggagaaagccaaactggaagaaccaattaaagcgaaggttgaactgacggagaacgataaacgtctgctcggaatctttagcgaatatgttacctggaatcgcgtcagtaacgtactgtcacatattggctcagtgaccgccaaagattttgggcgtgtttcgggtctgacgatgaaagacatcattcgcgaagcagcacgcgaaggccatgatctgttgttcgctgataacccgtcggcggtgctgaaggagctgacaggcctcatccagaacacgattcgctccaaatggcacgaaaaactggag

SEQ ID NO: 1988 - protein, 346 aa, synthetic construct
  REGION 1..346: note = variant of RNA ligase 2 from Klebsiella phage KP179
MHHHHHHGGSNMFAYYSSLENHTNAKFISKIRGAGFLMHTVEWVAREKIHGTNFSVIITPTEIVPAKRTGPILEDESFFGHEIIMKKYMDSFVKVQNMLNAMDLVSVQIFGEFAGGGIQKGVDYGDKDFYVFDILSDSGNEKVYWDDYRVESFCTTVGLKLAPLLGRGSFAELSQYPNDFKSLVNRYNELVETVGLEMANKHVFGPQASSETGLAEGYVLKPVYPRFFNVGTRVAIKCKNSKFSEKAKLEEPIKAKVELTENDKRLLGIFSEYVTWNRVSNVLSHIGSVTAKDFGRVSGLTMKDIIREAAREGHDLLFADNPSAVLKELTGLIQNTIRSKWHEKLE

SEQ ID NO: 1989 - DNA, 1038 bp, synthetic construct
  misc_feature 1..1038: note = variant of RNA ligase 2 from Klebsiella phage KP179
  source 1..1038: mol_type = other DNA
atgcatcaccatcaccatcacggtggcagcaacatgtttgcgtattattcaagtctggaaaaccataccaatgccaagttcattagcaagatccgtggtgcaggcttcctggcgcacaccgtggaatgggtagctcgcgagaagattcatggaacgaactttagcgttatcattactccgaccgaaatcgtgccggccaaacgcacagggccgatcttggaagatgagagcttctttggtcatgaaattatcatgaaaaaatatatggactccttcgtgaaggtgcagaacatgctgaatgcgatggatcttgttagcgtgcaaatctttggcgaatttgcgggtggtggcattcagaaaggcgtcgattacggagacaaagatttctatgtgtttgacatcctgtctgatagcgggaacgagaaagtttactgggatgactatcgcgtcgaatcgttttgcaccactgtgggtctgaaattagcgcctctgctgggacgtggtagtttcgctgaactgtcccagtacccaaacgatttcaaaagcctggtgaaccgttataatgaattggttgacacggtcggcctggagatggccaataaacacgtctttggtccgcaagcgtcttctgaaactggcctggcagaaggctacgttcttaaacccgtctatccgcgcttctttaatgtgggtacgcgcgtggcgattaaatgcaagaacagcaaattttcggagaaagccaaactgatttcgccaattaaagcgaaggttgaactgacggagaacgataaacgtctgctcggaatctttagcgaatatgttacctggaatcgcgtcagtaacgtactgtcacatattggctcagtgaccgccaaagattttgggcgtgtttcgggtctgacgatgaaagacatcattcgcgaagcagcacgcgaaggccatgatctgttgtttgctgataacccgtcggcggtgctgaaggagctgacaggcctcatccagcagacgattcgctccaaatggcacgaagttctggag

SEQ ID NO: 1990 - protein, 346 aa, synthetic construct
  REGION 1..346: note = variant of RNA ligase 2 from Klebsiella phage KP179
MHHHHHHGGSNMFAYYSSLENHTNAKFISKIRGAGFLAHTVEWVAREKIHGTNFSVIITPTEIVPAKRTGPILEDESFFGHEIIMKKYMDSFVKVQNMLNAMDLVSVQIFGEFAGGGIQKGVDYGDKDFYVFDILSDSGNEKVYWDDYRVESFCTTVGLKLAPLLGRGSFAELSQYPNDFKSLVNRYNELVDTVGLEMANKHVFGPQASSETGLAEGYVLKPVYPRFFNVGTRVAIKCKNSKFSEKAKLISPIKAKVELTENDKRLLGIFSEYVTWNRVSNVLSHIGSVTAKDFGRVSGLTMKDIIREAAREGHDLLFADNPSAVLKELTGLIQQTIRSKWHEVLE

SEQ ID NO: 1991 - DNA, 1038 bp, synthetic construct
  misc_feature 1..1038: note = variant of RNA ligase 2 from Klebsiella phage KP179
  source 1..1038: mol_type = other DNA
atgcatcaccatcaccatcacggtggcagcaacatgtttgcgtattattcaagtctggaaaaccataccaatgccaagttcattagcaagatccgtggtgcaggcttcctgatgcacaccgtggaatgggtagctcgcgagaagattcatggaacgaactttagcgttatcattactccgaccgaaatcgtgccggccaaacgcacagggccgatcttggaagatgagagcttctttggtcatgaaattatcatgaaaaaatatatggactccttcgtgaaggtgcagaacatgctgaatgcgatggatcttgttagcgtgcaaatctttggcgaatttgcgggtggtggcattcagaaaggcgtcgattacggagacaaagatttctatgtgtttgacatcctgtctgatagcgggaacgagaaagtttactgggatgactatcgcgtcgaatcgttttgcaccactgtgggtctgaaattagcgcctctgctgggacgtggtagtttcgctgaactgtcccagtacccaaacgatttcaaaagcctggtgaaccgttataatgaattggttgacacggtcggcctggagatggccaataaacacgtctttggtccgcaagcgtcttctgaaactggcctggcagaaggctacgttcttaaacccgtctatccgcgcttctttaatgtgggtacgcgcgtggcgattaaatgcaagaacagcaaattttcggagaaagccaaactgatttcgccaattaaagcgaaggttgaactgacggagaacgataaacgtctgctcggaatctttagcgaatatgttacctggaatcgcgtcagtaacgtactgtcacatattggctcagtgaccgccaaagattttgggcgtgtttcgggtctgacgatgaaagacatcattcgcgaagcagcacgcgaaggccatgatctgttgtctgctgataacccgtcggcggtgctgaaggagctgacaggcctcatccagcagacgattcgctccaaatggcacgaagttctggag

SEQ ID NO: 1992 - protein, 346 aa, synthetic construct
  REGION 1..346: note = variant of RNA ligase 2 from Klebsiella phage KP179
MHHHHHHGGSNMFAYYSSLENHTNAKFISKIRGAGFLMHTVEWVAREKIHGTNFSVIITPTEIVPAKRTGPILEDESFFGHEIIMKKYMDSFVKVQNMLNAMDLVSVQIFGEFAGGGIQKGVDYGDKDFYVFDILSDSGNEKVYWDDYRVESFCTTVGLKLAPLLGRGSFAELSQYPNDFKSLVNRYNELVDTVGLEMANKHVFGPQASSETGLAEGYVLKPVYPRFFNVGTRVAIKCKNSKFSEKAKLISPIKAKVELTENDKRLLGIFSEYVTWNRVSNVLSHIGSVTAKDFGRVSGLTMKDIIREAAREGHDLLSADNPSAVLKELTGLIQQTIRSKWHEVLE

SEQ ID NO: 1993 - DNA, 1038 bp, synthetic construct
  misc_feature 1..1038: note = variant of RNA ligase 2 from Klebsiella phage KP179
  source 1..1038: mol_type = other DNA
atgcatcaccatcaccatcacggtggcagcaacatgtttgcgtattattcaagtctggaaaaccataccaatgccaagttcattagcaagatccgtggtgcaggcttcctgagccacaccgtggaatgggtagctcgcgagaagattcatggaacgaactttagcgttatcattactccgaccgaaatcgtgccagccaaacgcacagggccgatcttggaagatgagagcttctttggtcatgaaattatcatgaaaaaatatatggactccttcgtgaaggtgcagaacatgctgaatgcgatggatcttgttagcgtgcaaatctttggcgaatttgcgggtggtggcattcagaaaggcgtcgattacggagacaaagatttctatgtgtttgacatcctgtctgatagcgggaacgagaaagtttactgggatgactatcgcgtcgaatcgttttgcaccactgtgggtctgaaattagcgcctctgctgggacgtggtagtttcgctgaactgtcccagtacccaaacgatttcaaaagcctggtgaaccgttataatgaattggttgacacggtcggcctggagatggccaataaacacgtctttggtccgcaagcgtcttctgaaactggcctggcagaaggctacgttcttaaacccgtctatccgcgcttctttaatgtgggtacgcgcgtggcgattaaatgcaagaactccaaattttcggagaaagccaaactgattagcccaattaaagcgaaggttgaactgacggagaacgataaacgtctgctcggaatctttagcgaatatgttacctgggcgcgcgtcagtaacgtactgtcacatattggctcagtgaccgccaaagattttgggcgtgtttcgggtctgacgatgaaagacatcattcgcgaagcagcacgcgaaggccatgatctgttgttcgctgataacccgtcggcggtgctgaaggagctgacaggcctcatccagaacacgattcgctccaaatggcacgaagtgctggag

SEQ ID NO: 1994 - protein, 346 aa, synthetic construct
  REGION 1..346: note = variant of RNA ligase 2 from Klebsiella phage KP179
MHHHHHHGGSNMFAYYSSLENHTNAKFISKIRGAGFLSHTVEWVAREKIHGTNFSVIITPTEIVPAKRTGPILEDESFFGHEIIMKKYMDSFVKVQNMLNAMDLVSVQIFGEFAGGGIQKGVDYGDKDFYVFDILSDSGNEKVYWDDYRVESFCTTVGLKLAPLLGRGSFAELSQYPNDFKSLVNRYNELVDTVGLEMANKHVFGPQASSETGLAEGYVLKPVYPRFFNVGTRVAIKCKNSKFSEKAKLISPIKAKVELTENDKRLLGIFSEYVTWARVSNVLSHIGSVTAKDFGRVSGLTMKDIIREAAREGHDLLFADNPSAVLKELTGLIQNTIRSKWHEVLE

SEQ ID NO: 1995 - DNA, 1038 bp, synthetic construct
  misc_feature 1..1038: note = variant of RNA ligase 2 from Klebsiella phage KP179
  source 1..1038: mol_type = other DNA
atgcatcaccatcaccatcacggtggcagcaacatgtttgcgtattattcaagtctggaaaaccataccaatgccaagttcattagcaagatccgtggtgcaggcttcctgagccacaccgtggaatgggtagctcgcgagaagattcatggaacgaactttagcgttatcattactccgaccgaaatcgtgccagccaaacgcacagggccgatcttggaagacgagagcttctttggtcatgaaattatcatgaaaaaatatatggactccttcaaaaaggtgcagaacatgctgaatgcgatggatcttgttagcgtgcaaatctttggcgaatttgcgggtggtggcattcagaaaggcgtcgattacggagacaaagatttctatgtgtttgacatcctgtctgatagcgggaacgagaaagtttactgggatgactatcgcgtcgaatcgttttgcaccactgtgggtctgaaattagcgcctctgctgggacgtggtagtttcgctgaactgtcccagtacccaaacgatttcaaaagcctggtgaaccgttataatgaattggttgacacggtcggcctggagatggccaataaacacgtctttggtccgcaagcgtcttctgaaactggcctggcagaaggctacgttcttaaacccgtctatccgcgcttctttaatgtgggtacgcgcgtggcgattaaatgcaagaactccaaattttcggagaaagccaaactgattgaaccaattaaagcgaaggttgaactgacggagaacgataaacgtctgctcggaatctttagcgaatatgttacctggaatcgcgtcagtaacgtactgtcacatattggctcagtgaccgccaaagattttgggcgtgtttcgggtctgacgatgaaagacatcattcgcgaagcagcacgcgaaggccatgatctgttgttcgctgataacccgtcggcggtgctgaaggagctgacaggcctcatccagaacacgattcgctccaaatggcacgaagttctggag

SEQ ID NO: 1996 - protein, 346 aa, synthetic construct
  REGION 1..346: note = variant of RNA ligase 2 from Klebsiella phage KP179
MHHHHHHGGSNMFAYYSSLENHTNAKFISKIRGAGFLSHTVEWVAREKIHGTNFSVIITPTEIVPAKRTGPILEDESFFGHEIIMKKYMDSFKKVQNMLNAMDLVSVQIFGEFAGGGIQKGVDYGDKDFYVFDILSDSGNEKVYWDDYRVESFCTTVGLKLAPLLGRGSFAELSQYPNDFKSLVNRYNELVDTVGLEMANKHVFGPQASSETGLAEGYVLKPVYPRFFNVGTRVAIKCKNSKFSEKAKLIEPIKAKVELTENDKRLLGIFSEYVTWNRVSNVLSHIGSVTAKDFGRVSGLTMKDIIREAAREGHDLLFADNPSAVLKELTGLIQNTIRSKWHEVLE

SEQ ID NO: 1997 - DNA, 1038 bp, synthetic construct
  misc_feature 1..1038: note = variant of RNA ligase 2 from Klebsiella phage KP179
  source 1..1038: mol_type = other DNA
atgcatcaccatcaccatcacggtggcagcaacatgtttgcgtattattcaagtctggaaaaccataccaatgccaagttcattagcaagatccgtggtgcaggcttcctgatgcacaccgtggaatgggtagctcgcgagaagattcatggaacgaactttagcgttatcattactccgaccgaaatcgtgccagccaaacgcacagggccgatcttggaagacgagagcttctttggtcatgaaattatcatgaaaaaatatatggactccttcgtgaaggtgcagaacatgctgaatgcgatggatcttgttagcgtgcaaatctttggcgaatttgcgggtggtggcattcagaaaggcgtcgattacggagacaaagatttctatgtgtttgacatcctgtctgatagcgggaacgagaaagtttactgggatgactatcgcgtcgaatcgttttgcaccactgtgggtctgaaattagcgcctctgctgggacgtggtagtttcgctgaactgtcccagtacccaaacgatttcaaaagcctggtgaaccgttataatgaattggttgaaacggtcggcctggagatggccaataaacacgtctttggtccgcaagcgtcttctgaaactggcctggcagaaggctacgttcttaaacccgtctatccgcgcttctttaatgtgggtacgcgcgtggcgattaaatgcaagaactccaaattttcggagaaagccaaactgattgaaccaattaaagcgaaggttgaactgacggagaacgataaacgtctgctcggaatctttagcgaatatgttacctggaaccgcgtcagtaacgtactgtcacatattggctcagtgaccgccaaagattttgggcgtgtttcgggtctgacgatgaaagacatcattcgcgaagcagcacgcgaaggccatgatctgttgttcgctgataacccgtcggcggtgctgaaggagctgacaggcctcatccagaacacgattcgctccaaatggcacgaagttctggag

SEQ ID NO: 1998 - protein, 346 aa, synthetic construct
  REGION 1..346: note = variant of RNA ligase 2 from Klebsiella phage KP179
MHHHHHHGGSNMFAYYSSLENHTNAKFISKIRGAGFLMHTVEWVAREKIHGTNFSVIITPTEIVPAKRTGPILEDESFFGHEIIMKKYMDSFVKVQNMLNAMDLVSVQIFGEFAGGGIQKGVDYGDKDFYVFDILSDSGNEKVYWDDYRVESFCTTVGLKLAPLLGRGSFAELSQYPNDFKSLVNRYNELVETVGLEMANKHVFGPQASSETGLAEGYVLKPVYPRFFNVGTRVAIKCKNSKFSEKAKLIEPIKAKVELTENDKRLLGIFSEYVTWNRVSNVLSHIGSVTAKDFGRVSGLTMKDIIREAAREGHDLLFADNPSAVLKELTGLIQNTIRSKWHEVLE

SEQ ID NO: 1999 - DNA, 1038 bp, synthetic construct
  misc_feature 1..1038: note = variant of RNA ligase 2 from Klebsiella phage KP179
  source 1..1038: mol_type = other DNA
atgcatcaccatcaccatcacggtggcagcaacatgtttgcgtattattcaagtctggaaaaccataccaatgccaagttcattagcaagatccgtggtgcaggcttcctgatgcacaccgtggaatgggtagctcgcgagaagattcatggaacgaactttagcgttatcattactccgaccgaaatcgtgccggccaaacgcacagggccgatcttggaagatgagagcttctttggtcatgaaattatcatgaaaaaatatatggactccttcgtgaaggtgcagaacatgctgaatgcgatggatcttgttagcgtgcaaatctttggcgaatttgcgggtggtggcattcagaaaggcgtcgattacggagacaaagatttctatgtgtttgacatcctgtctgatagcgggaacgagaaagtttactgggatgactatcgcgtcgaatcgttttgcaccactgtgggtctgaaattagcgcctctgctgggacgtggtagtttcgctgaactgtcccagtacccaaacgatttcaaaagcctggtgaaccgttataatgaattggttgacacggtcggcctggagatggccaataaacacgtctttggtccgcaagcgtcttctgaaactggcctggcagaaggctacgttcttaaacccgtctatccgcgcttctttaatgtgggtacgcgcgtggcgattaaatgcaagaactccaaattttcggagaaagccaaactgatttcgccaattaaatcgaaggttgaactgacggagaacgataaacgtctgctcggaatctttagcgaatatgttacctggaatcgcgtcagtaacgtactgtcacatattggctcagtgaccgccaaagattttgggcgtgtttcgggtctgacgatgaaagacatcattcgcgaagcagcacgcgaaggccatgatctgttgttcgctgataacccgtcggcggtgctgaaggagctgacaggcctcatccagaacacgattcgctccaaatggcacgaagttctggag

SEQ ID NO: 2000 - protein, 346 aa, synthetic construct
  REGION 1..346: note = variant of RNA ligase 2 from Klebsiella phage KP179
MHHHHHHGGSNMFAYYSSLENHTNAKFISKIRGAGFLMHTVEWVAREKIHGTNFSVIITPTEIVPAKRTGPILEDESFFGHEIIMKKYMDSFVKVQNMLNAMDLVSVQIFGEFAGGGIQKGVDYGDKDFYVFDILSDSGNEKVYWDDYRVESFCTTVGLKLAPLLGRGSFAELSQYPNDFKSLVNRYNELVDTVGLEMANKHVFGPQASSETGLAEGYVLKPVYPRFFNVGTRVAIKCKNSKFSEKAKLISPIKSKVELTENDKRLLGIFSEYVTWNRVSNVLSHIGSVTAKDFGRVSGLTMKDIIREAAREGHDLLFADNPSAVLKELTGLIQNTIRSKWHEVLE

SEQ ID NO: 2001 - DNA, 1038 bp, synthetic construct
  misc_feature 1..1038: note = variant of RNA ligase 2 from Klebsiella phage KP179
  source 1..1038: mol_type = other DNA
atgcatcaccatcaccatcacggtggcagcaacatgtttgcgtattattcaagtctggaaaaccataccaatgccaagttcattagcaagatccgtggtgcaggcttcctggcgcacaccgtggaatgggtagctcgcgagaagattcatggaacgaactttagcgttatcattactccgaccgaaatccagccggccaaacgcacagggccgatcttggaagatgagagcttctttggtcatgaaattatcatgaaaaaatatatggactccttcgtgaaggtgcagaacatgctgaatgcgatggatcttgttagcgtgcaaatctttggcgaatttgcgggtggtggcattcagaaaggcgtcgattacggagacaaagatttctatgtgtttgacatcctgtctgatagcgggaacgagaaagtttactgggatgactatcgcgtcgaatcgttttgcaccactgtgggtctgaaattagcgcctctgctgggacgtggtagtttcgctgaactgtcccagtacccaaacgatttcaaaagcctggtgaaccgttataatgaattggttgacacggtcggcctggagatggccaataaacacgtctttggtccgcaagcgtcttctgaaactggcctggcagaaggctacgttcttaaacccgtctatccgcgcttctttaatgtgggtacgcgcgtggcgattaaatgcaagaactccaaattttcggagaaagccaaactgatttcgccaattaaagcgaaggttgaactgacggagaacgataaacgtctgctcggaatctttagcgaatatgttacctggaatcgcgtcagcaacgtactgtcacatattggctcagtgaccgccaaagattttgggcgtgtttcgggtctgacgatgaaagacatcattcgcgaagcagcacgcgaaggccatgatctgttgtctgctgataacccgtcggcggtgctgaaggagctgacaggcctcatccagaacacgattcgctccaaatggcacgaagttctggag

SEQ ID NO: 2002 - protein, 346 aa, synthetic construct
  REGION 1..346: note = variant of RNA ligase 2 from Klebsiella phage KP179
MHHHHHHGGSNMFAYYSSLENHTNAKFISKIRGAGFLAHTVEWVAREKIHGTNFSVIITPTEIQPAKRTGPILEDESFFGHEIIMKKYMDSFVKVQNMLNAMDLVSVQIFGEFAGGGIQKGVDYGDKDFYVFDILSDSGNEKVYWDDYRVESFCTTVGLKLAPLLGRGSFAELSQYPNDFKSLVNRYNELVDTVGLEMANKHVFGPQASSETGLAEGYVLKPVYPRFFNVGTRVAIKCKNSKFSEKAKLISPIKAKVELTENDKRLLGIFSEYVTWNRVSNVLSHIGSVTAKDFGRVSGLTMKDIIREAAREGHDLLSADNPSAVLKELTGLIQNTIRSKWHEVLE

SEQ ID NO: 2003 - DNA, 1038 bp, synthetic construct
  misc_feature 1..1038: note = variant of RNA ligase 2 from Klebsiella phage KP179
  source 1..1038: mol_type = other DNA
atgcatcaccatcaccatcacggtggcagcaacatgtttgcgtattattcaagtctggaaaaccataccaatgccaagttcattagcaagatccgtggtgcaggcttcctgatgcacaccgtggaatgggtagctcgcgagaagattcatggaacgaactttagcgttatcattactccgaccgaaatcgtgccagccaaacgcacagggccgatcttggaagacgagagcttctttggtcatgaaattatcatgaaaaaatatatggactccttcgtgaaggtgcagaacatgctgaatgcgatggatcttgttagcgtgcaaatctttggcgaatttgcgggtggtggcattcagaaaggcgtcgattacggagacaaagatttctatgtgtttgacatcctgtctgatagcgggaacgagaaagtttactgggatgactatcgcgtcgaatcgttttgcaccactgtgggtctgaaattagcgcctctgctgggacgtggtagtttcgctgaactgtcccagtacccaaacgatttcaaaagcctggtgaaccgttataatgaattggttgatacggtcggcctggagatggccaataaacacgtctttggtccgcaagcgtcttctgaaactggcctggcagaaggctacgttcttaaacccgtctatccgcgcttctttaatgtgggtacgcgcgtggcgattaaatgcaagaactccaaattttcggagaaagccatactgatttcgccaattaaagcgaaggttgaactgacggagaacgataaacgtctgctcggaatctttagcgaatatgttacctggaatcgcgtcagtaacgtactgtcacatattggctcagtgaccgccaaagattttgggcgtgtttcgggtctgacgatgaaagacatcattcgcgaagcagcacgcgaaggccatgatctgttgttcgctgataacccgtcggcggtgctgaaggagctgacaggcctcatccagaacacgattcgctccaaatggcacgaagtgctggag

SEQ ID NO: 2004 - protein, 346 aa, synthetic construct
  REGION 1..346: note = variant of RNA ligase 2 from Klebsiella phage KP179
MHHHHHHGGSNMFAYYSSLENHTNAKFISKIRGAGFLMHTVEWVAREKIHGTNFSVIITPTEIVPAKRTGPILEDESFFGHEIIMKKYMDSFVKVQNMLNAMDLVSVQIFGEFAGGGIQKGVDYGDKDFYVFDILSDSGNEKVYWDDYRVESFCTTVGLKLAPLLGRGSFAELSQYPNDFKSLVNRYNELVDTVGLEMANKHVFGPQASSETGLAEGYVLKPVYPRFFNVGTRVAIKCKNSKFSEKAILISPIKAKVELTENDKRLLGIFSEYVTWNRVSNVLSHIGSVTAKDFGRVSGLTMKDIIREAAREGHDLLFADNPSAVLKELTGLIQNTIRSKWHEVLE

SEQ ID NO: 2005 - DNA, 1038 bp, synthetic construct
  misc_feature 1..1038: note = variant of RNA ligase 2 from Klebsiella phage KP179
  source 1..1038: mol_type = other DNA
atgcatcaccatcaccatcacggtggcagcaacatgtttgcgtattattcaagtctggaaaaccataccaatgccaagttcattagcaagatccgtggtgcaggcttcctggcgcacaccgtggaatgggtagctcgcgagaagattcatggaacgaactttagcgttatcattactccgaccgaaatccagccggccaaacgcacagggccgatcttggaagatgagagcttctttggtcatgaaattatcatgaaaaaatatatggactccttcgtgaaggtgcagaacatgctgaatgcgatggatcttgttagcgtgcaaatctttggcgaatttgcgggtggtggcattcagaaaggcgtcgattacggagacaaagatttctatgtgtttgacatcctgtctgatagcgggaacgagaaagtttactgggatgactatcgcgtcgaatcgttttgcaccactgtgggtctgaaattagcgcctctgctgggacgtggtagtttcgctgaactgtcccagtacccaaacgatttcaaaagcctggtgaaccgttataatgaattggttgacacggtcggcctggagatggccaataaacacgtctttggtccgcaagcgtcttctgaaactggcctggcagaaggctacgttcttaaacccgtctatccgcgcttctttaatgtgggtacgcgcgtggcgattaaatgcaagaacggcaaattttcggagaaagccaaactgatttcgccaattaaagtgaaggttgaactgacggagaacgataaacgtctgctcggaatctttagcgaatatgttacctggaatcgcgtcagcaacgtactgtcacatattggctcagtgaccgccaaagattttgggcgtgtttcgggtctgacgatgaaagacatcattcgcgaagcagcacgcgaaggccatgatctgttgtctgctgataacccgtcggcggtgctgaaggagctgacaggcctcatccagaacacgattcgctccaaatggcacgaagttctggag

SEQ ID NO: 2006 - protein, 346 aa, synthetic construct
  REGION 1..346: note = variant of RNA ligase 2 from Klebsiella phage KP179
MHHHHHHGGSNMFAYYSSLENHTNAKFISKIRGAGFLAHTVEWVAREKIHGTNFSVIITPTEIQPAKRTGPILEDESFFGHEIIMKKYMDSFVKVQNMLNAMDLVSVQIFGEFAGGGIQKGVDYGDKDFYVFDILSDSGNEKVYWDDYRVESFCTTVGLKLAPLLGRGSFAELSQYPNDFKSLVNRYNELVDTVGLEMANKHVFGPQASSETGLAEGYVLKPVYPRFFNVGTRVAIKCKNGKFSEKAKLISPIKVKVELTENDKRLLGIFSEYVTWNRVSNVLSHIGSVTAKDFGRVSGLTMKDIIREAAREGHDLLSADNPSAVLKELTGLIQNTIRSKWHEVLE

SEQ ID NO: 2007 - DNA, 1038 bp, synthetic construct
  misc_feature 1..1038: note = variant of RNA ligase 2 from Klebsiella phage KP179
  source 1..1038: mol_type = other DNA
atgcatcaccatcaccatcacggtggcagcaacatgtttgcgtattattcaagtctggaaaaccataccaatgccaagttcattagcaagatccgtggtgcaggcttcctgatgcacaccgtggaatgggtagctcgcgagaagattcatggaacgaactttagcgttatcattactccgaccgaaatcgtgccagccaaacgcacagggccgatcttggaagacgagagcttctttggtcatgaaattatcatgaaaaaatatatggactccttcgtgaaggtgcagaacatgctgaatgcgatggatcttgttagcgtgcaaatctttggcgaatttgcgggtggtggcattcagaaaggcgtcgattacggagacaaagatttctatgtgtttgacatcctgtctgatagcgggaacgagaaagtttactgggatgactatcgcgtcgaatcgttttgcaccactgtgggtctgaaattagcgcctctgctgggacgtggtagtttcgctgaactgtcccagtacccaaacgatttcaaaagcctggtgaaccgttataatgaattggttgatacggtcggcctggagatggccaataaacacgtctttggtccgcaagcgtcttctgaaactggcctggcagaaggctacgttcttaaacccgtctatccgcgcttctttaatgtgggtacgcgcgtggcgattaaatgcaagaactccaaattttcggagaaagccaaactgattgaaccaattaaagcgaaggttgaactgacggagaacgataaacgtctgctcggaatctttagcgaatatgttacctggaatcgcgtcagtaacgtactgtcacatattggctcagtgaccgccaaagattttgggcgtgtttcgggtctgacgatgaaagacatcattcgcgaagcagcacgcgaaggccatgatctgttgttcgctgataacccgtcggcggtgctgaaggagctgacaggcctcatccagaacacgattcgctccaaatggcacgaagttctggag

SEQ ID NO: 2008 - protein, 346 aa, synthetic construct
  REGION 1..346: note = variant of RNA ligase 2 from Klebsiella phage KP179
MHHHHHHGGSNMFAYYSSLENHTNAKFISKIRGAGFLMHTVEWVAREKIHGTNFSVIITPTEIVPAKRTGPILEDESFFGHEIIMKKYMDSFVKVQNMLNAMDLVSVQIFGEFAGGGIQKGVDYGDKDFYVFDILSDSGNEKVYWDDYRVESFCTTVGLKLAPLLGRGSFAELSQYPNDFKSLVNRYNELVDTVGLEMANKHVFGPQASSETGLAEGYVLKPVYPRFFNVGTRVAIKCKNSKFSEKAKLIEPIKAKVELTENDKRLLGIFSEYVTWNRVSNVLSHIGSVTAKDFGRVSGLTMKDIIREAAREGHDLLFADNPSAVLKELTGLIQNTIRSKWHEVLE

SEQ ID NO: 2009 - DNA, 1038 bp, synthetic construct
  misc_feature 1..1038: note = variant of RNA ligase 2 from Klebsiella phage KP179
  source 1..1038: mol_type = other DNA
atgcatcaccatcaccatcacggtggcagcaacatgtttgcgtattattcaagtctggaaaaccataccaatgccaagttcattagcaagatccgtggtgcaggcttcctgatgcacaccgtggaatgggtagctcgcgagaagattcatggaacgaactttagcgttatcattactccgaccgaaatccagccggccaaacgcacagggccgatcttggaagatgagagcttctttggtcatgaaattatcatgaaaaaatatatggactccttcgtgaaggtgcagaacatgctgaatccgatggatcttgttagcgtgcaaatctttggcgaatttgcgggtggtggcattcagaaaggcgtcgattacggagacaaagatttctatgtgtttgacatcctgtctgatagcgggaacgagaaagtttactgggatgactatcgcgtcgaatcgttttgcaccactgtgggtctgaaattagcgcctctgctgggacgtggtagtttcgctgaactgtcccagtacccaaacgatttcaaaagcctggtgaaccgttataatgaattggttgacacggtcggcctggagatggccaataaacacgtctttggtccgcaagcgtcttctgaaactggcctggcagaaggctacgttcttaaacccgtctatccgcgcttctttaatgtgggtacgcgcgtggcgattaaatgcaagaacagcaaattttcggagaaagccaaactgatttcgccaattaaagtgaaggttgaactgacggagaacgataaacgtctgctcggaatctttagcgaatatgttacctggaatcgcgtcaacaacgtactgtcacatattggctcagtgaccgccaaagattttgggcgtgtttcgggtctgacgatgaaagacatcattcgcgaagcagcacgcgaaggccatgatctgttgtctgctgataacccgtcggcggtgctgaaggagctgacaggcctcatccagaacacgattcgctccaaatggcacgaagttctggag

SEQ ID NO: 2010 - protein, 346 aa, synthetic construct
  REGION 1..346: note = variant of RNA ligase 2 from Klebsiella phage KP179
MHHHHHHGGSNMFAYYSSLENHTNAKFISKIRGAGFLMHTVEWVAREKIHGTNFSVIITPTEIQPAKRTGPILEDESFFGHEIIMKKYMDSFVKVQNMLNPMDLVSVQIFGEFAGGGIQKGVDYGDKDFYVFDILSDSGNEKVYWDDYRVESFCTTVGLKLAPLLGRGSFAELSQYPNDFKSLVNRYNELVDTVGLEMANKHVFGPQASSETGLAEGYVLKPVYPRFFNVGTRVAIKCKNSKFSEKAKLISPIKVKVELTENDKRLLGIFSEYVTWNRVNNVLSHIGSVTAKDFGRVSGLTMKDIIREAAREGHDLLSADNPSAVLKELTGLIQNTIRSKWHEVLE

SEQ ID NO: 2011 - DNA, 1038 bp, synthetic construct
  misc_feature 1..1038: note = variant of RNA ligase 2 from Klebsiella phage KP179
  source 1..1038: mol_type = other DNA
atgcatcaccatcaccatcacggtggcagcaacatgtttgcgtattattcaagtctggaaaaccataccaatgccaagttcattagcaagatccgtggtgcaggcttcctggcgcacaccgtggaatgggtagctcgcgagaagattcatggaacgaactttagcgttatcattactccgaccgaaatcgtgccggccaaacgcacagggccgatcttggaagatgagagcttctttggtcatgaaattatcatgaaaaaatatatggactccttcgtgaaggtgcagaacatgctgaatccgatggatcttgttagcgtgcaaatctttggcgaatttgcgggtggtggcattcagaaaggcgtcgattacggagacaaagatttctatgtgtttgacatcctgtctgatagcgggaacgagaaagtttactgggatgactatcgcgtcgaatcgttttgcaccactgtgggtctgaaattagcgcctctgctgggacgtggtagtttcgctgaactgtcccagtacccaaacgatttcaaaagcctggtgaaccgttataatgaattggttgacacggtcggcctggagatggccaataaacacgtctttggtccgcaagcgtcttctgaaactggcctggcagaaggctacgttcttaaacccgtctatccgcgcttctttaatgtgggtacgcgcgtggcgattaaatgcaagaactccaaattttcggagaaagccaaactgatttcgccaattaaagtgaaggttgaactgacggagaacgataaacgtctgctcggaatctttagcgaatatgttacctggaatcgcgtcaacaacgtactgtcacatattggctcagtgaccgccaaagattttgggcgtgtttcgggtctgacgatgaaagacatcattcgcgaagcagcacgcgaaggccatgatctgttgtctgctgataacccgtcggcggtgctgaaggagctgacaggcctcatccagcagacgattcgctccaaatggcacgaagttctggag

SEQ ID NO: 2012 - protein, 346 aa, synthetic construct
  REGION 1..346: note = variant of RNA ligase 2 from Klebsiella phage KP179
MHHHHHHGGSNMFAYYSSLENHTNAKFISKIRGAGFLAHTVEWVAREKIHGTNFSVIITPTEIVPAKRTGPILEDESFFGHEIIMKKYMDSFVKVQNMLNPMDLVSVQIFGEFAGGGIQKGVDYGDKDFYVFDILSDSGNEKVYWDDYRVESFCTTVGLKLAPLLGRGSFAELSQYPNDFKSLVNRYNELVDTVGLEMANKHVFGPQASSETGLAEGYVLKPVYPRFFNVGTRVAIKCKNSKFSEKAKLISPIKVKVELTENDKRLLGIFSEYVTWNRVNNVLSHIGSVTAKDFGRVSGLTMKDIIREAAREGHDLLSADNPSAVLKELTGLIQQTIRSKWHEVLE

SEQ ID NO: 2013 - DNA, 1038 bp, synthetic construct
  misc_feature 1..1038: note = variant of RNA ligase 2 from Klebsiella phage KP179
  source 1..1038: mol_type = other DNA
atgcatcaccatcaccatcacggtggcagcaacatgtttgcgtattattcaagtctggaaaaccataccaatgccaagttcattagcaagatccgtggtgcaggcttcctggcgcacaccgtggaatgggtagctcgcgagaagattcatggaacgaactttagcgttatcattactccgaccgaaatcgtgccggccaaacgcacagggccgatcttggaagatgagagcttctttggtcatgaaattatcatgaaaaaatatatggactccttcgtgaaggtgcagaacatgctgaatgcgatggatcttgttagcgtgcaaatctttggcgaatttgcgggtggtggcattcagaaaggcgtcgattacggagacaaagatttctatgtgtttgacatcctgtctgatagcgggaacgagaaagtttactgggatgactatcgcgtcgaatcgttttgcaccactgtgggtctgaaattagcgcctctgctgggacgtggtagtttcgctgaactgtcccagtacccaaacgatttcaaaagcctggtgaaccgttataatgaattggttgacacggtcggcctggagatggccaataaacacgtctttggtccgcaagcgtcttctgaaactggcctggcagaaggctacgttcttaaacccgtctatccgcgcttctttaatgtgggtacgcgcgtggcgattaaatgcaagaactccaaattttcggagaaagccaaactgatttcgccaattaaagtgaaggttgaactgacggagaacgataaacgtctgctcggaatctttagcgaatatgttacctggaatcgcgtcaacaacgtactgtcacatattggctcagtgaccgccaaagattttgggcgtgtttcgggtctgacgatgaaagacatcattcgcgaagcagcacgcgaaggccatgatctgttgttcgctgataacccgtcggcggtgctgaaggagctgacaggcctcatccagaacacgattcgctccaaatggcacgaagttctggag

SEQ ID NO: 2014 - protein, 346 aa, synthetic construct
  REGION 1..346: note = variant of RNA ligase 2 from Klebsiella phage KP179
MHHHHHHGGSNMFAYYSSLENHTNAKFISKIRGAGFLAHTVEWVAREKIHGTNFSVIITPTEIVPAKRTGPILEDESFFGHEIIMKKYMDSFVKVQNMLNAMDLVSVQIFGEFAGGGIQKGVDYGDKDFYVFDILSDSGNEKVYWDDYRVESFCTTVGLKLAPLLGRGSFAELSQYPNDFKSLVNRYNELVDTVGLEMANKHVFGPQASSETGLAEGYVLKPVYPRFFNVGTRVAIKCKNSKFSEKAKLISPIKVKVELTENDKRLLGIFSEYVTWNRVNNVLSHIGSVTAKDFGRVSGLTMKDIIREAAREGHDLLFADNPSAVLKELTGLIQNTIRSKWHEVLE

SEQ ID NO: 2015 - DNA, 1038 bp, synthetic construct
  misc_feature 1..1038: note = variant of RNA ligase 2 from Klebsiella phage KP179
  source 1..1038: mol_type = other DNA
atgcatcaccatcaccatcacggtggcagcaacatgtttgcgtattattcaagtctggaaaaccataccaatgccaagttcattagcaagatccgtggtgcaggcttcctgagccacaccgtggaatgggtagctcgcgagaagattcatggaacgaactttagcgttatcattactccgaccgaaatcgtgccagccaaacgcacagggccgatcttggaagacgagagcttctttggtcatgaaattatcatgaaaaaatatatggactccttcgtgaaggtgcagaacatgctgaatgcgatggatcttgttagcgtgcaaatctttggcgaatttgcgggtggtggcattcagaaaggcgtcgattacggagacaaagatttctatgtgtttgacatcctgtctgatagcgggaacgagaaagtttactgggatgactatcgcgtcgaatcgttttgcaccactgtgggtctgaaattagcgcctctgctgggacgtggtagtttcgctgaactgtcccagtacccaaacgatttcaaaagcctggtgaaccgttataatgaattggttgatacggtcggcctggagatggccaataaacacgtctttggtccgcaagcgtcttctgaaactggcctggcagaaggctacgttcttaaacccgtctatccgcgcttctttaatgtgggtacgcgcgtggcgattaaatgcaagaactccaaattttcggagaaagccaaactgattaggccaattaaagcgaaggttgaactgacggagaacgataaacgtctgctcggaatctttagcgaatatgttacctgggcgcgcgtcagtaacgtactgtcacatattggctcagtgaccgccaaagattttgggcgtgtttcgggtctgacgatgaaagacatcattcgcgaagcagcacgcgaaggccatgatctgttgttcgctgataacccgtcggcggtgctgaaggagctgacaggcctcatccagaacacgattcgctccaaatggcacgaagttctggag

SEQ ID NO: 2016 - protein, 346 aa, synthetic construct
  REGION 1..346: note = variant of RNA ligase 2 from Klebsiella phage KP179
MHHHHHHGGSNMFAYYSSLENHTNAKFISKIRGAGFLSHTVEWVAREKIHGTNFSVIITPTEIVPAKRTGPILEDESFFGHEIIMKKYMDSFVKVQNMLNAMDLVSVQIFGEFAGGGIQKGVDYGDKDFYVFDILSDSGNEKVYWDDYRVESFCTTVGLKLAPLLGRGSFAELSQYPNDFKSLVNRYNELVDTVGLEMANKHVFGPQASSETGLAEGYVLKPVYPRFFNVGTRVAIKCKNSKFSEKAKLIRPIKAKVELTENDKRLLGIFSEYVTWARVSNVLSHIGSVTAKDFGRVSGLTMKDIIREAAREGHDLLFADNPSAVLKELTGLIQNTIRSKWHEVLE

SEQ ID NO: 2017 - DNA, 1038 bp, synthetic construct
  misc_feature 1..1038: note = variant of RNA ligase 2 from Klebsiella phage KP179
  source 1..1038: mol_type = other DNA
atgcatcaccatcaccatcacggtggcagcaacatgtttgcgtattattcaagtctggaaaaccataccaatgccaagttcattagcaagatccgtggtgcaggcttcctgatgcacaccgtggaatgggtagctcgcgagaagattcatggaacgaactttagcgttatcattactccgaccgaaatccagccggccaaacgcacagggccgatcttggaagatgagagcttctttggtcatgaaattatcatgaaaaaatatatggactccttcgtgaaggtgcagaacatgctgaatgcgatggatcttgttagcgtgcaaatctttggcgaatttgcgggtggtggcattcagaaaggcgtcgattacggagacaaagatttctatgtgtttgacatcctgtctgatagcgggaacgagaaagtttactgggatgactatcgcgtcgaatcgttttgcaccactgtgggtctgaaattagcgcctctgctgggacgtggtagtttcgctgaactgtcccagtacccaaacgatttcaaaagcctggtgaaccgttataatgaattggttgacacggtcggcctggagatggccaataaacacgtctttggtccgcaagcgtcttctgaaactggcctggcagaaggctacgttcttaaacccgtctatccgcgcttctttaatgtgggtacgcgcgtggcgattaaatgcaagaactccaaattttcggagaaagccaaactgatttcgccaattaaagcgaaggttgaactgacggagaacgataaacgtctgctcggaatctttagcgaatatgttacctggaatcgcgtcagcaacgtactgtcacatattggctcagtgaccgccaaagattttgggcgtgtttcgggtctgacgatgaaagacatcattcgcgaagcagcacgcgaaggccatgatctgttgtctgctgataacccgtcggcggtgctgaaggagctgacaggcctcatccagaacacgattcgctccaaatggcacgaagttctggag

SEQ ID NO: 2018 - protein, 346 aa, synthetic construct
  REGION 1..346: note = variant of RNA ligase 2 from Klebsiella phage KP179
MHHHHHHGGSNMFAYYSSLENHTNAKFISKIRGAGFLMHTVEWVAREKIHGTNFSVIITPTEIQPAKRTGPILEDESFFGHEIIMKKYMDSFVKVQNMLNAMDLVSVQIFGEFAGGGIQKGVDYGDKDFYVFDILSDSGNEKVYWDDYRVESFCTTVGLKLAPLLGRGSFAELSQYPNDFKSLVNRYNELVDTVGLEMANKHVFGPQASSETGLAEGYVLKPVYPRFFNVGTRVAIKCKNSKFSEKAKLISPIKAKVELTENDKRLLGIFSEYVTWNRVSNVLSHIGSVTAKDFGRVSGLTMKDIIREAAREGHDLLSADNPSAVLKELTGLIQNTIRSKWHEVLE

SEQ ID NO: 2019 - DNA, 1038 bp, synthetic construct
  misc_feature 1..1038: note = variant of RNA ligase 2 from Klebsiella phage KP179
  source 1..1038: mol_type = other DNA
atgcatcaccatcaccatcacggtggcagcaacatgtttgcgtattattcaagtctggaaaaccataccaatgccaagttcattagcaagatccgtggtgcaggcttcctggcgcacaccgtggaatgggtagctcgcgagaagattcatggaacgaactttagcgttatcattactccgaccgaaatccagccggccaaacgcacagggccgatcttggaagatgagagcttctttggtcatgaaattatcatgaaaaaatatatggactccttcgtgaaggtgcagaacatgctgaatgcgatggatcttgttagcgtgcaaatctttggcgaatttgcgggtggtggcattcagaaaggcgtcgattacggagacaaagatttctatgtgtttgacatcctgtctgatagcgggaacgagaaagtttactgggatgactatcgcgtcgaatcgttttgcaccactgtgggtctgaaattagcgcctctgctgggacgtggtagtttcgctgaactgtcccagtacccaaacgatttcaaaagcctggtgaaccgttataatgaattggttgacacggtcggcctggagatggccaataaacacgtctttggtccgcaagcgtcttctgaaactggcctggcagaaggctacgttcttaaacccgtctatccgcgcttctttaatgtgggtacgcgcgtggcgattaaatgcaagaactccaaattttcggagaaagccaaactgatttcgccaattaaagtgaaggttgaactgacggagaacgataaacgtctgctcggaatctttagcgaatatgttacctggaatcgcgtcagcaacgtactgtcacatattggctcagtgaccgccaaagattttgggcgtgtttcgggtctgacgatgaaagacatcattcgcgaagcagcacgcgaaggccatgatctgttgtctgctgataacccgtcggcggtgctgaaggagctgacaggcctcatccagaacacgattcgctccaaatggcacgaagttctggag

SEQ ID NO: 2020 - protein, 346 aa, synthetic construct
  REGION 1..346: note = variant of RNA ligase 2 from Klebsiella phage KP179
MHHHHHHGGSNMFAYYSSLENHTNAKFISKIRGAGFLAHTVEWVAREKIHGTNFSVIITPTEIQPAKRTGPILEDESFFGHEIIMKKYMDSFVKVQNMLNAMDLVSVQIFGEFAGGGIQKGVDYGDKDFYVFDILSDSGNEKVYWDDYRVESFCTTVGLKLAPLLGRGSFAELSQYPNDFKSLVNRYNELVDTVGLEMANKHVFGPQASSETGLAEGYVLKPVYPRFFNVGTRVAIKCKNSKFSEKAKLISPIKVKVELTENDKRLLGIFSEYVTWNRVSNVLSHIGSVTAKDFGRVSGLTMKDIIREAAREGHDLLSADNPSAVLKELTGLIQNTIRSKWHEVLE

SEQ ID NO: 2021 - DNA, 1038 bp, synthetic construct
  misc_feature 1..1038: note = variant of RNA ligase 2 from Klebsiella phage KP179
  source 1..1038: mol_type = other DNA
atgcatcaccatcaccatcacggtggcagcaacatgtttgcgtattattcaagtctggaaaaccataccaatgccaagttcattagcaagatccgtggtgcaggcttcctgatgcacaccgtggaatgggtagctcgcgagaagattcatggaacgaactttagcgttatcattactccgaccgaaatcgtgccggccaaacgcacagggccgatcttggaagatgagagcttctttggtcatgaaattatcatgaaaaaatatatggactccttcgtgaaggtgcagaacatgctgaatgcgatggatcttgttagcgtgcaaatctttggcgaatttgcgggtggtggcattcagaaaggcgtcgattacggagacaaagatttctatgtgtttgacatcctgtctgatagcgggaacgagaaagtttactgggatgactatcgcgtcgaatcgttttgcaccactgtgggtctgaaattagcgcctctgctgggacgtggtagtttcgctgaactgtcccagtacccaaacgatttcaaaagcctggtgaaccgttataatgaattggttgacacggtcggcctggagatggccaataaacacgtctttggtccgcaagcgtcttctgaaactggcctggcagaaggctacgttcttaaacccgtctatccgcgcttctttaatgtgggtacgcgcgtggcgattaaatgcaagaacggcaaattttcggagaaagccaaactgatttcgccaattaaatcgaaggttgaactgacggagaacgataaacgtctgctcggaatctttagcgaatatgttacctggaatcgcgtcaacaacgtactgtcacatattggctcagtgaccgccaaagattttgggcgtgtttcgggtctgacgatgaaagacatcattcgcgaagcagcacgcgaaggccatgatctgttgtctgctgataacccgtcggcggtgctgaaggagctgacaggcctcatccagaacacgattcgctccaaatggcacgaagttctggag

SEQ ID NO: 2022 - protein, 346 aa, synthetic construct
  REGION 1..346: note = variant of RNA ligase 2 from Klebsiella phage KP179
MHHHHHHGGSNMFAYYSSLENHTNAKFISKIRGAGFLMHTVEWVAREKIHGTNFSVIITPTEIVPAKRTGPILEDESFFGHEIIMKKYMDSFVKVQNMLNAMDLVSVQIFGEFAGGGIQKGVDYGDKDFYVFDILSDSGNEKVYWDDYRVESFCTTVGLKLAPLLGRGSFAELSQYPNDFKSLVNRYNELVDTVGLEMANKHVFGPQASSETGLAEGYVLKPVYPRFFNVGTRVAIKCKNGKFSEKAKLISPIKSKVELTENDKRLLGIFSEYVTWNRVNNVLSHIGSVTAKDFGRVSGLTMKDIIREAAREGHDLLSADNPSAVLKELTGLIQNTIRSKWHEVLE

SEQ ID NO: 2023 - DNA, 1038 bp, synthetic construct
  misc_feature 1..1038: note = variant of RNA ligase 2 from Klebsiella phage KP179
  source 1..1038: mol_type = other DNA
atgcatcaccatcaccatcacggtggcagcaacatgtttgcgtattattcaagtctggaaaaccataccaatgccaagttcattagcaagatccgtggtgcaggcttcctgatgcacaccgtggaatgggtagctcgcgagaagattcatggaacgaactttagcgttatcattactccgaccgaaatcgtgccggccaaacgcacagggccgatcttggaagatgagagcttctttggtcatgaaattatcatgaaaaaatatatggactccttcgtgaaggtgcagaacatgctgaatgcgatggatcttgttagcgtgcaaatctttggcgaatttgcgggtggtggcattcagaaaggcgtcgattacggagacaaagatttctatgtgtttgacatcctgtctgatagcgggaacgagaaagtttactgggatgactatcgcgtcgaatcgttttgcaccactgtgggtctgaaattagcgcctctgctgggacgtggtagtttcgctgaactgtcccagtacccaaacgatttcaaaagcctggtgaaccgttataatgaattggttgacacggtcggcctggagatggccaataaacacgtctttggtccgcaagcgtcttctgaaactggcctggcagaaggctacgttcttaaacccgtctatccgcgcttctttaatgtgggtacgcgcgtggcgattaaatgcaagaactccaaattttcggagaaagccaaactgatttcgccaattaaagtgaaggttgaactgacggagaacgataaacgtctgctcggaatctttagcgaatatgttacctggaatcgcgtcagtaacgtactgtcacatattggctcagtgaccgccaaagattttgggcgtgtttcgggtctgacgatgaaagacatcattcgcgaagcagcacgcgaaggccatgatctgttgtttgctgataacccgtcggcggtgctgaaggagctgacaggcctcatccagaacacgattcgctccaaatggcacgaagttctggag

SEQ ID NO: 2024 - protein, 346 aa, synthetic construct
  REGION 1..346: note = variant of RNA ligase 2 from Klebsiella phage KP179
MHHHHHHGGSNMFAYYSSLENHTNAKFISKIRGAGFLMHTVEWVAREKIHGTNFSVIITPTEIVPAKRTGPILEDESFFGHEIIMKKYMDSFVKVQNMLNAMDLVSVQIFGEFAGGGIQKGVDYGDKDFYVFDILSDSGNEKVYWDDYRVESFCTTVGLKLAPLLGRGSFAELSQYPNDFKSLVNRYNELVDTVGLEMANKHVFGPQASSETGLAEGYVLKPVYPRFFNVGTRVAIKCKNSKFSEKAKLISPIKVKVELTENDKRLLGIFSEYVTWNRVSNVLSHIGSVTAKDFGRVSGLTMKDIIREAAREGHDLLFADNPSAVLKELTGLIQNTIRSKWHEVLE

SEQ ID NO: 2025 - DNA, 1038 bp, synthetic construct
  misc_feature 1..1038: note = variant of RNA ligase 2 from Klebsiella phage KP179
  source 1..1038: mol_type = other DNA
atgcatcaccatcaccatcacggtggcagcaacatgtttgcgtattattcaagtctggaaaaccataccaatgccaagttcattagcaagatccgtggtgcaggcttcctggcgcacaccgtggaatgggtagctcgcgagaagattcatggaacgaactttagcgttatcattactccgaccgaaatcgtgccggccaaacgcacagggccgatcttggaagatgagagcttctttggtcatgaaattatcatggataaatatatggactccttcgtgaaggtgcagaacatgctgaatccgatggatcttgttagcgtgcaaatctttggcgaatttgcgggtggtggcattcagaaaggcgtcgattacggagacaaagatttctatgtgtttgacatcctgtctgatagcgggaacgagaaagtttactgggatgactatcgcgtcgaatcgttttgcaccactgtgggtctgaaattagcgcctctgctgggacgtggtagtttcgctgaactgtcccagtacccaaacgatttcaaaagcctggtgaaccgttataatgaattggttgacacggtcggcctggagatggccaataaacacgtctttggtccgcaagcgtcttctgaaactggcctggcagaaggctacgttcttaaacccgtctatccgcgcttctttaatgtgggtacgcgcgtggcgattaaatgcaagaacggcaaattttcggagaaagccaaactgatttcgccaattaaagcgaaggttgaactgacggagaacgataaacgtctgctcggaatctttagcgaatatgttacctggaatcgcgtcagcaacgtactgtcacatattggctcagtgaccgccaaagattttgggcgtgtttcgggtctgacgatgaaagacatcattcgcgaagcagcacgcgaaggccatgatctgttgtctgctgataacccgtcggcggtgctgaaggagctgacaggcctcatccagaacacgattcgctccaaatggcacgaagttctggag

SEQ ID NO: 2026 - protein, 346 aa, synthetic construct
  REGION 1..346: note = variant of RNA ligase 2 from Klebsiella phage KP179
MHHHHHHGGSNMFAYYSSLENHTNAKFISKIRGAGFLAHTVEWVAREKIHGTNFSVIITPTEIVPAKRTGPILEDESFFGHEIIMDKYMDSFVKVQNMLNPMDLVSVQIFGEFAGGGIQKGVDYGDKDFYVFDILSDSGNEKVYWDDYRVESFCTTVGLKLAPLLGRGSFAELSQYPNDFKSLVNRYNELVDTVGLEMANKHVFGPQASSETGLAEGYVLKPVYPRFFNVGTRVAIKCKNGKFSEKAKLISPIKAKVELTENDKRLLGIFSEYVTWNRVSNVLSHIGSVTAKDFGRVSGLTMKDIIREAAREGHDLLSADNPSAVLKELTGLIQNTIRSKWHEVLE

SEQ ID NO: 2027 - DNA, 1038 bp, synthetic construct
  misc_feature 1..1038: note = variant of RNA ligase 2 from Klebsiella phage KP179
  source 1..1038: mol_type = other DNA
atgcatcaccatcaccatcacggtggcagcaacatgtttgcgtattattcaagtctggaaaaccataccaatgccaagttcattagcaagatccgtggtgcaggcttcctggcgcacaccgtggaatgggtagctcgcgagaagattcatggaacgaactttagcgttatcattactccgaccgaaatcgtgccggccaaacgcacagggccgatcttggaagatgagagcttctttggtcatgaaattatcatgaaaaaatatatggactccttcgtgaaggtgcagaacatgctgaatgcgatggatcttgttagcgtgcaaatctttggcgaatttgcgggtggtggcattcagaaaggcgtcgattacggagacaaagatttctatgtgtttgacatcctgtctgatagcgggaacgagaaagtttactgggatgactatcgcgtcgaatcgttttgcaccactgtgggtctgaaattagcgcctctgctgggacgtggtagtttcgctgaactgtcccagtacccaaacgatttcaaaagcctggtgaaccgttataatgaattggttgacacggtcggcctggagatggccaataaacacgtctttggtccgcaagcgtcttctgaaactggcctggcagaaggctacgttcttaaacccgtctatccgcgcttctttaatgtgggtacgcgcgtggcgattaaatgcaagaacggcaaattttcggagaaagccaaactgatttcgccaattaaagcgaaggttgaactgacggagaacgataaacgtctgctcggaatctttagcgaatatgttacctggaatcgcgtcagtaacgtactgtcacatattggctcagtgaccgccaaagattttgggcgtgtttcgggtctgacgatgaaagacatcattcgcgaagcagcacgcgaaggccatgatctgttgtttgctgataacccgtcggcggtgctgaaggagctgacaggcctcatccagaacacgattcgctccaaatggcacgaagttctggag

SEQ ID NO: 2028 - protein, 346 aa, synthetic construct
  REGION 1..346: note = variant of RNA ligase 2 from Klebsiella phage KP179
MHHHHHHGGSNMFAYYSSLENHTNAKFISKIRGAGFLAHTVEWVAREKIHGTNFSVIITPTEIVPAKRTGPILEDESFFGHEIIMKKYMDSFVKVQNMLNAMDLVSVQIFGEFAGGGIQKGVDYGDKDFYVFDILSDSGNEKVYWDDYRVESFCTTVGLKLAPLLGRGSFAELSQYPNDFKSLVNRYNELVDTVGLEMANKHVFGPQASSETGLAEGYVLKPVYPRFFNVGTRVAIKCKNGKFSEKAKLISPIKAKVELTENDKRLLGIFSEYVTWNRVSNVLSHIGSVTAKDFGRVSGLTMKDIIREAAREGHDLLFADNPSAVLKELTGLIQNTIRSKWHEVLE

SEQ ID NO: 2029 - DNA, 1038 bp, synthetic construct
  misc_feature 1..1038: note = variant of RNA ligase 2 from Klebsiella phage KP179
  source 1..1038: mol_type = other DNA
atgcatcaccatcaccatcacggtggcagcaacatgtttgcgtattattcaagtctggaaaaccataccaatgccaagttcattagcaagatccgtggtgcaggcttcctggcgcacaccgtggaatgggtagctcgcgagaagattcatggaacgaactttagcgttatcattactccgaccgaaatcgtgccggccaaacgcacagggccgatcttggaagatgagagcttctttggtcatgaaattatcatgaaaaaatatatggactccttcgtgaaggtgcagaacatgctgaatgcgatggatcttgttagcgtgcaaatctttggcgaatttgcgggtggtggcattcagaaaggcgtcgattacggagacaaagatttctatgtgtttgacatcctgtctgatagcgggaacgagaaagtttactgggatgactatcgcgtcgaatcgttttgcaccactgtgggtctgaaattagcgcctctgctgggacgtggtagtttcgctgaactgtcccagtacccaaacgatttcaaaagcctggtgaaccgttataatgaattggttgacacggtcggcctggagatggccaataaacacgtctttggtccgcaagcgtcttctgaaactggcctggcagaaggctacgttcttaaacccgtctatccgcgcttctttaatgtgggtacgcgcgtggcgattaaatgcaagaactccaaattttcggagaaagccaaactgatttcgccaattaaatcgaaggttgaactgacggagaacgataaacgtctgctcggaatctttagcgaatatgttacctggaatcgcgtcagtaacgtactgtcacatattggctcagtgaccgccaaagattttgggcgtgtttcgggtctgacgatgaaagacatcattcgcgaagcagcacgcgaaggccatgatctgttgtctgctgataacccgtcggcggtgctgaaggagctgacaggcctcatccagcagacgattcgctccaaatggcacgaagttctggag

SEQ ID NO: 2030 - protein, 346 aa, synthetic construct
  REGION 1..346: note = variant of RNA ligase 2 from Klebsiella phage KP179
MHHHHHHGGSNMFAYYSSLENHTNAKFISKIRGAGFLAHTVEWVAREKIHGTNFSVIITPTEIVPAKRTGPILEDESFFGHEIIMKKYMDSFVKVQNMLNAMDLVSVQIFGEFAGGGIQKGVDYGDKDFYVFDILSDSGNEKVYWDDYRVESFCTTVGLKLAPLLGRGSFAELSQYPNDFKSLVNRYNELVDTVGLEMANKHVFGPQASSETGLAEGYVLKPVYPRFFNVGTRVAIKCKNSKFSEKAKLISPIKSKVELTENDKRLLGIFSEYVTWNRVSNVLSHIGSVTAKDFGRVSGLTMKDIIREAAREGHDLLSADNPSAVLKELTGLIQQTIRSKWHEVLE

SEQ ID NO: 2031 - DNA, 1038 bp, synthetic construct
  misc_feature 1..1038: note = variant of RNA ligase 2 from Klebsiella phage KP179
  source 1..1038: mol_type = other DNA
atgcatcaccatcaccatcacggtggcagcaacatgtttgcgtattattcaagtctggaaaaccataccaatgccaagttcattagcaagatccgtggtgcaggcttcctggcgcacaccgtggaatgggtagctcgcgagaagattcatggaacgaactttagcgttatcattactccgaccgaaatccagccggccaaacgcacagggccgatcttggaagatgagagcttctttggtcatgaaattatcatgaaaaaatatatggactccttcgtgaaggtgcagaacatgctgaatccgatggatcttgttagcgtgcaaatctttggcgaatttgcgggtggtggcattcagaaaggcgtcgattacggagacaaagatttctatgtgtttgacatcctgtctgatagcgggaacgagaaagtttactgggatgactatcgcgtcgaatcgttttgcaccactgtgggtctgaaattagcgcctctgctgggacgtggtagtttcgctgaactgtcccagtacccaaacgatttcaaaagcctggtgaaccgttataatgaattggttgacacggtcggcctggagatggccaataaacacgtctttggtccgcaagcgtcttctgaaactggcctggcagaaggctacgttcttaaacccgtctatccgcgcttctttaatgtgggtacgcgcgtggcgattaaatgcaagaactccaaattttcggagaaagccaaactgatttcgccaattaaagcgaaggttgaactgacggagaacgataaacgtctgctcggaatctttagcgaatatgttacctggaatcgcgtcagtaacgtactgtcacatattggctcagtgaccgccaaagattttgggcgtgtttcgggtctgacgatgaaagacatcattcgcgaagcagcacgcgaaggccatgatctgttgtctgctgataacccgtcggcggtgctgaaggagctgacaggcctcatccagaacacgattcgctccaaatggcacgaagttctggag

SEQ ID NO: 2032 - protein, 346 aa, synthetic construct
  REGION 1..346: note = variant of RNA ligase 2 from Klebsiella phage KP179
MHHHHHHGGSNMFAYYSSLENHTNAKFISKIRGAGFLAHTVEWVAREKIHGTNFSVIITPTEIQPAKRTGPILEDESFFGHEIIMKKYMDSFVKVQNMLNPMDLVSVQIFGEFAGGGIQKGVDYGDKDFYVFDILSDSGNEKVYWDDYRVESFCTTVGLKLAPLLGRGSFAELSQYPNDFKSLVNRYNELVDTVGLEMANKHVFGPQASSETGLAEGYVLKPVYPRFFNVGTRVAIKCKNSKFSEKAKLISPIKAKVELTENDKRLLGIFSEYVTWNRVSNVLSHIGSVTAKDFGRVSGLTMKDIIREAAREGHDLLSADNPSAVLKELTGLIQNTIRSKWHEVLE

SEQ ID NO: 2033 - DNA, 1038 bp, synthetic construct
  misc_feature 1..1038: note = variant of RNA ligase 2 from Klebsiella phage KP179
  source 1..1038: mol_type = other DNA
atgcatcaccatcaccatcacggtggcagcaacatgtttgcgtattattcaagtctggaaaaccataccaatgccaagttcattagcaagatccgtggtgcaggcttcctggcgcacaccgtggaatgggtagctcgcgagaagattcatggaacgaactttagcgttatcattactccgaccgaaatccagccggccaaacgcacagggccgatcttggaagatgagagcttctttggtcatgaaattatcatgaaaaaatatatggactccttcgtgaaggtgcagaacatgctgaatgcgatggatcttgttagcgtgcaaatctttggcgaatttgcgggtggtggcattcagaaaggcgtcgattacggagacaaagatttctatgtgtttgacatcctgtctgatagcgggaacgagaaagtttactgggatgactatcgcgtcgaatcgttttgcaccactgtgggtctgaaattagcgcctctgctgggacgtggtagtttcgctgaactgtcccagtacccaaacgatttcaaaagcctggtgaaccgttataatgaattggttgacacggtcggcctggagatggccaataaacacgtctttggtccgcaagcgtcttctgaaactggcctggcagaaggctacgttcttaaacccgtctatccgcgcttctttaatgtgggtacgcgcgtggcgattaaatgcaagaactccaaattttcggagaaagccaaactgatttcgccaattaaagtgaaggttgaactgacggagaacgataaacgtctgctcggaatctttagcgaatatgttacctggaatcgcgtcaacaacgtactgtcacatattggctcagtgaccgccaaagattttgggcgtgtttcgggtctgacgatgaaagacatcattcgcgaagcagcacgcgaaggccatgatctgttgtctgctgataacccgtcggcggtgctgaaggagctgacaggcctcatccagaacacgattcgctccaaatggcacgaagttctggag

SEQ ID NO: 2034 - protein, 346 aa, synthetic construct
  REGION 1..346: note = variant of RNA ligase 2 from Klebsiella phage KP179
MHHHHHHGGSNMFAYYSSLENHTNAKFISKIRGAGFLAHTVEWVAREKIHGTNFSVIITPTEIQPAKRTGPILEDESFFGHEIIMKKYMDSFVKVQNMLNAMDLVSVQIFGEFAGGGIQKGVDYGDKDFYVFDILSDSGNEKVYWDDYRVESFCTTVGLKLAPLLGRGSFAELSQYPNDFKSLVNRYNELVDTVGLEMANKHVFGPQASSETGLAEGYVLKPVYPRFFNVGTRVAIKCKNSKFSEKAKLISPIKVKVELTENDKRLLGIFSEYVTWNRVNNVLSHIGSVTAKDFGRVSGLTMKDIIREAAREGHDLLSADNPSAVLKELTGLIQNTIRSKWHEVLE

SEQ ID NO: 2035 - DNA, 1038 bp, synthetic construct
  misc_feature 1..1038: note = variant of RNA ligase 2 from Klebsiella phage KP179
  source 1..1038: mol_type = other DNA
atgcatcaccatcaccatcacggtggcagcaacatgtttgcgtattattcaagtctggaaaaccataccaatgccaagttcattagcaagatccgtggtgcaggcttcctgatgcacaccgtggaatgggtagctcgcgagaagattcatggaacgaactttagcgttatcattactccgaccgaaatcgtgccggccaaacgcacagggccgatcttggaagatgagagcttctttggtcatgaaattatcatgaaaaaatatatggactccttcgtgaaggtgcagaacatgctgaatgcgatggatcttgttagcgtgcaaatctttggcgaatttgcgggtggtggcattcagaaaggcgtcgattacggagacaaagatttctatgtgtttgacatcctgtctgatagcgggaacgagaaagtttactgggatgactatcgcgtcgaatcgttttgcaccactgtgggtctgaaattagcgcctctgctgggacgtggtagtttcgctgaactgtcccagtacccaaacgatttcaaaagcctggtgaaccgttataatgaattggttgacacggtcggcctggagatggccaataaacacgtctttggtccgcaagcgtcttctgaaactggcctggcagaaggctacgttcttaaacccgtctatccgcgcttctttaatgtgggtacgcgcgtggcgattaaatgcaagaacggcaaattttcggagaaagccaaactgatttcgccaattaaatcgaaggttgaactgacggagaacgataaacgtctgctcggaatctttagcgaatatgttacctggaatcgcgtcagcaacgtactgtcacatattggctcagtgaccgccaaagattttgggcgtgtttcgggtctgacgatgaaagacatcattcgcgaagcagcacgcgaaggccatgatctgttgtctgctgataacccgtcggcggtgctgaaggagctgacaggcctcatccagaacacgattcgctccaaatggcacgaagttctggag

SEQ ID NO: 2036 - protein, 346 aa, synthetic construct
  REGION 1..346: note = variant of RNA ligase 2 from Klebsiella phage KP179
MHHHHHHGGSNMFAYYSSLENHTNAKFISKIRGAGFLMHTVEWVAREKIHGTNFSVIITPTEIVPAKRTGPILEDESFFGHEIIMKKYMDSFVKVQNMLNAMDLVSVQIFGEFAGGGIQKGVDYGDKDFYVFDILSDSGNEKVYWDDYRVESFCTTVGLKLAPLLGRGSFAELSQYPNDFKSLVNRYNELVDTVGLEMANKHVFGPQASSETGLAEGYVLKPVYPRFFNVGTRVAIKCKNGKFSEKAKLISPIKSKVELTENDKRLLGIFSEYVTWNRVSNVLSHIGSVTAKDFGRVSGLTMKDIIREAAREGHDLLSADNPSAVLKELTGLIQNTIRSKWHEVLE

SEQ ID NO: 2037 - DNA, 1038 bp, synthetic construct
  misc_feature 1..1038: note = variant of RNA ligase 2 from Klebsiella phage KP179
  source 1..1038: mol_type = other DNA
atgcatcaccatcaccatcacggtggcagcaacatgtttgcgtattattcaagtctggaaaaccataccaatgccaagttcattagcaagatccgtggtgcaggcttcctggcgcacaccgtggaatgggtagctcgcgagaagattcatggaacgaactttagcgttatcattactccgaccgaaatcgtgccggccaaacgcacagggccgatcttggaagatgagagcttctttggtcatgaaattatcatgaaaaaatatatggactccttcgtgaaggtgcagaacatgctgaatgcgatggatcttgttagcgtgcaaatctttggcgaatttgcgggtggtggcattcagaaaggcgtcgattacggagacaaagatttctatgtgtttgacatcctgtctgatagcgggaacgagaaagtttactgggatgactatcgcgtcgaatcgttttgcaccactgtgggtctgaaattagcgcctctgctgggacgtggtagtttcgctgaactgtcccagtacccaaacgatttcaaaagcctggtgaaccgttataatgaattggttgacacggtcggcctggagatggccaataaacacgtctttggtccgcaagcgtcttctgaaactggcctggcagaaggctacgttcttaaacccgtctatccgcgcttctttaatgtgggtacgcgcgtggcgattaaatgcaagaacggcaaattttcggagaaagccaaactgatttcgccaattaaagcgaaggttgaactgacggagaacgataaacgtctgctcggaatctttagcgaatatgttacctggaatcgcgtcagtaacgtactgtcacatattggctcagtgaccgccaaagattttgggcgtgtttcgggtctgacgatgaaagacatcattcgcgaagcagcacgcgaaggccatgatctgttgtttgctgataacccgtcggcggtgctgaaggagctgacaggcctcatccagcagacgattcgctccaaatggcacgaagttctggag

SEQ ID NO: 2038 - protein, 346 aa, synthetic construct
  REGION 1..346: note = variant of RNA ligase 2 from Klebsiella phage KP179
MHHHHHHGGSNMFAYYSSLENHTNAKFISKIRGAGFLAHTVEWVAREKIHGTNFSVIITPTEIVPAKRTGPILEDESFFGHEIIMKKYMDSFVKVQNMLNAMDLVSVQIFGEFAGGGIQKGVDYGDKDFYVFDILSDSGNEKVYWDDYRVESFCTTVGLKLAPLLGRGSFAELSQYPNDFKSLVNRYNELVDTVGLEMANKHVFGPQASSETGLAEGYVLKPVYPRFFNVGTRVAIKCKNGKFSEKAKLISPIKAKVELTENDKRLLGIFSEYVTWNRVSNVLSHIGSVTAKDFGRVSGLTMKDIIREAAREGHDLLFADNPSAVLKELTGLIQQTIRSKWHEVLE

SEQ ID NO: 2039 - DNA, 1038 bp, synthetic construct
  misc_feature 1..1038: note = variant of RNA ligase 2 from Klebsiella phage KP179
  source 1..1038: mol_type = other DNA
atgcatcaccatcaccatcacggtggcagcaacatgtttgcgtattattcaagtctggaaaaccataccaatgccaagttcattagcaagatccgtggtgcaggcttcctgagccacaccgtggaatgggtagctcgcgagaagattcatggaacgaactttagcgttatcattactccgaccgaaatcgtgccagccaaacgcacagggccgatcttggaagacgagagcttctttggtcatgaaattatcatgaaaaaatatatggactccttcgtgaaggtgcagaacatgctgaatgcgatggatcttgttagcgtgcaaatctttggcgaatttgcgggtggtggcattcagaaaggcgtcgattacggagacaaagatttctatgtgtttgacatcctgtctgatagcgggaacgagaaagtttactgggatgactatcgcgtcgaatcgttttgcaccactgtgggtctgaaattagcgcctctgctgggacgtggtagtttcgctgaactgtcccagtacccaaacgatttcaaaagcctggtgaaccgttataatgaattggttgaaacggtcggcctggagatggccaataaacacgtctttggtccgcaagcgtcttctgaaactggcctggcagaaggctacgttcttaaacccgtctatccgcgcttttttaatgtgggtaaccgcgtggcgattaaatgcaagaactccaaattttcggagaaagcctttctgattgaaccaattaaagcgaaggttgaactgacggagaacgataaacgtctgctcggaatctttagcgaatatgttacctggaaccgcgtcagtaacgtactgtcacatattggctcagtgaccaccaaagattttgggcgtgtttcgggtctgacgatgaaagacatccttcgcgaagcagcacgcgaaggccatgatctgttgttcgctgataacccgtcggcggtgctgaaggagctgacaggcctcatccagaacacgattcgctccaaatggcacgaagttctggag

SEQ ID NO: 2040 - protein, 346 aa, synthetic construct
  REGION 1..346: note = variant of RNA ligase 2 from Klebsiella phage KP179
MHHHHHHGGSNMFAYYSSLENHTNAKFISKIRGAGFLSHTVEWVAREKIHGTNFSVIITPTEIVPAKRTGPILEDESFFGHEIIMKKYMDSFVKVQNMLNAMDLVSVQIFGEFAGGGIQKGVDYGDKDFYVFDILSDSGNEKVYWDDYRVESFCTTVGLKLAPLLGRGSFAELSQYPNDFKSLVNRYNELVETVGLEMANKHVFGPQASSETGLAEGYVLKPVYPRFFNVGNRVAIKCKNSKFSEKAFLIEPIKAKVELTENDKRLLGIFSEYVTWNRVSNVLSHIGSVTTKDFGRVSGLTMKDILREAAREGHDLLFADNPSAVLKELTGLIQNTIRSKWHEVLE

SEQ ID NO: 2041 - DNA, 1038 bp, synthetic construct
  misc_feature 1..1038: note = variant of RNA ligase 2 from Klebsiella phage KP179
  source 1..1038: mol_type = other DNA
atgcatcaccatcaccatcacggtggcagcaacatgtttgcgtattattcaagtctggaaaaccataccaatgccaagttcattagcaagatccgtggtgcaggcttcctgagccacaccgtggaatgggtagctcgcgagaagattcatggaacgaactttagcgttatcattactccgaccgaaatcgtgccagccaaacgcacagggccgatcttggaagacgagagcttctttggtcatgaaattatcatgaaaaaatatatggactccttcgtgaaggtgcagaacatgctgaatgcgatggatcttgttagcgtgcaaatctttggcgaatttgcgggtggtggcattcagaaaggcgtcgattacggagacaaagatttctatgtgtttgacatcctgtctgatagcgggaacgagaaagtttactgggatgactatcgcgtcgaatcgttttgcaccactgtgggtctgaaattagcgcctctgctgggacgtggtagtttcgctgaactgtcccagtacccaaacgatttcaaaagcctggtgaaccgttataatgaattggttgaaacggtcggcctggagatggccaataaacacgtctttggtccgcaagcgtcttctgaaactggcctggcagaaggctacgttcttaaacccgtctatccgcgcttttttaatgtgggtaaccgcgtggcgattaaatgcaagaactccaaattttcggagaaagcctttctgattgaaccaattaaagcgaaggtggaactgacggagaacgataaacgtctgctcggaatctttagcgaatatgttacctggaaccgcgtcaacaacgtactgtcacatattggctcagtgaccgccaaagattttgggcgtgtttcgggtctgacgatgaaagacatccttcgcgaagcagcacgcgaaggccatgatctgttgttcgctgataacccgtcggcggtgctgaaggagctgacaggcctcatccagaacacgattcgctccaaatggcacgaagttctggag

SEQ ID NO: 2042 - protein, 346 aa, synthetic construct
  REGION 1..346: note = variant of RNA ligase 2 from Klebsiella phage KP179
MHHHHHHGGSNMFAYYSSLENHTNAKFISKIRGAGFLSHTVEWVAREKIHGTNFSVIITPTEIVPAKRTGPILEDESFFGHEIIMKKYMDSFVKVQNMLNAMDLVSVQIFGEFAGGGIQKGVDYGDKDFYVFDILSDSGNEKVYWDDYRVESFCTTVGLKLAPLLGRGSFAELSQYPNDFKSLVNRYNELVETVGLEMANKHVFGPQASSETGLAEGYVLKPVYPRFFNVGNRVAIKCKNSKFSEKAFLIEPIKAKVELTENDKRLLGIFSEYVTWNRVNNVLSHIGSVTAKDFGRVSGLTMKDILREAAREGHDLLFADNPSAVLKELTGLIQNTIRSKWHEVLE

SEQ ID NO: 2043 - DNA, 1038 bp, synthetic construct
  misc_feature 1..1038: note = variant of RNA ligase 2 from Klebsiella phage KP179
  source 1..1038: mol_type = other DNA
atgcatcaccatcaccatcacggtggcagcaacatgtttgcgtattattcaagtctggaaaaccataccaatgccaagttcattagcaagatccgtggtgcaggcttcctgagccacaccgtggaatgggtagctcgcgagaagattcatggaacgaactttagcgttatcattactccgaccgaaatcgtgccagccaaacgcacagggccgatcttggaagacgagagcttctttggtcatgaaattatcatgaaaaaatatatggactccttcgtgaaggtgcagaacatgctgaatgcgatggatcttgttagcgtgcaaatctttggcgaatttgcgggtggtggcattcagaaaggcgtcgattacggagacaaagatttctatgtgtttgacatcctgtctgatagcgggaacgagaaagtttactgggatgactatcgcgtcgaatcgttttgcaccactgtgggtctgaaattagcgcctctgctgggacgtggtagtttcgctgaactgtcccagtacccaaacgatttcaaaagcctggtgaaccgttataatgaattggttgaaacggtcggcctggagatggccaataaacacgtctttggtccgcaagcgtcttctgaaactggcctggcagaaggctacgttcttaaacccgtctatccgcgcttttttaatgtgggtacccgcgtggcgattaaatgcaagaacggcaaattttcggagaaagcctttctgattgaaccaattaaagcgaaggaggaactgacggagaacgataaacgtctgctcggaatctttagcgaatatgttacctggaaccgcgtcagtaacgtactgtcacatattggctcagtgaccgccaaagattttgggcgtgtttcgggtctgacgatgaaagacatccttcgcgaagcagcacgcgaaggccatgatctgttgttcgctgataacccgtcggcggtgctgaaggagctgacaggcctcatccagcagacgattcgctccaaatggcacgaagttctggag

SEQ ID NO: 2044 - protein, 346 aa, synthetic construct
  REGION 1..346: note = variant of RNA ligase 2 from Klebsiella phage KP179
MHHHHHHGGSNMFAYYSSLENHTNAKFISKIRGAGFLSHTVEWVAREKIHGTNFSVIITPTEIVPAKRTGPILEDESFFGHEIIMKKYMDSFVKVQNMLNAMDLVSVQIFGEFAGGGIQKGVDYGDKDFYVFDILSDSGNEKVYWDDYRVESFCTTVGLKLAPLLGRGSFAELSQYPNDFKSLVNRYNELVETVGLEMANKHVFGPQASSETGLAEGYVLKPVYPRFFNVGTRVAIKCKNGKFSEKAFLIEPIKAKEELTENDKRLLGIFSEYVTWNRVSNVLSHIGSVTAKDFGRVSGLTMKDILREAAREGHDLLFADNPSAVLKELTGLIQQTIRSKWHEVLE

SEQ ID NO: 2045 - DNA, 1038 bp, synthetic construct
  misc_feature 1..1038: note = variant of RNA ligase 2 from Klebsiella phage KP179
  source 1..1038: mol_type = other DNA
atgcatcaccatcaccatcacggtggcagcaacatgtttgcgtattattcaagtctggaaaaccataccaatgccaagttcattagcaagatccgtggtgcaggcttcctgagccacaccgtggaatgggtagctcgcgagaagattcatggaacgaactttagcgttatcattactccgaccgaaatcgtgccagccaaacgcacagggccgatcttggaagacgagagcttctttggtcatgaaattatcatgaaaaaatatatggactccttcaaaaaggtgcagaacatgctgaatgcgatggatcttgttagcgtgcaaatctttggcgaatttgcgggtggtggcattcagaaaggcgtcgattacggagacaaagatttctatgtgtttgacatcctgtctgatagcgggaacgagaaagtttactgggatgactatcgcgtcgaatcgttttgcaccactgtgggtctgaaattagcgcctctgctgggacgtggtagtttcgctgaactgtcccagtacccaaacgatttcaaaagcctggtgaaccgttataatgaattggttgaaacggtcggcctggagatggccaataaacacgtctttggtccgcaagcgtcttctgaaactggcctggcagaaggctacgttcttaaacccgtctatccgcgcttttttaatgtgggtaaccgcgtggcgattaaatgcaagaacagcaaattttcggagaaagcctttctgattgaaccaattaaagcgaaggttgaactgacggagaacgataaacgtctgctcggaatctttagcgaatatgttacctggaaccgcgtcaacaacgtactgtcacatattggctcagtgaccgccaaagattttgggcgtgtttcgggtctgacgatgaaagacatcattcgcgaagcagcacgcgaaggccatgatctgttgttcgctgataacccgtcggcggtgctgaaggagctgacaggcctcatccagaacacgattcgctccaaatggcacgaagttctggag

SEQ ID NO: 2046 - protein, 346 aa, synthetic construct
  REGION 1..346: note = variant of RNA ligase 2 from Klebsiella phage KP179
MHHHHHHGGSNMFAYYSSLENHTNAKFISKIRGAGFLSHTVEWVAREKIHGTNFSVIITPTEIVPAKRTGPILEDESFFGHEIIMKKYMDSFKKVQNMLNAMDLVSVQIFGEFAGGGIQKGVDYGDKDFYVFDILSDSGNEKVYWDDYRVESFCTTVGLKLAPLLGRGSFAELSQYPNDFKSLVNRYNELVETVGLEMANKHVFGPQASSETGLAEGYVLKPVYPRFFNVGNRVAIKCKNSKFSEKAFLIEPIKAKVELTENDKRLLGIFSEYVTWNRVNNVLSHIGSVTAKDFGRVSGLTMKDIIREAAREGHDLLFADNPSAVLKELTGLIQNTIRSKWHEVLE

SEQ ID NO: 2047 - DNA, 1038 bp, synthetic construct
  misc_feature 1..1038: note = variant of RNA ligase 2 from Klebsiella phage KP179
  source 1..1038: mol_type = other DNA
atgcatcaccatcaccatcacggtggcagcaacatgtttgcgtattattcaagtctggaaaaccataccaatgccaagttcattagcaagatccgtggtgcaggcttcctgagccacaccgtggaatgggtagctcgcgagaagattcatggaacgaactttagcgttatcattactccgaccgaaatcgtgccagccaaacgcacagggccgatcttggaagacgagagcttctttggtcatgaaattatcatgaaaaaatatatggactccttcgtgaaggtgcagaacatgctgaatgcgatggatcttgttagcgtgcaaatctttggcgaatttgcgggtggtggcattcagaaaggcgtcgattacggagacaaagatttctatgtgtttgacatcctgtctgatagcgggaacgagaaagtttactgggatgactatcgcgtcgaatcgttttgcaccactgtgggtctgaaattagcgcctctgctgggacgtggtagtttcgctgaactgtcccagtacccaaacgatttcaaaagcctggtgaaccgttataatgaattggttgaaacggtcggcctggagatggccaataaacacgtctttggtccgcaagcgtcttctgaaactggcctggcagaaggctacgttcttaaacccgtctatccgcgcttttttaatgtgggtacccgcgtggcgattaaatgcaagaactccaaattttcggagaaagcctttctgattgaaccaattaaagcgaaggttgaactgacggagaacgataaacgtctgctcggaatctttagcgaatatgttacctggaaccgcgtcagtaacgtactgtcacatattggctcagtgaccaccaaagattttgggcgtgtttcgggtctgacgatgaaagacatccttcgcgaagcagcacgcgaaggccatgatctgttgttcgctgataacccgtcggcggtgctgaaggagctgacaggcctcatccagaacacgattcgctccaaatggcacgaagttctggag

SEQ ID NO: 2048 - protein, 346 aa, synthetic construct
  REGION 1..346: note = variant of RNA ligase 2 from Klebsiella phage KP179
MHHHHHHGGSNMFAYYSSLENHTNAKFISKIRGAGFLSHTVEWVAREKIHGTNFSVIITPTEIVPAKRTGPILEDESFFGHEIIMKKYMDSFVKVQNMLNAMDLVSVQIFGEFAGGGIQKGVDYGDKDFYVFDILSDSGNEKVYWDDYRVESFCTTVGLKLAPLLGRGSFAELSQYPNDFKSLVNRYNELVETVGLEMANKHVFGPQASSETGLAEGYVLKPVYPRFFNVGTRVAIKCKNSKFSEKAFLIEPIKAKVELTENDKRLLGIFSEYVTWNRVSNVLSHIGSVTTKDFGRVSGLTMKDILREAAREGHDLLFADNPSAVLKELTGLIQNTIRSKWHEVLE

SEQ ID NO: 2049 - DNA, 1038 bp, synthetic construct
  misc_feature 1..1038: note = variant of RNA ligase 2 from Klebsiella phage KP179
  source 1..1038: mol_type = other DNA
atgcatcaccatcaccatcacggtggcagcaacatgtttgcgtattattcaagtctggaaaaccataccaatgccaagttcattagcaagatccgtggtgcaggcttcctgagccacaccgtggaatgggtagctcgcgagaagattcatggaacgaactttagcgttatcattactccgaccgaaatcgtgccagccaaacgcacagggccgatcttggaagacgagagcttctttggtcatgaaattatcatgaaaaaatatatggactccttcgtgaaggtgcagaacatgctgaatgcgatggatcttgttagcgtgcaaatctttggcgaatttgcgggtggtggcattcagaaaggcgtcgattacggagacaaagatttctatgtgtttgacatcctgtctgatagcgggaacgagaaagtttactgggatgactatcgcgtcgaatcgttttgcaccactgtgggtctgaaattagcgcctctgctgggacgtggtagtttcgctgaactgtcccagtacccaaacgatttcaaaagcctggtgaaccgttataatgaattggttgaaacggtcggcctggagatggccaataaacacgtctttggtccgcaagcgtcttctgaaactggcctggcagaaggctacgttcttaaacccgtctatccgcgcttctttaatgtgggtacgcgcgtggcgattaaatgcaagaactccaaattttcggagaaagcctttctgattgaaccaattaaagcgaaggaggaactgacggagaacgataaacgtctgctcggaatctttagcgaatatgttacctggaaccgcgtcagcaacgtactgtcacatattggctcagtgaccgccaaagattttgggcgtgtttcgggtctgacgatgaaagacatcattcgcgaagcagcacgcgaaggccatgatctgttgttcgctgataacccgtcggcggtgctgaaggagctgacaggcctcatccagaacacgattcgctccaaatggcacgaagttctggag

SEQ ID NO: 2050 - protein, 346 aa, synthetic construct
  REGION 1..346: note = variant of RNA ligase 2 from Klebsiella phage KP179
MHHHHHHGGSNMFAYYSSLENHTNAKFISKIRGAGFLSHTVEWVAREKIHGTNFSVIITPTEIVPAKRTGPILEDESFFGHEIIMKKYMDSFVKVQNMLNAMDLVSVQIFGEFAGGGIQKGVDYGDKDFYVFDILSDSGNEKVYWDDYRVESFCTTVGLKLAPLLGRGSFAELSQYPNDFKSLVNRYNELVETVGLEMANKHVFGPQASSETGLAEGYVLKPVYPRFFNVGTRVAIKCKNSKFSEKAFLIEPIKAKEELTENDKRLLGIFSEYVTWNRVSNVLSHIGSVTAKDFGRVSGLTMKDIIREAAREGHDLLFADNPSAVLKELTGLIQNTIRSKWHEVLE

SEQ ID NO: 2051 - DNA, 1038 bp, synthetic construct
  misc_feature 1..1038: note = variant of RNA ligase 2 from Klebsiella phage KP179
  source 1..1038: mol_type = other DNA
atgcatcaccatcaccatcacggtggcagcaacatgtttgcgtattattcaagtctggaaaaccataccaatgccaagttcattagcaagatccgtggtgcaggcttcctgagccacaccgtggaatgggtagctcgcgagaagattcatggaacgaactttagcgttatcattactccgaccgaaatcgtgccagccaaacgcacagggccgatcttggaagacgagagcttctttggtcatgaaattatcatgaaaaaatatatggactccttcgtgaaggtgcagaacatgctgaatgcgatggatcttgttagcgtgcaaatctttggcgaatttgcgggtggtggcattcagaaaggcgtcgattacggagacaaagatttctatgtgtttgacatcctgtctgatagcgggaacgagaaagtttactgggatgactatcgcgtcgaatcgttttgcaccactgtgggtctgaaattagcgcctctgctgggacgtggtagtttcgctgaactgtcccagtacccaaacgatttcaaaagcctggtgaaccgttataatgaattggttgaaacggtcggcctggagatggccaataaacacgtctttggtccgcaagcgtcttctgaaactggcctggcagaaggctacgttcttaaacccgtctatccgcgcttctttaatgtgggtacgcgcgtggcgattaaatgcaagaactccaaattttcggagaaagcctttctgattgaaccaattaaagcgaaggttgaactgacggagaacgataaacgtctgctcggaatctttagcgaatatgttacctggaaccgcgtcagtaacgtactgtcacatattggctcagtgaccgccaaagattttgggcgtgtttcgggtctgacgatgaaagacatccttcgcgaagcagcacgcgaaggccatgatctgttgttcgctgataacccgtcggcggtgctgaaggagctgacaggcctcatccagaacacgattcgctccaaatggcacgaagttctggag

SEQ ID NO: 2052 - protein, 346 aa, synthetic construct
  REGION 1..346: note = variant of RNA ligase 2 from Klebsiella phage KP179
MHHHHHHGGSNMFAYYSSLENHTNAKFISKIRGAGFLSHTVEWVAREKIHGTNFSVIITPTEIVPAKRTGPILEDESFFGHEIIMKKYMDSFVKVQNMLNAMDLVSVQIFGEFAGGGIQKGVDYGDKDFYVFDILSDSGNEKVYWDDYRVESFCTTVGLKLAPLLGRGSFAELSQYPNDFKSLVNRYNELVETVGLEMANKHVFGPQASSETGLAEGYVLKPVYPRFFNVGTRVAIKCKNSKFSEKAFLIEPIKAKVELTENDKRLLGIFSEYVTWNRVSNVLSHIGSVTAKDFGRVSGLTMKDILREAAREGHDLLFADNPSAVLKELTGLIQNTIRSKWHEVLE

SEQ ID NO: 2053 - DNA, 1038 bp, synthetic construct
  misc_feature 1..1038: note = variant of RNA ligase 2 from Klebsiella phage KP179
  source 1..1038: mol_type = other DNA
atgcatcaccatcaccatcacggtggcagcaacatgtttgcgtattattcaagtctggaaaaccataccaatgccaagttcattagcaagatccgtggtgcaggcttcctgagccacaccgtggaatgggtagctcgcgagaagattcatggaacgaactttagcgttatcattactccgaccgaaatcgtgccagccaaacgcacagggccgatcttggaagacgagagcttctttggtcatgaaattatcatgaaaaaatatatggactccttcgtgaaggtgcagaacatgctgaatgcgatggatcttgttagcgtgcaaatctttggcgaatttgcgggtggtggcattcagaaaggcgtcgattacggagacaaagatttctatgtgtttgacatcctgtctgatagcgggaacgagaaagtttactgggatgactatcgcgtcgaatcgttttgcaccactgtgggtctgaaattagcgcctctgctgggacgtggtagtttcgctgaactgtcccagtacccaaacgatttcaaaagcctggtgaaccgttataatgaattggttgaaacggtcggcctggagatggccaataaacacgtctttggtccgcaagcgtcttctgaaactggcctggcagaaggctacgttcttaaacccgtctatccgcgcttttttaatgtgggtacccgcgtggcgattaaatgcaagaactccaaattttcggagaaagcctttctgattgaaccaattaaagcgaaggttgaactgacggagaacgataaacgtctgctcggaatctttagcgaatatgttacctggaaccgcgtcaacaacgtactgtcacatattggctcagtgaccgccaaagattttgggcgtgtttcgggtctgacgatgaaagacatcattcgcgaagcagcacgcgaaggccatgatctgttgttcgctgataacccgtcggcggtgctgaaggagctgacaggcctcatccagaacacgattcgctccaaatggcacgaagttctggag

SEQ ID NO: 2054 - protein, 346 aa, synthetic construct
  REGION 1..346: note = variant of RNA ligase 2 from Klebsiella phage KP179
MHHHHHHGGSNMFAYYSSLENHTNAKFISKIRGAGFLSHTVEWVAREKIHGTNFSVIITPTEIVPAKRTGPILEDESFFGHEIIMKKYMDSFVKVQNMLNAMDLVSVQIFGEFAGGGIQKGVDYGDKDFYVFDILSDSGNEKVYWDDYRVESFCTTVGLKLAPLLGRGSFAELSQYPNDFKSLVNRYNELVETVGLEMANKHVFGPQASSETGLAEGYVLKPVYPRFFNVGTRVAIKCKNSKFSEKAFLIEPIKAKVELTENDKRLLGIFSEYVTWNRVNNVLSHIGSVTAKDFGRVSGLTMKDIIREAAREGHDLLFADNPSAVLKELTGLIQNTIRSKWHEVLE

SEQ ID NO: 2055 - DNA, 1038 bp, synthetic construct
  misc_feature 1..1038: note = variant of RNA ligase 2 from Klebsiella phage KP179
  source 1..1038: mol_type = other DNA
atgcatcaccatcaccatcacggtggcagcaacatgtttgcgtattattcaagtctggaaaaccataccaatgccaagttcattagcaagatccgtggtgcaggcttcctgagccacaccgtggaatgggtagctcgcgagaagattcatggaacgaactttagcgttatcattactccgaccgaaatcgtgccggccaaacgcacagggccgatcttggaagacgagagcttctttggtcatgaaattatcatgaaaaaatatatggactccttcaaaaaggtgcagaacatgctgaatgcgatggatcttgttagcgtgcaaatctttggcgaatttgcgggtggtggcattcagaaaggcgtcgattacggagacaaagatttctatgtgtttgacatcctgtctgatagcgggaacgagaaagtttactgggatgactatcgcgtcgaatcgttttgcaccactgtgggtctgaaattagcgcctctgctgggacgtggtagtttcgctgaactgtcccagtacccaaacgatttcaaaagcctggtgaaccgttataatgaattggttgatacggtcggcctggagatggccaataaacacgtctttggtccgcaagcgtcttctgaaactggcctggcagaaggctacgttcttaaacccgtctatccgcgcttctttaatgtgggtacgcgcgtggcgattaaatgcaagaactccaaattttcggagaaagcctttctgattgaaccaattaaagcgaaggttgaactgacggagaacgataaacgtctgctcggaatctttagcgaatatgttacctggaaccgcgtcagtaacgtactgtcacatattggctcagtgaccgccaaagattttgggcgtgtttcgggtctgacgatgaaagacatcattcgcgaagcagcacgcgaaggccatgatctgttgtctgctgataacccgagcgcggtgctgaaggagctgacaggcctcatccagaacacgattcgctccaaatggcacgaagttctggag

SEQ ID NO: 2056 - protein, 346 aa, synthetic construct
  REGION 1..346: note = variant of RNA ligase 2 from Klebsiella phage KP179
MHHHHHHGGSNMFAYYSSLENHTNAKFISKIRGAGFLSHTVEWVAREKIHGTNFSVIITPTEIVPAKRTGPILEDESFFGHEIIMKKYMDSFKKVQNMLNAMDLVSVQIFGEFAGGGIQKGVDYGDKDFYVFDILSDSGNEKVYWDDYRVESFCTTVGLKLAPLLGRGSFAELSQYPNDFKSLVNRYNELVDTVGLEMANKHVFGPQASSETGLAEGYVLKPVYPRFFNVGTRVAIKCKNSKFSEKAFLIEPIKAKVELTENDKRLLGIFSEYVTWNRVSNVLSHIGSVTAKDFGRVSGLTMKDIIREAAREGHDLLSADNPSAVLKELTGLIQNTIRSKWHEVLE

SEQ ID NO: 2057 - DNA, 1038 bp, synthetic construct
  misc_feature 1..1038: note = variant of RNA ligase 2 from Klebsiella phage KP179
  source 1..1038: mol_type = other DNA
atgcatcaccatcaccatcacggtggcagcaacatgtttgcgtattattcaagtctggaaaaccataccaatgccaagttcattagcaagatccgtggtgcaggcttcctgagccacaccgtggaatgggtagctcgcgagaagattcatggaacgaactttagcgttatcattactccgaccgaaatcgtgccagccaaacgcacagggccgatcttggaagacgagagcttctttggtcatgaaattatcatgaaaaaatatatggactccttcgtgaaggtgcagaacatgctgaatgcgatggatcttgttagcgtgcaaatctttggcgaatttgcgggtggtggcattcagaaaggcgtcgattacggagacaaagatttctatgtgtttgacatcctgtctgatagcgggaacgagaaagtttactgggatgactatcgcgtcgaatcgttttgcaccactgtgggtctgaaattagcgcctctgctgggacgtggtagtttcgctgaactgtcccagtacccaaacgatttcaaaagcctggtgaaccgttataatgaattggttgaaacggtcggcctggagatggccaataaacacgtctttggtccgcaagcgtcttctgaaactggcctggcagaaggctacgttcttaaacccgtctatccgcgcttttttaatgtgggtacccgcgtggcgattaaatgcaagaactccaaattttcggagaaagcctttctgattgagccaattaaagcgaaggtggaactgacggagaacgataaacgtctgctcggaatctttagcgaatatgttacctggaaccgcgtcaacaacgtactgtcacatattggctcagtgaccaccaaagattttgggcgtgtttcgggtctgacgatgaaagacatcattcgcgaagcagcacgcgaaggccatgatctgttgttcgctgataacccgtcggcggtgctgaaggagctgacaggcctcatccagaacacgattcgctccaaatggcacgaagttctggag

SEQ ID NO: 2058 - protein, 346 aa, synthetic construct
  REGION 1..346: note = variant of RNA ligase 2 from Klebsiella phage KP179
MHHHHHHGGSNMFAYYSSLENHTNAKFISKIRGAGFLSHTVEWVAREKIHGTNFSVIITPTEIVPAKRTGPILEDESFFGHEIIMKKYMDSFVKVQNMLNAMDLVSVQIFGEFAGGGIQKGVDYGDKDFYVFDILSDSGNEKVYWDDYRVESFCTTVGLKLAPLLGRGSFAELSQYPNDFKSLVNRYNELVETVGLEMANKHVFGPQASSETGLAEGYVLKPVYPRFFNVGTRVAIKCKNSKFSEKAFLIEPIKAKVELTENDKRLLGIFSEYVTWNRVNNVLSHIGSVTTKDFGRVSGLTMKDIIREAAREGHDLLFADNPSAVLKELTGLIQNTIRSKWHEVLE

SEQ ID NO: 2059 - DNA, 1038 bp, synthetic construct
  misc_feature 1..1038: note = variant of RNA ligase 2 from Klebsiella phage KP179
  source 1..1038: mol_type = other DNA
atgcatcaccatcaccatcacggtggcagcaacatgtttgcgtattattcaagtctggaaaaccataccaatgccaagttcattagcaagatccgtggtgcaggcttcctgagccacaccgtggaatgggtagctcgcgagaagattcatggaacgaactttagcgttatcattactccgaccgaaatcgtgccagccaaacgcacagggccgatcttggaagacgagagcttctttggtcatgaaattatcatgaaaaaatatatggactccttcgtgaaggtgcagaacatgctgaatgcgatggatcttgttagcgtgcaaatctttggcgaatttgcgggtggtggcattcagaaaggcgtcgattacggagacaaagatttctatgtgtttgacatcctgtctgatagcgggaacgagaaagtttactgggatgactatcgcgtcgaatcgttttgcaccactgtgggtctgaaattagcgcctctgctgggacgtggtagtttcgctgaactgtcccagtacccaaacgatttcaaaagcctggtgaaccgttataatgaattggttgaaacggtcggcctggagatggccaataaacacgtctttggtccgcaagcgtcttctgaaactggcctggcagaaggctacgttcttaaacccgtctatccgcgcttttttaatgtgggtacccgcgtggcgattaaatgcaagaacggcaaattttcggagaaagcctttctgattgaaccaattaaagcgaaggtggaactgacggagaacgataaacgtctgctcggaatctttagcgaatatgttacctggaaccgcgtcagcaacgtactgtcacatattggctcagtgaccaccaaagattttgggcgtgtttcgggtctgacgatgaaagacatccttcgcgaagcagcacgcgaaggccatgatctgttgttcgctgataacccgtcggcggtgctgaaggagctgacaggcctcatccagaacacgattcgctccaaatggcacgaagttctggag

SEQ ID NO: 2060 - protein, 346 aa, synthetic construct
  REGION 1..346: note = variant of RNA ligase 2 from Klebsiella phage KP179
MHHHHHHGGSNMFAYYSSLENHTNAKFISKIRGAGFLSHTVEWVAREKIHGTNFSVIITPTEIVPAKRTGPILEDESFFGHEIIMKKYMDSFVKVQNMLNAMDLVSVQIFGEFAGGGIQKGVDYGDKDFYVFDILSDSGNEKVYWDDYRVESFCTTVGLKLAPLLGRGSFAELSQYPNDFKSLVNRYNELVETVGLEMANKHVFGPQASSETGLAEGYVLKPVYPRFFNVGTRVAIKCKNGKFSEKAFLIEPIKAKVELTENDKRLLGIFSEYVTWNRVSNVLSHIGSVTTKDFGRVSGLTMKDILREAAREGHDLLFADNPSAVLKELTGLIQNTIRSKWHEVLE

SEQ ID NO: 2061 - DNA, 1038 bp, synthetic construct
  misc_feature 1..1038: note = variant of RNA ligase 2 from Klebsiella phage KP179
  source 1..1038: mol_type = other DNA
atgcatcaccatcaccatcacggtggcagcaacatgtttgcgtattattcaagtctggaaaaccataccaatgccaagttcattagcaagatccgtggtgcaggcttcctgagccacaccgtggaatgggtagctcgcgagaagattcatggaacgaactttagcgttatcattactccgaccgaaatcgtgccggccaaacgcacagggccgatcttggaagacgagagcttctttggtcatgaaattatcatgaaaaaatatatggactccttcaaaaaggtgcagaacatgctgaatgcgatggatcttgttagcgtgcaaatctttggcgaatttgcgggtggtggcattcagaaaggcgtcgattacggagacaaagatttctatgtgtttgacatcctgtctgatagcgggaacgagaaagtttactgggatgactatcgcgtcgaatcgttttgcaccactgtgggtctgaaattagcgcctctgctgggacgtggtagtttcgctgaactgtcccagtacccaaacgatttcaaaagcctggtgaaccgttataatgaattggttgatacggtcggcctggagatggccaataaacacgtctttggtccgcaagcgtcttctgaaactggcctggcagaaggctacgttcttaaacccgtctatccgcgcttctttaatgtgggtacgcgcgtggcgattaaatgcaagaactccaaattttcggagaaagcctttctgattgaaccaattaaagcgaaggttgaactgacggagaacgataaacgtctgctcggaatctttagcgaatatgttacctggaaccgcgtcagtaacgtactgtcacatattggctcagtgaccgccaaagattttgggcgtgtttcgggtctgacgatgaaagacatcattcgcgaagcagcacgcgaaggccatgatctgttgttcgctgataacccgtcggcggtgctgaaggagctgacaggcctcatccagaacacgattcgctccaaatggcacgaagttctggag

SEQ ID NO: 2062 - protein, 346 aa, synthetic construct
  REGION 1..346: note = variant of RNA ligase 2 from Klebsiella phage KP179
MHHHHHHGGSNMFAYYSSLENHTNAKFISKIRGAGFLSHTVEWVAREKIHGTNFSVIITPTEIVPAKRTGPILEDESFFGHEIIMKKYMDSFKKVQNMLNAMDLVSVQIFGEFAGGGIQKGVDYGDKDFYVFDILSDSGNEKVYWDDYRVESFCTTVGLKLAPLLGRGSFAELSQYPNDFKSLVNRYNELVDTVGLEMANKHVFGPQASSETGLAEGYVLKPVYPRFFNVGTRVAIKCKNSKFSEKAFLIEPIKAKVELTENDKRLLGIFSEYVTWNRVSNVLSHIGSVTAKDFGRVSGLTMKDIIREAAREGHDLLFADNPSAVLKELTGLIQNTIRSKWHEVLE

SEQ ID NO: 2063 - DNA, 1038 bp, synthetic construct
  misc_feature 1..1038: note = variant of RNA ligase 2 from Klebsiella phage KP179
  source 1..1038: mol_type = other DNA
atgcatcaccatcaccatcacggtggcagcaacatgtttgcgtattattcaagtctggaaaaccataccaatgccaagttcattagcaagatccgtggtgcaggcttcctgagccacaccgtggaatgggtagctcgcgagaagattcatggaacgaactttagcgttatcattactccgaccgaaatcgtgccagccaaacgcacagggccgatcttggaagacgagagcttctttggtcatgaaattatcatgaaaaaatatatggactccttcaaaaaggtgcagaacatgctgaatgcgatggatcttgttagcgtgcaaatctttggcgaatttgcgggtggtggcattcagaaaggcgtcgattacggagacaaagatttctatgtgtttgacatcctgtctgatagcgggaacgagaaagtttactgggatgactatcgcgtcgaatcgttttgcaccactgtgggtctgaaattagcgcctctgctgggacgtggtagtttcgctgaactgtcccagtacccaaacgatttcaaaagcctggtgaaccgttataatgaattggttgaaacggtcggcctggagatggccaataaacacgtctttggtccgcaagcgtcttctgaaactggcctggcagaaggctacgttcttaaacccgtctatccgcgcttttttaatgtgggtacccgcgtggcgattaaatgcaagaactccaaattttcggagaaagcctttctgattgaaccaattaaagcgaaggaggaactgacggagaacgataaacgtctgctcggaatctttagcgaatatgttacctggaaccgcgtcagcaacgtactgtcacatattggctcagtgaccaccaaagattttgggcgtgtttcgggtctgacgatgaaagacatcattcgcgaagcagcacgcgaaggccatgatctgttgttcgctgataacccgtcggcggtgctgaaggagctgacaggcctcatccagaacacgattcgctccaaatggcacgaagttctggag

SEQ ID NO: 2064 - protein, 346 aa, synthetic construct
  REGION 1..346: note = variant of RNA ligase 2 from Klebsiella phage KP179
MHHHHHHGGSNMFAYYSSLENHTNAKFISKIRGAGFLSHTVEWVAREKIHGTNFSVIITPTEIVPAKRTGPILEDESFFGHEIIMKKYMDSFKKVQNMLNAMDLVSVQIFGEFAGGGIQKGVDYGDKDFYVFDILSDSGNEKVYWDDYRVESFCTTVGLKLAPLLGRGSFAELSQYPNDFKSLVNRYNELVETVGLEMANKHVFGPQASSETGLAEGYVLKPVYPRFFNVGTRVAIKCKNSKFSEKAFLIEPIKAKEELTENDKRLLGIFSEYVTWNRVSNVLSHIGSVTTKDFGRVSGLTMKDIIREAAREGHDLLFADNPSAVLKELTGLIQNTIRSKWHEVLE

SEQ ID NO: 2065 - DNA, 1038 bp, synthetic construct
  misc_feature 1..1038: note = variant of RNA ligase 2 from Klebsiella phage KP179
  source 1..1038: mol_type = other DNA
atgcatcaccatcaccatcacggtggcagcaacatgtttgcgtattattcaagtctggaaaaccataccaatgccaagttcattagcaagatccgtggtgcaggcttcctgagccacaccgtggaatgggtagctcgcgagaagattcatggaacgaactttagcgttatcattactccgaccgaaatcgtgccagccaaacgcacagggccgatcttggaagacgagagcttctttggtcatgaaattatcatgaaaaaatatatggactccttcaaaaaggtgcagaacatgctgaatgcgatggatcttgttagcgtgcaaatctttggcgaatttgcgggtggtggcattcagaaaggcgtcgattacggagacaaagatttctatgtgtttgacatcctgtctgatagcgggaacgagaaagtttactgggatgactatcgcgtcgaatcgttttgcaccactgtgggtctgaaattagcgcctctgctgggacgtggtagtttcgctgaactgtcccagtacccaaacgatttcaaaagcctggtgaaccgttataatgaattggttgaaacggtcggcctggagatggccaataaacacgtctttggtccgcaagcgtcttctgaaactggcctggcagaaggctacgttcttaaacccgtctatccgcgcttttttaatgtgggtacccgcgtggcgattaaatgcaagaacggcaaattttcggagaaagcctttctgattgaaccaattaaagcgaaggaggaactgacggagaacgataaacgtctgctcggaatctttagcgaatatgttacctggaaccgcgtcagtaacgtactgtcacatattggctcagtgaccgccaaagattttgggcgtgtttcgggtctgacgatgaaagacatccttcgcgaagcagcacgcgaaggccatgatctgttgttcgctgataacccgtcggcggtgctgaaggagctgacaggcctcatccagaacacgattcgctccaaatggcacgaagttctggag

SEQ ID NO: 2066 - protein, 346 aa, synthetic construct
  REGION 1..346: note = variant of RNA ligase 2 from Klebsiella phage KP179
MHHHHHHGGSNMFAYYSSLENHTNAKFISKIRGAGFLSHTVEWVAREKIHGTNFSVIITPTEIVPAKRTGPILEDESFFGHEIIMKKYMDSFKKVQNMLNAMDLVSVQIFGEFAGGGIQKGVDYGDKDFYVFDILSDSGNEKVYWDDYRVESFCTTVGLKLAPLLGRGSFAELSQYPNDFKSLVNRYNELVETVGLEMANKHVFGPQASSETGLAEGYVLKPVYPRFFNVGTRVAIKCKNGKFSEKAFLIEPIKAKEELTENDKRLLGIFSEYVTWNRVSNVLSHIGSVTAKDFGRVSGLTMKDILREAAREGHDLLFADNPSAVLKELTGLIQNTIRSKWHEVLE

SEQ ID NO: 2067 - DNA, 1038 bp, synthetic construct
  misc_feature 1..1038: note = variant of RNA ligase 2 from Klebsiella phage KP179
  source 1..1038: mol_type = other DNA
atgcatcaccatcaccatcacggtggcagcaacatgtttgcgtattattcaagtctggaaaaccataccaatgccaagttcattagcaagatccgtggtgcaggcttcctgagccacaccgtggaatgggtagctcgcgagaagattcatggaacgaactttagcgttatcattactccgaccgaaatcgtgccagccaaacgcacagggccgatcttggaagacgagagcttctttggtcatgaaattatcatgaaaaaatatatggactccttcaaaaaggtgcagaacatgctgaatgcgatggatcttgttagcgtgcaaatctttggcgaatttgcgggtggtggcattcagaaaggcgtcgattacggagacaaagatttctatgtgtttgacatcctgtctgatagcgggaacgagaaagtttactgggatgactatcgcgtcgaatcgttttgcaccactgtgggtctgaaattagcgcctctgctgggacgtggtagtttcgctgaactgtcccagtacccaaacgatttcaaaagcctggtgaaccgttataatgaattggttgaaacggtcggcctggagatggccaataaacacgtctttggtccgcaagcgtcttctgaaactggcctggcagaaggctacgttcttaaacccgtctatccgcgcttctttaatgtgggtacgcgcgtggcgattaaatgcaagaactccaaattttcggagaaagcctttctgattgaaccaattaaagcgaaggttgaactgacggagaacgataaacgtctgctcggaatctttagcgaatatgttacctggaaccgcgtcaacaacgtactgtcacatattggctcagtgaccgccaaagattttgggcgtgtttcgggtctgacgatgaaagacatcattcgcgaagcagcacgcgaaggccatgatctgttgttcgctgataacccgtcggcggtgctgaaggagctgacaggcctcatccagcagacgattcgctccaaatggcacgaagttctggag

SEQ ID NO: 2068 - protein, 346 aa, synthetic construct
  REGION 1..346: note = variant of RNA ligase 2 from Klebsiella phage KP179
MHHHHHHGGSNMFAYYSSLENHTNAKFISKIRGAGFLSHTVEWVAREKIHGTNFSVIITPTEIVPAKRTGPILEDESFFGHEIIMKKYMDSFKKVQNMLNAMDLVSVQIFGEFAGGGIQKGVDYGDKDFYVFDILSDSGNEKVYWDDYRVESFCTTVGLKLAPLLGRGSFAELSQYPNDFKSLVNRYNELVETVGLEMANKHVFGPQASSETGLAEGYVLKPVYPRFFNVGTRVAIKCKNSKFSEKAFLIEPIKAKVELTENDKRLLGIFSEYVTWNRVNNVLSHIGSVTAKDFGRVSGLTMKDIIREAAREGHDLLFADNPSAVLKELTGLIQQTIRSKWHEVLE

SEQ ID NO: 2069 - DNA, 1038 bp, synthetic construct
  misc_feature 1..1038: note = variant of RNA ligase 2 from Klebsiella phage KP179
  source 1..1038: mol_type = other DNA
atgcatcaccatcaccatcacggtggcagcaacatgtttgcgtattattcaagtctggaaaaccataccaatgccaagttcattagcaagatccgtggtgcaggcttcctgagccacaccgtggaatgggtagctcgcgagaagattcatggaacgaactttagcgttatcattactccgaccgaaatcgtgccagccaaacgcacagggccgatcttggaagacgagagcttctttggtcatgaaattatcatgaaaaaatatatggactccttcgtgaaggtgcagaacatgctgaatgcgatggatcttgttagcgtgcaaatctttggcgaatttgcgggtggtggcattcagaaaggcgtcgattacggagacaaagatttctatgtgtttgacatcctgtctgatagcgggaacgagaaagtttactgggatgactatcgcgtcgaatcgttttgcaccactgtgggtctgaaattagcgcctctgctgggacgtggtagtttcgctgaactgtcccagtacccaaacgatttcaaaagcctggtgaaccgttataatgaattggttgaaacggtcggcctggagatggccaataaacacgtctttggtccgcaagcgtcttctgaaactggcctggcagaaggctacgttcttaaacccgtctatccgcgcttttttaatgtgggtacccgcgtggcgattaaatgcaagaactccaaattttcggagaaagcctttctgattgaaccaattaaagcgaaggtggaactgacggagaacgataaacgtctgctcggaatctttagcgaatatgttacctggaaccgcgtcagcaacgtactgtcacatattggctcagtgaccaccaaagattttgggcgtgtttcgggtctgacgatgaaagacatccttcgcgaagcagcacgcgaaggccatgatctgttgttcgctgataacccgtcggcggtgctgaaggagctgacaggcctcatccagcagacgattcgctccaaatggcacgaagttctggag

SEQ ID NO: 2070 - protein, 346 aa, synthetic construct
  REGION 1..346: note = variant of RNA ligase 2 from Klebsiella phage KP179
MHHHHHHGGSNMFAYYSSLENHTNAKFISKIRGAGFLSHTVEWVAREKIHGTNFSVIITPTEIVPAKRTGPILEDESFFGHEIIMKKYMDSFVKVQNMLNAMDLVSVQIFGEFAGGGIQKGVDYGDKDFYVFDILSDSGNEKVYWDDYRVESFCTTVGLKLAPLLGRGSFAELSQYPNDFKSLVNRYNELVETVGLEMANKHVFGPQASSETGLAEGYVLKPVYPRFFNVGTRVAIKCKNSKFSEKAFLIEPIKAKVELTENDKRLLGIFSEYVTWNRVSNVLSHIGSVTTKDFGRVSGLTMKDILREAAREGHDLLFADNPSAVLKELTGLIQQTIRSKWHEVLE

SEQ ID NO: 2071 - DNA, 1038 bp, synthetic construct
  misc_feature 1..1038: note = variant of RNA ligase 2 from Klebsiella phage KP179
  source 1..1038: mol_type = other DNA
atgcatcaccatcaccatcacggtggcagcaacatgtttgcgtattattcaagtctggaaaaccataccaatgccaagttcattagcaagatccgtggtgcaggcttcctgagccacaccgtggaatgggtagctcgcgagaagattcatggaacgaactttagcgttatcattactccgaccgaaatcgtgccagccaaacgcacagggccgatcttggaagacgagagcttctttggtcatgaaattatcatgaaaaaatatatggactccttcgtgaaggtgcagaacatgctgaatgcgatggatcttgttagcgtgcaaatctttggcgaatttgcgggtggtggcattcagaaaggcgtcgattacggagacaaagatttctatgtgtttgacatcctgtctgatagcgggaacgagaaagtttactgggatgactatcgcgtcgaatcgttttgcaccactgtgggtctgaaattagcgcctctgctgggacgtggtagtttcgctgaactgtcccagtacccaaacgatttcaaaagcctggtgaaccgttataatgaattggttgaaacggtcggcctggagatggccaataaacacgtctttggtccgcaagcgtcttctgaaactggcctggcagaaggctacgttcttaaacccgtctatccgcgcttctttaatgtgggtacccgcgtggcgattaaatgcaagaactccaaattttcggagaaagcctttctgattgaaccaattaaagcgaaggtggaactgacggagaacgataaacgtctgctcggaatctttagcgaatatgttacctggaaccgcgtcagcaacgtactgtcacatattggctcagtgaccgccaaagattttgggcgtgtttcgggtctgacgatgaaagacatcattcgcgaagcagcacgcgaaggccatgatctgttgttcgctgataacccgtcggcggtgctgaaggagctgacaggcctcatccagcagacgattcgctccaaatggcacgaagttctggag

SEQ ID NO: 2072 - protein, 346 aa, synthetic construct
  REGION 1..346: note = variant of RNA ligase 2 from Klebsiella phage KP179
MHHHHHHGGSNMFAYYSSLENHTNAKFISKIRGAGFLSHTVEWVAREKIHGTNFSVIITPTEIVPAKRTGPILEDESFFGHEIIMKKYMDSFVKVQNMLNAMDLVSVQIFGEFAGGGIQKGVDYGDKDFYVFDILSDSGNEKVYWDDYRVESFCTTVGLKLAPLLGRGSFAELSQYPNDFKSLVNRYNELVETVGLEMANKHVFGPQASSETGLAEGYVLKPVYPRFFNVGTRVAIKCKNSKFSEKAFLIEPIKAKVELTENDKRLLGIFSEYVTWNRVSNVLSHIGSVTAKDFGRVSGLTMKDIIREAAREGHDLLFADNPSAVLKELTGLIQQTIRSKWHEVLE

SEQ ID NO: 2073 - DNA, 1038 bp, synthetic construct
  misc_feature 1..1038: note = variant of RNA ligase 2 from Klebsiella phage KP179
  source 1..1038: mol_type = other DNA
atgcatcaccatcaccatcacggtggcagcaacatgtttgcgtattattcaagtctggaaaaccataccaatgccaagttcattagcaagatccgtggtgcaggcttcctgagccacaccgtggaatgggtagctcgcgagaagattcatggaacgaactttagcgttatcattactccgaccgaaatcgtgccagccaaacgcacagggccgatcttggaagacgagagcttctttggtcatgaaattatcatgaaaaaatatatggactccttcgtgaaggtgcagaacatgctgaatgcgatggatcttgttagcgtgcaaatctttggcgaatttgcgggtggtggcattcagaaaggcgtcgattacggagacaaagatttctatgtgtttgacatcctgtctgatagcgggaacgagaaagtttactgggatgactatcgcgtcgaatcgttttgcaccactgtgggtctgaaattagcgcctctgctgggacgtggtagtttcgctgaactgtcccagtacccaaacgatttcaaaagcctggtgaaccgttataatgaattggttgaaacggtcggcctggagatggccaataaacacgtctttggtccgcaagcgtcttctgaaactggcctggcagaaggctacgttcttaaacccgtctatccgcgcttttttaatgtgggtaaccgcgtggcgattaaatgcaagaactccaaattttcggagaaagcctttctgattgaaccaattaaagcgaaggttgaactgacggagaacgataaacgtctgctcggaatctttagcgaatatgttacctggaaccgcgtcagtaacgtactgtcacatattggctcagtgaccgccaaagattttgggcgtgtttcgggtctgacgatgaaagacatcattcgcgaagcagcacgcgaaggccatgatctgttgttcgctgataacccgtcggcggtgctgaaggagctgacagggctcatccagcagacgattcgctccaaatggcacgaagttctggag

SEQ ID NO: 2074 - protein, 346 aa, synthetic construct
  REGION 1..346: note = variant of RNA ligase 2 from Klebsiella phage KP179
MHHHHHHGGSNMFAYYSSLENHTNAKFISKIRGAGFLSHTVEWVAREKIHGTNFSVIITPTEIVPAKRTGPILEDESFFGHEIIMKKYMDSFVKVQNMLNAMDLVSVQIFGEFAGGGIQKGVDYGDKDFYVFDILSDSGNEKVYWDDYRVESFCTTVGLKLAPLLGRGSFAELSQYPNDFKSLVNRYNELVETVGLEMANKHVFGPQASSETGLAEGYVLKPVYPRFFNVGNRVAIKCKNSKFSEKAFLIEPIKAKVELTENDKRLLGIFSEYVTWNRVSNVLSHIGSVTAKDFGRVSGLTMKDIIREAAREGHDLLFADNPSAVLKELTGLIQQTIRSKWHEVLE

SEQ ID NO: 2075 - DNA, 1038 bp, synthetic construct
  misc_feature 1..1038: note = variant of RNA ligase 2 from Klebsiella phage KP179
  source 1..1038: mol_type = other DNA
atgcatcaccatcaccatcacggtggcagcaacatgtttgcgtattattcaagtctggaaaaccataccaatgccaagttcattagcaagatccgtggtgcaggcttcctgagccacaccgtggaatgggtagctcgcgagaagattcatggaacgaactttagcgttatcattactccgaccgaaatccagccggccaaacgcacagggccgatcttggaagacgagagcttctttggtcatgaaattatcatgaaaaaatatatggactccttcaaaaaggtgcagaacatgctgaatgcgatggatcttgttagcgtgcaaatctttggcgaatttgcgggtggtggcattcagaaaggcgtcgattacggagacaaagatttctatgtgtttgacatcctgtctgatagcgggaacgagaaagtttactgggatgactatcgcgtcgaatcgttttgcaccactgtgggtctgaaattagcgcctctgctgggacgtggtagtttcgctgaactgtcccagtacccaaacgatttcaaaagcctggtgaaccgttataatgaattggttgaaacggtcggcctggagatggccaataaacacgtctttggtccgcaagcgtcttctgaaactggcctggcagaaggctacgttcttaaacccgtctatccgcgcttctttaatgtgggtacgcgcgtggcgattaaatgcaagaactccaaattttcggagaaagcctttctgattgaaccaattaaagcgaaggttgaactgacggagaacgataaacgtctgctcggaatctttagcgaatatgttacctggaaccgcgtcagtaacgtactgtcacatattggctcagtgaccgccaaagattttgggcgtgtttcgggtctgacgatgaaagacatcattcgcgaagcagcacgcgaaggccatgatctgttgtctgctgataacccgagcgcggtgctgaaggagctgacaggcctcatccagaacacgattcgctccaaatggcacgaagttctggag

SEQ ID NO: 2076 - protein, 346 aa, synthetic construct
  REGION 1..346: note = variant of RNA ligase 2 from Klebsiella phage KP179
MHHHHHHGGSNMFAYYSSLENHTNAKFISKIRGAGFLSHTVEWVAREKIHGTNFSVIITPTEIQPAKRTGPILEDESFFGHEIIMKKYMDSFKKVQNMLNAMDLVSVQIFGEFAGGGIQKGVDYGDKDFYVFDILSDSGNEKVYWDDYRVESFCTTVGLKLAPLLGRGSFAELSQYPNDFKSLVNRYNELVETVGLEMANKHVFGPQASSETGLAEGYVLKPVYPRFFNVGTRVAIKCKNSKFSEKAFLIEPIKAKVELTENDKRLLGIFSEYVTWNRVSNVLSHIGSVTAKDFGRVSGLTMKDIIREAAREGHDLLSADNPSAVLKELTGLIQNTIRSKWHEVLE

SEQ ID NO: 2077 - DNA, 1038 bp, synthetic construct
  misc_feature 1..1038: note = variant of RNA ligase 2 from Klebsiella phage KP179
  source 1..1038: mol_type = other DNA
atgcatcaccatcaccatcacggtggcagcaacatgtttgcgtattattcaagtctggaaaaccataccaatgccaagttcattagcaagatccgtggtgcaggcttcctgagccacaccgtggaatgggtagctcgcgagaagattcatggaacgaactttagcgttatcattactccgaccgaaatcgtgccagccaaacgcacagggccgatcttggaagacgagagcttctttggtcatgaaattatcatgaaaaaatatatggactccttcgtgaaggtgcagaacatgctgaatgcgatggatcttgttagcgtgcaaatctttggcgaatttgcgggtggtggcattcagaaaggcgtcgattacggagacaaagatttctatgtgtttgacatcctgtctgatagcgggaacgagaaagtttactgggatgactatcgcgtcgaatcgttttgcaccactgtgggtctgaaattagcgcctctgctgggacgtggtagtttcgctgaactgtcccagtacccaaacgatttcaaaagcctggtgaaccgttataatgaattggttgaaacggtcggcctggagatggccaataaacacgtctttggtccgcaagcgtcttctgaaactggcctggcagaaggctacgttcttaaacccgtctatccgcgcttttttaatgtgggtacccgcgtggcgattaaatgcaagaacggcaaattttcggagaaagcctttctgattgaaccaattaaagcgaaggttgaactgacggagaacgataaacgtctgctcggaatctttagcgaatatgttacctggaaccgcgtcagtaacgtactgtcacatattggctcagtgaccgccaaagattttgggcgtgtttcgggtctgacgatgaaagacatcattcgcgaagcagcacgcgaaggccatgatctgttgttcgctgataacccgtcggcggtgctgaaggagctgacaggcctcatccagaacacgattcgctccaaatggcacgaagttctggag

SEQ ID NO: 2078 - protein, 346 aa, synthetic construct
  REGION 1..346: note = variant of RNA ligase 2 from Klebsiella phage KP179
MHHHHHHGGSNMFAYYSSLENHTNAKFISKIRGAGFLSHTVEWVAREKIHGTNFSVIITPTEIVPAKRTGPILEDESFFGHEIIMKKYMDSFVKVQNMLNAMDLVSVQIFGEFAGGGIQKGVDYGDKDFYVFDILSDSGNEKVYWDDYRVESFCTTVGLKLAPLLGRGSFAELSQYPNDFKSLVNRYNELVETVGLEMANKHVFGPQASSETGLAEGYVLKPVYPRFFNVGTRVAIKCKNGKFSEKAFLIEPIKAKVELTENDKRLLGIFSEYVTWNRVSNVLSHIGSVTAKDFGRVSGLTMKDIIREAAREGHDLLFADNPSAVLKELTGLIQNTIRSKWHEVLE

SEQ ID NO: 2079 - DNA, 1038 bp, synthetic construct
  misc_feature 1..1038: note = variant of RNA ligase 2 from Klebsiella phage KP179
  source 1..1038: mol_type = other DNA
atgcatcaccatcaccatcacggtggcagcaacatgtttgcgtattattcaagtctggaaaaccataccaatgccaagttcattagcaagatccgtggtgcaggcttcctgagccacaccgtggaatgggtagctcgcgagaagattcatggaacgaactttagcgttatcattactccgaccgaaatcgtgccagccaaacgcacagggccgatcttggaagacgagagcttctttggtcatgaaattatcatgaaaaaatatatggactccttcgtgaaggtgcagaacatgctgaatgcgatggatcttgttagcgtgcaaatctttggcgaatttgcgggtggtggcattcagaaaggcgtcgattacggagacaaagatttctatgtgtttgacatcctgtctgatagcgggaacgagaaagtttactgggatgactatcgcgtcgaatcgttttgcaccactgtgggtctgaaattagcgcctctgctgggacgtggtagtttcgctgaactgtcccagtacccaaacgatttcaaaagcctggtgaaccgttataatgaattggttgaaacggtcggcctggagatggccaataaacacgtctttggtccgcaagcgtcttctgaaactggcctggcagaaggctacgttcttaaacccgtctatccgcgcttttttaatgtgggtaaccgcgtggcgattaaatgcaagaacggcaaattttcggagaaagcctttctgattgaaccaattaaagcgaaggttgaactgacggagaacgataaacgtctgctcggaatctttagcgaatatgttacctggaaccgcgtcaacaacgtactgtcacatattggctcagtgaccgccaaagattttgggcgtgtttcgggtctgacgatgaaagacatcattcgcgaagcagcacgcgaaggccatgatctgttgttcgctgataacccgtcggcggtgctgaaggagctgacaggcctcatccagaacacgattcgctccaaatggcacgaagttctggag

SEQ ID NO: 2080 - protein, 346 aa, synthetic construct
  REGION 1..346: note = variant of RNA ligase 2 from Klebsiella phage KP179
MHHHHHHGGSNMFAYYSSLENHTNAKFISKIRGAGFLSHTVEWVAREKIHGTNFSVIITPTEIVPAKRTGPILEDESFFGHEIIMKKYMDSFVKVQNMLNAMDLVSVQIFGEFAGGGIQKGVDYGDKDFYVFDILSDSGNEKVYWDDYRVESFCTTVGLKLAPLLGRGSFAELSQYPNDFKSLVNRYNELVETVGLEMANKHVFGPQASSETGLAEGYVLKPVYPRFFNVGNRVAIKCKNGKFSEKAFLIEPIKAKVELTENDKRLLGIFSEYVTWNRVNNVLSHIGSVTAKDFGRVSGLTMKDIIREAAREGHDLLFADNPSAVLKELTGLIQNTIRSKWHEVLE

SEQ ID NO: 2081 - DNA, 1038 bp, synthetic construct
  misc_feature 1..1038: note = variant of RNA ligase 2 from Klebsiella phage KP179
  source 1..1038: mol_type = other DNA
atgcatcaccatcaccatcacggtggcagcaacatgtttgcgtattattcaagtctggaaaaccataccaatgccaagttcattagcaagatccgtggtgcaggcttcctgagccacaccgtggaatgggtagctcgcgagaagattcatggaacgaactttagcgttatcattactccgaccgaaatccagccggccaaacgcacagggccgatcttggaagacgagagcttctttggtcatgaaattatcatgaaaaaatatatggactccttcaaaaaggtgcagaacatgctgaatgcgatggatcttgttagcgtgcaaatctttggcgaatttgcgggtggtggcattcagaaaggcgtcgattacggagacaaagatttctatgtgtttgacatcctgtctgatagcgggaacgagaaagtttactgggatgactatcgcgtcgaatcgttttgcaccactgtgggtctgaaattagcgcctctgctgggacgtggtagtttcgctgaactgtcccagtacccaaacgatttcaaaagcctggtgaaccgttataatgaattggttgatacggtcggcctggagatggccaataaacacgtctttggtccgcaagcgtcttctgaaactggcctggcagaaggctacgttcttaaacccgtctatccgcgcttctttaatgtgggtacgcgcgtggcgattaaatgcaagaactccaaattttcggagaaagcctttctgattgaaccaattaaagcgaaggttgaactgacggagaacgataaacgtctgctcggaatctttagcgaatatgttacctggaaccgcgtcagtaacgtactgtcacatattggctcagtgaccgccaaagattttgggcgtgtttcgggtctgacgatgaaagacatcattcgcgaagcagcacgcgaaggccatgatctgttgtctgctgataacccgggcgcggtgctgaaggagctgacaggcctcatccagaacacgattcgctccaaatggcacgaagttctggag

SEQ ID NO: 2082 - protein, 346 aa, synthetic construct
  REGION 1..346: note = variant of RNA ligase 2 from Klebsiella phage KP179
MHHHHHHGGSNMFAYYSSLENHTNAKFISKIRGAGFLSHTVEWVAREKIHGTNFSVIITPTEIQPAKRTGPILEDESFFGHEIIMKKYMDSFKKVQNMLNAMDLVSVQIFGEFAGGGIQKGVDYGDKDFYVFDILSDSGNEKVYWDDYRVESFCTTVGLKLAPLLGRGSFAELSQYPNDFKSLVNRYNELVDTVGLEMANKHVFGPQASSETGLAEGYVLKPVYPRFFNVGTRVAIKCKNSKFSEKAFLIEPIKAKVELTENDKRLLGIFSEYVTWNRVSNVLSHIGSVTAKDFGRVSGLTMKDIIREAAREGHDLLSADNPGAVLKELTGLIQNTIRSKWHEVLE

SEQ ID NO: 2083 - DNA, 1038 bp, synthetic construct
  misc_feature 1..1038: note = variant of RNA ligase 2 from Klebsiella phage KP179
  source 1..1038: mol_type = other DNA
atgcatcaccatcaccatcacggtggcagcaacatgtttgcgtattattcaagtctggaaaaccataccaatgccaagttcattagcaagatccgtggtgcaggcttcctgagccacaccgtggaatgggtagctcgcgagaagattcatggaacgaactttagcgttatcattactccgaccgaaatcgtgccagccaaacgcacagggccgatcttggaagacgagagcttctttggtcatgaaattatcatgaaaaaatatatggactccttcaaaaaggtgcagaacatgctgaatgcgatggatcttgttagcgtgcaaatctttggcgaatttgcgggtggtggcattcagaaaggcgtcgattacggagacaaagatttctatgtgtttgacatcctgtctgatagcgggaacgagaaagtttactgggatgactatcgcgtcgaatcgttttgcaccactgtgggtctgaaattagcgcctctgctgggacgtggtagtttcgctgaactgtcccagtacccaaacgatttcaaaagcctggtgaaccgttataatgaattggttgaaacggtcggcctggagatggccaataaacacgtctttggtccgcaagcgtcttctgaaactggcctggcagaaggctacgttcttaaacccgtctatccgcgcttttttaatgtgggtaaccgcgtggcgattaaatgcaagaactccaaattttcggagaaagcctttctgattgaaccaattaaagcgaaggttgaactgacggagaacgataaacgtctgctcggaatctttagcgaatatgttacctggaaccgcgtcaacaacgtactgtcacatattggctcagtgaccgccaaagattttgggcgtgtttcgggtctgacgatgaaagacatccttcgcgaagcagcacgcgaaggccatgatctgttgttcgctgataacccgtcggcggtgctgaaggagctgacaggcctcatccagaacacgattcgctccaaatggcacgaagttctggag

SEQ ID NO: 2084 - protein, 346 aa, synthetic construct
  REGION 1..346: note = variant of RNA ligase 2 from Klebsiella phage KP179
MHHHHHHGGSNMFAYYSSLENHTNAKFISKIRGAGFLSHTVEWVAREKIHGTNFSVIITPTEIVPAKRTGPILEDESFFGHEIIMKKYMDSFKKVQNMLNAMDLVSVQIFGEFAGGGIQKGVDYGDKDFYVFDILSDSGNEKVYWDDYRVESFCTTVGLKLAPLLGRGSFAELSQYPNDFKSLVNRYNELVETVGLEMANKHVFGPQASSETGLAEGYVLKPVYPRFFNVGNRVAIKCKNSKFSEKAFLIEPIKAKVELTENDKRLLGIFSEYVTWNRVNNVLSHIGSVTAKDFGRVSGLTMKDILREAAREGHDLLFADNPSAVLKELTGLIQNTIRSKWHEVLE

SEQ ID NO: 2085 - DNA, 1038 bp, synthetic construct
  misc_feature 1..1038: note = variant of RNA ligase 2 from Klebsiella phage KP179
  source 1..1038: mol_type = other DNA
atgcatcaccatcaccatcacggtggcagcaacatgtttgcgtattattcaagtctggaaaaccataccaatgccaagttcattagcaagatccgtggtgcaggcttcctgagccacaccgtggaatgggtagctcgcgagaagattcatggaacgaactttagcgttatcattactccgaccgaaatcgtgccagccaaacgcacagggccgatcttggaagacgagagcttctttggtcatgaaattatcatgaaaaaatatatggactccttcgtgaaggtgcagaacatgctgaatgcgatggatcttgttagcgtgcaaatctttggcgaatttgcgggtggtggcattcagaaaggcgtcgattacggagacaaagatttctatgtgtttgacatcctgtctgatagcgggaacgagaaagtttactgggatgactatcgcgtcgaatcgttttgcaccactgtgggtctgaaattagcgcctctgctgggacgtggtagtttcgctgaactgtcccagtacccaaacgatttcaaaagcctggtgaaccgttataatgaattggttgaaacggtcggcctggagatggccaataaacacgtctttggtccgcaagcgtcttctgaaactggcctggcagaaggctacgttcttaaacccgtctatccgcgcttttttaatgtgggtaaccgcgtggcgattaaatgcaagaactccaaattttcggagaaagcctttctgattgaaccaattaaagcgaaggttgaactgacggagaacgataaacgtctgctcggaatctttagcgaatatgttacctggaaccgcgtcagtaacgtactgtcacatattggctcagtgaccgccaaagattttgggcgtgtttcgggtctgacgatgaaagacatcattcgcgaagcagcacgcgaaggccatgatctgttgttcgctgataacccgtcggcggtgctgaaggagctgacaggcctcatccagaacacgattcgctccaaatggcacgaagttctggag

SEQ ID NO: 2086 - protein, 346 aa, synthetic construct
  REGION 1..346: note = variant of RNA ligase 2 from Klebsiella phage KP179
MHHHHHHGGSNMFAYYSSLENHTNAKFISKIRGAGFLSHTVEWVAREKIHGTNFSVIITPTEIVPAKRTGPILEDESFFGHEIIMKKYMDSFVKVQNMLNAMDLVSVQIFGEFAGGGIQKGVDYGDKDFYVFDILSDSGNEKVYWDDYRVESFCTTVGLKLAPLLGRGSFAELSQYPNDFKSLVNRYNELVETVGLEMANKHVFGPQASSETGLAEGYVLKPVYPRFFNVGNRVAIKCKNSKFSEKAFLIEPIKAKVELTENDKRLLGIFSEYVTWNRVSNVLSHIGSVTAKDFGRVSGLTMKDIIREAAREGHDLLFADNPSAVLKELTGLIQNTIRSKWHEVLE

SEQ ID NO: 2087 - DNA, 1038 bp, synthetic construct
  misc_feature 1..1038: note = variant of RNA ligase 2 from Klebsiella phage KP179
  source 1..1038: mol_type = other DNA
atgcatcaccatcaccatcacggtggcagcaacatgtttgcgtattattcaagtctggaaaaccataccaatgccaagttcattagcaagatccgtggtgcaggcttcctgagccacaccgtggaatgggtagctcgcgagaagattcatggaacgaactttagcgttatcattactccgaccgaaatcgtgccagccaaacgcacagggccgatcttggaagacgagagcttctttggtcatgaaattatcatgaaaaaatatatggactccttcaaaaaggtgcagaacatgctgaatgcgatggatcttgttagcgtgcaaatctttggcgaatttgcgggtggtggcattcagaaaggcgtcgattacggagacaaagatttctatgtgtttgacatcctgtctgatagcgggaacgagaaagtttactgggatgactatcgcgtcgaatcgttttgcaccactgtgggtctgaaattagcgcctctgctgggacgtggtagtttcgctgaactgtcccagtacccaaacgatttcaaaagcctggtgaaccgttataatgaattggttgaaacggtcggcctggagatggccaataaacacgtctttggtccgcaagcgtcttctgaaactggcctggcagaaggctacgttcttaaacccgtctatccgcgcttttttaatgtgggtacccgcgtggcgattaaatgcaagaactccaaattttcggagaaagcctttctgattgaaccaattaaagcgaaggttgaactgacggagaacgataaacgtctgctcggaatctttagcgaatatgttacctggaaccgcgtcagtaacgtactgtcacatattggctcagtgaccaccaaagattttgggcgtgtttcgggtctgacgatgaaagacatcattcgcgaagcagcacgcgaaggccatgatctgttgttcgctgataacccgtcggcggtgctgaaggagctgacaggcctcatccagcagacgattcgctccaaatggcacgaagttctggag

SEQ ID NO: 2088 - protein, 346 aa, synthetic construct
  REGION 1..346: note = variant of RNA ligase 2 from Klebsiella phage KP179
MHHHHHHGGSNMFAYYSSLENHTNAKFISKIRGAGFLSHTVEWVAREKIHGTNFSVIITPTEIVPAKRTGPILEDESFFGHEIIMKKYMDSFKKVQNMLNAMDLVSVQIFGEFAGGGIQKGVDYGDKDFYVFDILSDSGNEKVYWDDYRVESFCTTVGLKLAPLLGRGSFAELSQYPNDFKSLVNRYNELVETVGLEMANKHVFGPQASSETGLAEGYVLKPVYPRFFNVGTRVAIKCKNSKFSEKAFLIEPIKAKVELTENDKRLLGIFSEYVTWNRVSNVLSHIGSVTTKDFGRVSGLTMKDIIREAAREGHDLLFADNPSAVLKELTGLIQQTIRSKWHEVLE

SEQ ID NO: 2089 - DNA, 1038 bp, synthetic construct
  misc_feature 1..1038: note = variant of RNA ligase 2 from Klebsiella phage KP179
  source 1..1038: mol_type = other DNA
atgcatcaccatcaccatcacggtggcagcaacatgtttgcgtattattcaagtctggaaaaccataccaatgccaagttcattagcaagatccgtggtgcaggcttcctgagccacaccgtggaatgggtagctcgcgagaagattcatggaacgaactttagcgttatcattactccgaccgaaatcgtgccagccaaacgcacagggccgatcttggaagacgagagcttctttggtcatgaaattatcatgaaaaaatatatggactccttcaaaaaggtgcagaacatgctgaatgcgatggatcttgttagcgtgcaaatctttggcgaatttgcgggtggtggcattcagaaaggcgtcgattacggagacaaagatttctatgtgtttgacatcctgtctgatagcgggaacgagaaagtttactgggatgactatcgcgtcgaatcgttttgcaccactgtgggtctgaaattagcgcctctgctgggacgtggtagtttcgctgaactgtcccagtacccaaacgatttcaaaagcctggtgaaccgttataatgaattggttgaaacggtcggcctggagatggccaataaacacgtctttggtccgcaagcgtcttctgaaactggcctggcagaaggctacgttcttaaacccgtctatccgcgcttctttaatgtgggtacgcgcgtggcgattaaatgcaagaacagcaaattttcggagaaagcctttctgattgaaccaattaaagcgaaggagatgctgacggagaacgataaacgtctgctcggaatctttagcgaatatgttacctggaaccgcgtcagtaacgtactgtcacatattggctcagtgaccgccaaagattttgggcgtgtttcgggtctgacgatgaaagacatcattcgcgaagcagcacgcgaaggccatgatctgttgttcgctgataacccgtcggcggtgctgaaggagctgacaggcctcatccagaacacgattcgctccaaatggcacgaagttctggag

SEQ ID NO: 2090 - protein, 346 aa, synthetic construct
  REGION 1..346: note = variant of RNA ligase 2 from Klebsiella phage KP179
MHHHHHHGGSNMFAYYSSLENHTNAKFISKIRGAGFLSHTVEWVAREKIHGTNFSVIITPTEIVPAKRTGPILEDESFFGHEIIMKKYMDSFKKVQNMLNAMDLVSVQIFGEFAGGGIQKGVDYGDKDFYVFDILSDSGNEKVYWDDYRVESFCTTVGLKLAPLLGRGSFAELSQYPNDFKSLVNRYNELVETVGLEMANKHVFGPQASSETGLAEGYVLKPVYPRFFNVGTRVAIKCKNSKFSEKAFLIEPIKAKEMLTENDKRLLGIFSEYVTWNRVSNVLSHIGSVTAKDFGRVSGLTMKDIIREAAREGHDLLFADNPSAVLKELTGLIQNTIRSKWHEVLE

SEQ ID NO: 2091 - DNA, 1038 bp, synthetic construct
  misc_feature 1..1038: note = variant of RNA ligase 2 from Klebsiella phage KP179
  source 1..1038: mol_type = other DNA
atgcatcaccatcaccatcacggtggcagcaacatgtttgcgtattattcaagtctggaaaaccataccaatgccaagttcattagcaagatccgtggtgcaggcttcctgagccacaccgtggaatgggtagctcgcgagaagattcatggaacgaactttagcgttatcattactccgaccgaaatcgtgccagccaaacgcacagggccgatcttggaagacgagagcttctttggtcatgaaattatcatgaaaaaatatatggactccttcgtgaaggtgcagaacatgctgaatgcgatggatcttgttagcgtgcaaatctttggcgaatttgcgggtggtggcattcagaaaggcgtcgattacggagacaaagatttctatgtgtttgacatcctgtctgatagcgggaacgagaaagtttactgggatgactatcgcgtcgaatcgttttgcaccactgtgggtctgaaattagcgcctctgctgggacgtggtagtttcgctgaactgtcccagtacccaaacgatttcaaaagcctggtgaaccgttataatgaattggttgaaacggtcggcctggagatggccaataaacacgtctttggtccgcaagcgtcttctgaaactggcctggcagaaggctacgttcttaaacccgtctatccgcgcttttttaatgtgggtaaccgcgtggcgattaaatgcaagaacggcaaattttcggagaaagcctttctgattgaaccaattaaagcgaaggagatgctgacggagaacgataaacgtctgctcggaatctttagcgaatatgttacctggaaccgcgtcaacaacgtactgtcacatattggctcagtgaccgccaaagattttgggcgtgtttcgggtctgacgatgaaagacatcattcgcgaagcagcacgcgaaggccatgatctgttgttcgctgataacccgtcggcggtgctgaaggagctgacaggcctcatccagcagacgattcgctccaaatggcacgaagttctggag

SEQ ID NO: 2092 - protein, 346 aa, synthetic construct
  REGION 1..346: note = variant of RNA ligase 2 from Klebsiella phage KP179
MHHHHHHGGSNMFAYYSSLENHTNAKFISKIRGAGFLSHTVEWVAREKIHGTNFSVIITPTEIVPAKRTGPILEDESFFGHEIIMKKYMDSFVKVQNMLNAMDLVSVQIFGEFAGGGIQKGVDYGDKDFYVFDILSDSGNEKVYWDDYRVESFCTTVGLKLAPLLGRGSFAELSQYPNDFKSLVNRYNELVETVGLEMANKHVFGPQASSETGLAEGYVLKPVYPRFFNVGNRVAIKCKNGKFSEKAFLIEPIKAKEMLTENDKRLLGIFSEYVTWNRVNNVLSHIGSVTAKDFGRVSGLTMKDIIREAAREGHDLLFADNPSAVLKELTGLIQQTIRSKWHEVLE

SEQ ID NO: 2093 - DNA, 1038 bp, synthetic construct
  misc_feature 1..1038: note = variant of RNA ligase 2 from Klebsiella phage KP179
  source 1..1038: mol_type = other DNA
atgcatcaccatcaccatcacggtggcagcaacatgtttgcgtattattcaagtctggaaaaccataccaatgccaagttcattagcaagatccgtggtgcaggcttcctgagccacaccgtggaatgggtagctcgcgagaagattcatggaacgaactttagcgttatcattactccgaccgaaatcgtgccggccaaacgcacagggccgatcttggaagacgagagcttctttggtcatgaaattatcatgaaaaaatatatggactccttcaaaaaggtgcagaacatgctgaatgcgatggatcttgttagcgtgcaaatctttggcgaatttgcgggtggtggcattcagaaaggcgtcgattacggagacaaagatttctatgtgtttgacatcctgtctgatagcgggaacgagaaagtttactgggatgactatcgcgtcgaatcgttttgcaccactgtgggtctgaaattagcgcctctgctgggacgtggtagtttcgctgaactgtcccagtacccaaacgatttcaaaagcctggtgaaccgttataatgaattggttgaaacggtcggcctggagatggccaataaacacgtctttggtccgcaagcgtcttctgaaactggcctggcagaaggctacgttcttaaacccgtctatccgcgcttctttaatgtgggtacgcgcgtggcgattaaatgcaagaactccaaattttcggagaaagcctttctgattgaaccaattaaagcgaaggttgaactgacggagaacgataaacgtctgctcggaatctttagcgaatatgttacctggaaccgcgtcagtaacgtactgtcacatattggctcagtgaccgccaaagattttgggcgggtttcgggtctgacgatgaaagacatcattcgcgaagcagcacgcgaaggccatgatctgttgtctgctgataacccgggcgcggtgctgaaggagctgacaggcctcatccagaacacgattcgctccaaatggcacgaagttctggag

SEQ ID NO: 2094 - protein, 346 aa, synthetic construct
  REGION 1..346: note = variant of RNA ligase 2 from Klebsiella phage KP179
MHHHHHHGGSNMFAYYSSLENHTNAKFISKIRGAGFLSHTVEWVAREKIHGTNFSVIITPTEIVPAKRTGPILEDESFFGHEIIMKKYMDSFKKVQNMLNAMDLVSVQIFGEFAGGGIQKGVDYGDKDFYVFDILSDSGNEKVYWDDYRVESFCTTVGLKLAPLLGRGSFAELSQYPNDFKSLVNRYNELVETVGLEMANKHVFGPQASSETGLAEGYVLKPVYPRFFNVGTRVAIKCKNSKFSEKAFLIEPIKAKVELTENDKRLLGIFSEYVTWNRVSNVLSHIGSVTAKDFGRVSGLTMKDIIREAAREGHDLLSADNPGAVLKELTGLIQNTIRSKWHEVLE

SEQ ID NO: 2095 - DNA, 1038 bp, synthetic construct
  misc_feature 1..1038: note = variant of RNA ligase 2 from Klebsiella phage KP179
  source 1..1038: mol_type = other DNA
atgcatcaccatcaccatcacggtggcagcaacatgtttgcgtattattcaagtctggaaaaccataccaatgccaagttcattagcaagatccgtggtgcaggcttcctgagccacaccgtggaatgggtagctcgcgagaagattcatggaacgaactttagcgttatcattactccgaccgaaatcgtgccagccaaacgcacagggccgatcttggaagacgagagcttctttggtcatgaaattatcatgaaaaaatatatggactccttcgtgaaggtgcagaacatgctgaatgcgatggatcttgttagcgtgcaaatctttggcgaatttgcgggtggtggcattcagaaaggcgtcgattacggagacaaagatttctatgtgtttgacatcctgtctgatagcgggaacgagaaagtttactgggatgactatcgcgtcgaatcgttttgcaccactgtgggtctgaaattagcgcctctgctgggacgtggtagtttcgctgaactgtcccagtacccaaacgatttcaaaagcctggtgaaccgttataatgaattggttgaaacggtcggcctggagatggccaataaacacgtctttggtccgcaagcgtcttctgaaactggcctggcagaaggctacgttcttaaacccgtctatccgcgcttttttaatgtgggtacccgcgtggcgattaaatgcaagaacggcaaattttcggagaaagcctttctgattgagccaattaaagcgaaggttgaactgacggagaacgataaacgtctgctcggaatctttagcgaatatgttacctggaaccgcgtcagtaacgtactgtcacatattggctcagtgaccaccaaagattttgggcgtgtttcgggtctgacgatgaaagacatcattcgcgaagcagcacgcgaaggccatgatctgttgttcgctgataacccgtcggcggtgctgaaggagctgacaggcctcatccagcagacgattcgctccaaatggcacgaagttctggag

SEQ ID NO: 2096 - protein, 346 aa, synthetic construct
  REGION 1..346: note = variant of RNA ligase 2 from Klebsiella phage KP179
MHHHHHHGGSNMFAYYSSLENHTNAKFISKIRGAGFLSHTVEWVAREKIHGTNFSVIITPTEIVPAKRTGPILEDESFFGHEIIMKKYMDSFVKVQNMLNAMDLVSVQIFGEFAGGGIQKGVDYGDKDFYVFDILSDSGNEKVYWDDYRVESFCTTVGLKLAPLLGRGSFAELSQYPNDFKSLVNRYNELVETVGLEMANKHVFGPQASSETGLAEGYVLKPVYPRFFNVGTRVAIKCKNGKFSEKAFLIEPIKAKVELTENDKRLLGIFSEYVTWNRVSNVLSHIGSVTTKDFGRVSGLTMKDIIREAAREGHDLLFADNPSAVLKELTGLIQQTIRSKWHEVLE

SEQ ID NO: 2097 - DNA, 1038 bp, synthetic construct
  misc_feature 1..1038: note = variant of RNA ligase 2 from Klebsiella phage KP179
  source 1..1038: mol_type = other DNA
atgcatcaccatcaccatcacggtggcagcaacatgtttgcgtattattcaagtctggaaaaccataccaatgccaagttcattagcaagatccgtggtgcaggcttcctgagccacaccgtggaatgggtagctcgcgagaagattcatggaacgaactttagcgttatcattactccgaccgaaatcgtgccagccaaacgcacagggccgatcttggaagacgagagcttctttggtcatgaagcgatcatggataaatatatggactccttcaaaaaggtgcagaacatgctgaatgcgatggatcttgttagcgtgcaaatctttggcgaatttgcgggtggtggcattcagaaaggcgtcgattacggagacaaagatttctatgtgtttgacatcctgtctgatagcgggaacgagaaagtttactgggatgactatcgcgtcgaatcgttttgcaccactgtgggtctgaaattagcgcctctgctgggacgtggtagtttcgctgaactgtcccagtacccaaacgatttcaaaagcctggtgaaccgttataatgaattggttgaaacggtcggcctggagatggccaataaacacgtctttggtccgcaagcgtcttctgaaactggcctggcagaaggctacgttcttaaacccgtctatccgcgcttctttaatgtgggtacgcgcgtggcgattaaatgcaagaactccaaattttcggagaaagcctttctgattgaaccaattaaagcgaaggttgaactgacggagaacgataaacgtctgctcggaatctttagcgaatatgttacctggaaccgcgtcagtaacgtactgtcacatattggctcagtgaccgccaaagattttgggcgtgtttcgggtctgacgatgaaagacatcattcgcgaagcagcacgcgaaggccatgatctgttgtttgctgataacccgggcgcggtgctgaaggagctgacaggcctcatccagaacacgattcgctccaaatggcacgaagttctggag

SEQ ID NO: 2098 - protein, 346 aa, synthetic construct
  REGION 1..346: note = variant of RNA ligase 2 from Klebsiella phage KP179
MHHHHHHGGSNMFAYYSSLENHTNAKFISKIRGAGFLSHTVEWVAREKIHGTNFSVIITPTEIVPAKRTGPILEDESFFGHEAIMDKYMDSFKKVQNMLNAMDLVSVQIFGEFAGGGIQKGVDYGDKDFYVFDILSDSGNEKVYWDDYRVESFCTTVGLKLAPLLGRGSFAELSQYPNDFKSLVNRYNELVETVGLEMANKHVFGPQASSETGLAEGYVLKPVYPRFFNVGTRVAIKCKNSKFSEKAFLIEPIKAKVELTENDKRLLGIFSEYVTWNRVSNVLSHIGSVTAKDFGRVSGLTMKDIIREAAREGHDLLFADNPGAVLKELTGLIQNTIRSKWHEVLE

SEQ ID NO: 2099 - DNA, 1038 bp, synthetic construct
  misc_feature 1..1038: note = variant of RNA ligase 2 from Klebsiella phage KP179
  source 1..1038: mol_type = other DNA
atgcatcaccatcaccatcacggtggcagcaacatgtttgcgtattattcaagtctggaaaaccataccaatgccaagttcattagcaagatccgtggtgcaggcttcctgagccacaccgtggaatgggtagctcgcgagaagattcatggaacgaactttagcgttatcattactccgaccgaaatcgtgccagccaaacgcacagggccgatcttggaagacgagagcttctttggtcatgaaattatcatgaaaaaatatatggactccttcaaaaaggtgcagaacatgctgaatgcgatggatcttgttagcgtgcaaatctttggcgaatttgcgggtggtggcattcagaaaggcgtcgattacggagacaaagatttctatgtgtttgacatcctgtctgatagcgggaacgagaaagtttactgggatgactatcgcgtcgaatcgttttgcaccactgtgggtctgaaattagcgcctctgctgggacgtggtagtttcgctgaactgtcccagtacccaaacgatttcaaaagcctggtgaaccgttataatgaattggttgaaacggtcggcctggagatggccaataaacacgtctttggtccgcaagcgtcttctgaaactggcctggcagaaggctacgttcttaaacccgtctatccgcgcttttttaatgtgggtacccgcgtggcgattaaatgcaagaactccaaattttcggagaaagcctttctgattgaaccaattaaagcgaaggagatgctgacggagaacgataaacgtctgctcggaatctttagcgaatatgttacctggaaccgcgtcagcaacgtactgtcacatattggctcagtgaccaccaaagattttgggcgtgtttcgggtctgacgatgaaagacatcattcgcgaagcagcacgcgaaggccatgatctgttgttcgctgataacccgtcggcggtgctgaaggagctgacaggcctcatccagaacacgattcgctccaaatggcacgaagttctggag

SEQ ID NO: 2100 - protein, 346 aa, synthetic construct
  REGION 1..346: note = variant of RNA ligase 2 from Klebsiella phage KP179
MHHHHHHGGSNMFAYYSSLENHTNAKFISKIRGAGFLSHTVEWVAREKIHGTNFSVIITPTEIVPAKRTGPILEDESFFGHEIIMKKYMDSFKKVQNMLNAMDLVSVQIFGEFAGGGIQKGVDYGDKDFYVFDILSDSGNEKVYWDDYRVESFCTTVGLKLAPLLGRGSFAELSQYPNDFKSLVNRYNELVETVGLEMANKHVFGPQASSETGLAEGYVLKPVYPRFFNVGTRVAIKCKNSKFSEKAFLIEPIKAKEMLTENDKRLLGIFSEYVTWNRVSNVLSHIGSVTTKDFGRVSGLTMKDIIREAAREGHDLLFADNPSAVLKELTGLIQNTIRSKWHEVLE

SEQ ID NO: 2101 - DNA, 1038 bp, synthetic construct
  misc_feature 1..1038: note = variant of RNA ligase 2 from Klebsiella phage KP179
  source 1..1038: mol_type = other DNA
atgcatcaccatcaccatcacggtggcagcaacatgtttgcgtattattcaagtctggaaaaccataccaatgccaagttcattagcaagatccgtggtgcaggcttcctgagccacaccgtggaatgggtagctcgcgagaagattcatggaacgaactttagcgttatcattactccgaccgaaatcgtgccggccaaacgcacagggccgatcttggaagacgagagcttctttggtcatgaaattatcatgaaaaaatatatggactccttcaaaaaggtgcagaacatgctgaatccgatggatcttgttagcgtgcaaatctttggcgaatttgcgggtggtggcattcagaaaggcgtcgattacggagacaaagatttctatgtgtttgacatcctgtctgatagcgggaacgagaaagtttactgggatgactatcgcgtcgaatcgttttgcaccactgtgggtctgaaattagcgcctctgctgggacgtggtagtttcgctgaactgtcccagtacccaaacgatttcaaaagcctggtgaaccgttataatgaattggttgaaacggtcggcctggagatggccaataaacacgtctttggtccgcaagcgtcttctgaaactggcctggcagaaggctacgttcttaaacccgtcgcgccgcgcttctttaatgtgggtacgcgcgtggcgattaaatgcaagaactccaaattttcggagaaagcctttctgattgaaccaattaaagcgaaggttgaactgacggagaacgataaacgtctgctcggaatctttagcgaatatgttacctggaaccgcgtcagtaacgtactgtcacatattggctcagtgaccgccaaagattttgggcgggtttcgggtctgacgatgaaagacatcattcgcgaagcagcacgcgaaggccatgatctgttgtctgctgataacccgagcgcggtgctgaaggagctgacaggcctcatccagaacacgattcgctccaaatggcacgaagttctggag

SEQ ID NO: 2102 - protein, 346 aa, synthetic construct
  REGION 1..346: note = variant of RNA ligase 2 from Klebsiella phage KP179
MHHHHHHGGSNMFAYYSSLENHTNAKFISKIRGAGFLSHTVEWVAREKIHGTNFSVIITPTEIVPAKRTGPILEDESFFGHEIIMKKYMDSFKKVQNMLNPMDLVSVQIFGEFAGGGIQKGVDYGDKDFYVFDILSDSGNEKVYWDDYRVESFCTTVGLKLAPLLGRGSFAELSQYPNDFKSLVNRYNELVETVGLEMANKHVFGPQASSETGLAEGYVLKPVAPRFFNVGTRVAIKCKNSKFSEKAFLIEPIKAKVELTENDKRLLGIFSEYVTWNRVSNVLSHIGSVTAKDFGRVSGLTMKDIIREAAREGHDLLSADNPSAVLKELTGLIQNTIRSKWHEVLE

SEQ ID NO: 2103 - DNA, 1038 bp, synthetic construct
  misc_feature 1..1038: note = variant of RNA ligase 2 from Klebsiella phage KP179
  source 1..1038: mol_type = other DNA
atgcatcaccatcaccatcacggtggcagcaacatgtttgcgtattattcaagtctggaaaaccataccaatgccaagttcattagcaagatccgtggtgcaggcttcctgagccacaccgtggaatgggtagctcgcgagaagattcatggaacgaactttagcgttatcattactccgaccgaaatcgtgccggccaaacgcacagggccgatcttggaagacgagagcttctttggtcatgaagcgatcatgaaaaaatatatggactccttcaaaaaggtgcagaacatgctgaatgcgatggatcttgttagcgtgcaaatctttggcgaatttgcgggtggtggcattcagaaaggcgtcgattacggagacaaagatttctatgtgtttgacatcctgtctgatagcgggaacgagaaagtttactgggatgactatcgcgtcgaatcgttttgcaccactgtgggtctgaaattagcgcctctgctgggacgtggtagtttcgctgaactgtcccagtacccaaacgatttcaaaagcctggtgaaccgttataatgaattggttgatacggtcggcctggagatggccaataaacacgtctttggtccgcaagcgtcttctgaaactggcctggcagaaggctacgttcttaaacccgtctatccgcgcttctttaatgtgggtacgcgcgtggcgattaaatgcaagaactccaaattttcggagaaagcctttctgattgaaccaattaaagtgaaggttgaactgacggagaacgataaacgtctgctcggaatctttagcgaatatgttacctggaaccgcgtcagtaacgtactgtcacatattggctcagtgaccgccaaagattttgggcaggtttcgggtctgacgatgaaagacatcattcgcgaagcagcacgcgaaggccatgatctgttgtttgctgataacccgagcgcggtgctgaaggagctgacaggcctcatccagaacacgattcgctccaaatggcacgaagttctggag

SEQ ID NO: 2104 - protein, 346 aa, synthetic construct
  REGION 1..346: note = variant of RNA ligase 2 from Klebsiella phage KP179
MHHHHHHGGSNMFAYYSSLENHTNAKFISKIRGAGFLSHTVEWVAREKIHGTNFSVIITPTEIVPAKRTGPILEDESFFGHEAIMKKYMDSFKKVQNMLNAMDLVSVQIFGEFAGGGIQKGVDYGDKDFYVFDILSDSGNEKVYWDDYRVESFCTTVGLKLAPLLGRGSFAELSQYPNDFKSLVNRYNELVDTVGLEMANKHVFGPQASSETGLAEGYVLKPVYPRFFNVGTRVAIKCKNSKFSEKAFLIEPIKVKVELTENDKRLLGIFSEYVTWNRVSNVLSHIGSVTAKDFGQVSGLTMKDIIREAAREGHDLLFADNPSAVLKELTGLIQNTIRSKWHEVLE

SEQ ID NO: 2105 - DNA, 1038 bp, synthetic construct
  misc_feature 1..1038: note = variant of RNA ligase 2 from Klebsiella phage KP179
  source 1..1038: mol_type = other DNA
atgcatcaccatcaccatcacggtggcagcaacatgtttgcgtattattcaagtctggaaaaccataccaatgccaagttcattagcaagatccgtggtgcaggcttcctgagccacaccgtggaatgggtagctcgcgagaagattcatggaacgaactttagcgttatcattactccgaccgaaatcgtgccagccaaacgcacagggccgatcttggaagacgagagcttctttggtcatgaaattatcatgaaaaaatatatggactccttcaaaaaggtgcagaacatgctgaatgcgatggatcttgttagcgtgcaaatctttggcgaatttgcgggtggtggcattcagaaaggcgtcgattacggagacaaagatttctatgtgtttgacatcctgtctgatagcgggaacgagaaagtttactgggatgactatcgcgtcgaatcgttttgcaccactgtgggtctgaaattagcgcctctgctgggacgtggtagtttctctgaactgtcccagtacccaaacgatttcaaaagcctggtgaaccgttataatgaattggttgaaacggtcggcctggagatggccaataaacacgtctttggtccgcaagcgtcttctgaaactggcctggcagaaggctacgttcttaaacccgtctatccgcgcttttttaatgtgggtaaccgcgtggcgattaaatgcaagaacagcaaattttcggagaaagcctttctgattgaaccaattaaagcgaaggagatgctgacggagaacgataaacgtctgctcggaatctttagcgaatatgttacctggaaccgcgtcaacaacgtactgtcacatattggctcagtgaccgccaaagattttgggcgtgtttcgggtctgacgatgaaagacatcattcgcgaagcagcacgcgaaggccatgatctgttgttcgctgataacccgtcggcggtgctgaaggagctgacaggcctcatccagaacacgattcgctccaaatggcacgaagttctggag

SEQ ID NO: 2106 - protein, 346 aa, synthetic construct
  REGION 1..346: note = variant of RNA ligase 2 from Klebsiella phage KP179
MHHHHHHGGSNMFAYYSSLENHTNAKFISKIRGAGFLSHTVEWVAREKIHGTNFSVIITPTEIVPAKRTGPILEDESFFGHEIIMKKYMDSFKKVQNMLNAMDLVSVQIFGEFAGGGIQKGVDYGDKDFYVFDILSDSGNEKVYWDDYRVESFCTTVGLKLAPLLGRGSFSELSQYPNDFKSLVNRYNELVETVGLEMANKHVFGPQASSETGLAEGYVLKPVYPRFFNVGNRVAIKCKNSKFSEKAFLIEPIKAKEMLTENDKRLLGIFSEYVTWNRVNNVLSHIGSVTAKDFGRVSGLTMKDIIREAAREGHDLLFADNPSAVLKELTGLIQNTIRSKWHEVLE

SEQ ID NO: 2107 - DNA, 1038 bp, synthetic construct
  misc_feature 1..1038: note = variant of RNA ligase 2 from Klebsiella phage KP179
  source 1..1038: mol_type = other DNA
atgcatcaccatcaccatcacggtggcagcaacatgtttgcgtattattcaagtctggaaaaccataccaatgccaagttcattagcaagatccgtggtgcaggcttcctgagccacaccgtggaatgggtagctcgcgagaagattcatggaacgaactttagcgttatcattactccgaccgaaatcgtgccggccaaacgcacagggccgatcttggaagacgagagcttctttggtcatgaagcgatcatgaaaaaatatatggactccttcaaaaaggtgcagaacatgctgaatgcgatggatcttgttagcgtgcaaatctttggcgaatttgcgggtggtggcattcagaaaggcgtcgattacggagacaaagatttctatgtgtttgacatcctgtctgatagcgggaacgagaaagtttactgggatgactatcgcgtcgaatcgttttgcaccactgtgggtctgaaattagcgcctctgctgggacgtggtagtttcgctgaactgtcccagtacccaaacgatttcaaaagcctggtgaaccgttataatgaattggttgaaacggtcggcctggagatggccaataaacacgtctttggtccgcaagcgtcttctgaaactggcctggcagaaggctacgttcttaaacccgtcgcgccgcgcttctttaatgtgggtacgcgcgtggcgattaaatgcaagaactccaaattttcggagaaagcctttctgattgaaccaattaaagtgaaggttgaactgacggagaacgataaacgtctgctcggaatctttagcgaatatgttacctggaaccgcgtcagtaacgtactgtcacatattggctcagtgaccgccaaagattttgggcgggtttcgggtctgacgatgaaagacatcattcgcgaagcagcacgcgaaggccatgatctgttgtctgctgataacccgagcgcggtgctgaaggagctgacaggcctcatccagaacacgattcgctccaaatggcacgaagttctggag

SEQ ID NO: 2108 - protein, 346 aa, synthetic construct
  REGION 1..346: note = variant of RNA ligase 2 from Klebsiella phage KP179
MHHHHHHGGSNMFAYYSSLENHTNAKFISKIRGAGFLSHTVEWVAREKIHGTNFSVIITPTEIVPAKRTGPILEDESFFGHEAIMKKYMDSFKKVQNMLNAMDLVSVQIFGEFAGGGIQKGVDYGDKDFYVFDILSDSGNEKVYWDDYRVESFCTTVGLKLAPLLGRGSFAELSQYPNDFKSLVNRYNELVETVGLEMANKHVFGPQASSETGLAEGYVLKPVAPRFFNVGTRVAIKCKNSKFSEKAFLIEPIKVKVELTENDKRLLGIFSEYVTWNRVSNVLSHIGSVTAKDFGRVSGLTMKDIIREAAREGHDLLSADNPSAVLKELTGLIQNTIRSKWHEVLE

SEQ ID NO: 2109 - DNA, 1038 bp, synthetic construct
  misc_feature 1..1038: note = variant of RNA ligase 2 from Klebsiella phage KP179
  source 1..1038: mol_type = other DNA
atgcatcaccatcaccatcacggtggcagcaacatgtttgcgtattattcaagtctggaaaaccataccaatgccaagttcattagcaagatccgtggtgcaggcttcctgagccacaccgtggaatgggtagctcgcgagaagattcatggaacgaactttagcgttatcattactccgaccgaaatccagccggccaaacgcacagggccgatcttggaagacgagagcttctttggtcatgaaattatcatgaaaaaatatatggactccttcaaaaaggtgcagaacatgctgaatgcgatggatcttgttagcgtgcaaatctttggcgaatttgcgggtggtggcattcagaaaggcgtcgattacggagacaaagatttctatgtgtttgacatcctgtctgatagcgggaacgagaaagtttactgggatgactatcgcgtcgaatcgttttgcaccactgtgggtctgaaattagcgcctctgctgggacgtggtagtttcgctgaactgtcccagtacccaaacgatttcaaaagcctggtgaaccgttataatgaattggttgatacggtcggcctggagatggccaataaacacgtctttggtccgcaagcgtcttctgaaactggcctggcagaaggctacgttcttaaacccgtctatccgcgcttctttaatgtgggtacgcgcgtggcgattaaatgcaagaactccaaattttcggagaaagcctttctggaagaaccaattaaagcgaaggttgaactgacggagaacgataaacgtctgctcggaatctttagcgaatatgttacctggaaccgcgtcagtaacgtactgtcacatattggctcagtgaccgccaaagattttgggcgtgtttcgggtctgacgatgaaagacatcattcgcgaagcagcacgcgaaggccatgatctgttgtctgctgataacccgagcgcggtgctgaaggagctgacaggcctcatccagaacacgattcgctccaaatggcacgaagttctggag

SEQ ID NO: 2110 - protein, 346 aa, synthetic construct
  REGION 1..346: note = variant of RNA ligase 2 from Klebsiella phage KP179
MHHHHHHGGSNMFAYYSSLENHTNAKFISKIRGAGFLSHTVEWVAREKIHGTNFSVIITPTEIQPAKRTGPILEDESFFGHEIIMKKYMDSFKKVQNMLNAMDLVSVQIFGEFAGGGIQKGVDYGDKDFYVFDILSDSGNEKVYWDDYRVESFCTTVGLKLAPLLGRGSFAELSQYPNDFKSLVNRYNELVDTVGLEMANKHVFGPQASSETGLAEGYVLKPVYPRFFNVGTRVAIKCKNSKFSEKAFLEEPIKAKVELTENDKRLLGIFSEYVTWNRVSNVLSHIGSVTAKDFGRVSGLTMKDIIREAAREGHDLLSADNPSAVLKELTGLIQNTIRSKWHEVLE

SEQ ID NO: 2111 - DNA, 1038 bp, synthetic construct
  misc_feature 1..1038: note = variant of RNA ligase 2 from Klebsiella phage KP179
  source 1..1038: mol_type = other DNA
atgcatcaccatcaccatcacggtggcagcaacatgtttgcgtattattcaagtctggaaaaccataccaatgccaagttcattagcaagatccgtggtgcaggcttcctgagccacaccgtggaatgggtagctcgcgagaagattcatggaacgaactttagcgttatcattactccgaccgaaatcgtgccggccaaacgcacagggccgatcttggaagacgagagcttctttggtcatgaaattatcatgaaaaaatatatggactccttcaaaaaggtgcagaacatgctgaatccgatggatcttgttagcgtgcaaatctttggcgaatttgcgggtggtggcattcagaaaggcgtcgattacggagacaaagatttctatgtgtttgacatcctgtctgatagcgggaacgagaaagtttactgggatgactatcgcgtcgaatcgttttgcaccactgtgggtctgaaattagcgcctctgctgggacgtggtagtttcgctgaactgtcccagtacccaaacgatttcaaaagcctggtgaaccgttataatgaattggttgaaacggtcggcctggagatggccaataaacacgtctttggtccgcaagcgtcttctgaaactggcctggcagaaggctacgttcttaaacccgtctatccgcgcttctttaatgtgggtacgcgcgtggcgattaaatgcaagaactccaaattttcggagaaagcctttctgattgaaccaattaaagcgaaggttgaactgacggagaacgataaacgtctgctcggaatctttagcgaatatgttacctggaaccgcgtcagtaacgtactgtcacatattggctcagtgaccgccaaagattttgggcaggtttcgggtctgacgatgaaagacatcattcgcgaagcagcacgcgaaggccatgatctgttgttcgctgataacccgtcggcggtgctgaaggagctgacaggcctcatccagaacacgattcgctccaaatggcacgaagttctggag

SEQ ID NO: 2112 - protein, 346 aa, synthetic construct
  REGION 1..346: note = variant of RNA ligase 2 from Klebsiella phage KP179
MHHHHHHGGSNMFAYYSSLENHTNAKFISKIRGAGFLSHTVEWVAREKIHGTNFSVIITPTEIVPAKRTGPILEDESFFGHEIIMKKYMDSFKKVQNMLNPMDLVSVQIFGEFAGGGIQKGVDYGDKDFYVFDILSDSGNEKVYWDDYRVESFCTTVGLKLAPLLGRGSFAELSQYPNDFKSLVNRYNELVETVGLEMANKHVFGPQASSETGLAEGYVLKPVYPRFFNVGTRVAIKCKNSKFSEKAFLIEPIKAKVELTENDKRLLGIFSEYVTWNRVSNVLSHIGSVTAKDFGQVSGLTMKDIIREAAREGHDLLFADNPSAVLKELTGLIQNTIRSKWHEVLE

SEQ ID NO: 2113 - DNA, 1038 bp, synthetic construct
  misc_feature 1..1038: note = variant of RNA ligase 2 from Klebsiella phage KP179
  source 1..1038: mol_type = other DNA
atgcatcaccatcaccatcacggtggcagcaacatgtttgcgtattattcaagtctggaaaaccataccaatgccaagttcattagcaagatccgtggtgcaggcttcctgagccacaccgtggaatgggtagctcgcgagaagattcatggaacgaactttagcgttatcattactccgaccgaaatcgtgccagccaaacgcacagggccgatcttggaagacgagagcttctttggtcatgaaattatcatgaaaaaatatatggactccttcaaaaaggtgcagaacatgctgaatgcgatggatcttgttagcgtgcaaatctttggcgaatttgcgggtggtggcattcagaaaggcgtcgattacggagacaaagatttctatgtgtttgacatcctgtctgatagcgggaacgagaaagtttactgggatgactatcgcgtcgaatcgttttgcaccactgtgggtctgaaattagcgcctctgctgggacgtggtagtttcgctgaactgtcccagtacccaaacgatttcaaaagcctggtgaaccgttataatgaattggttgaaacggtcggcctggagatggccaataaacacgtctttggtccgcaagcgtcttctgaaactggcctggcagaaggctacgttcttaaacccgtctatccgcgcttttttaatgtgggtaaccgcgtggcgattaaatgcaagaacggcaaattttcggagaaagcctttctgattgagccaattaaagcgaaggtggaactgacggagaacgataaacgtctgctcggaatctttagcgaatatgttacctggaaccgcgtcaacaacgtactgtcacatattggctcagtgaccgccaaagattttgggcgtgtttcgggtctgacgatgaaagacatcattcgcgaagcagcacgcgaaggccatgatctgttgttcgctgataacccgtcggcggtgctgaaggagctgacaggcctcatccagaacacgattcgctccaaatggcacgaagttctggag

SEQ ID NO: 2114 - protein, 346 aa, synthetic construct
  REGION 1..346: note = variant of RNA ligase 2 from Klebsiella phage KP179
MHHHHHHGGSNMFAYYSSLENHTNAKFISKIRGAGFLSHTVEWVAREKIHGTNFSVIITPTEIVPAKRTGPILEDESFFGHEIIMKKYMDSFKKVQNMLNAMDLVSVQIFGEFAGGGIQKGVDYGDKDFYVFDILSDSGNEKVYWDDYRVESFCTTVGLKLAPLLGRGSFAELSQYPNDFKSLVNRYNELVETVGLEMANKHVFGPQASSETGLAEGYVLKPVYPRFFNVGNRVAIKCKNGKFSEKAFLIEPIKAKVELTENDKRLLGIFSEYVTWNRVNNVLSHIGSVTAKDFGRVSGLTMKDIIREAAREGHDLLFADNPSAVLKELTGLIQNTIRSKWHEVLE

SEQ ID NO: 2115 - DNA, 1038 bp, synthetic construct
  misc_feature 1..1038: note = variant of RNA ligase 2 from Klebsiella phage KP179
  source 1..1038: mol_type = other DNA
atgcatcaccatcaccatcacggtggcagcaacatgtttgcgtattattcaagtctggaaaaccataccaatgccaagttcattagcaagatccgtggtgcaggcttcctgagccacaccgtggaatgggtagctcgcgagaagattcatggaacgaactttagcgttatcattactccgaccgaaatccagccggccaaacgcacagggccgatcttggaagacgagagcttctttggtcatgaaattatcatgaaaaaatatatggactccttcaaaaaggtgcagaacatgctgaatgcgatggatcttgttagcgtgcaaatctttggcgaatttgcgggtggtggcattcagaaaggcgtcgattacggagacaaagatttctatgtgtttgacatcctgtctgatagcgggaacgagaaagtttactgggatgactatcgcgtcgaatcgttttgcaccactgtgggtctgaaattagcgcctctgctgggacgtggtagtttcgctgaactgtcccagtacccaaacgatttcaaaagcctggtgaaccgttataatgaattggttgaaacggtcggcctggagatggccaataaacacgtctttggtccgcaagcgtcttctgaaactggcctggcagaaggctacgttcttaaacccgtctatccgcgcttctttaatgtgggtacgcgcgtggcgattaaatgcaagaactccaaattttcggagaaagcctttctgattgaaccaattaaagtgaaggttgaactgacggagaacgataaacgtctgctcggaatctttagcgaatatgttacctggaaccgcgtcagtaacgtactgtcacatattggctcagtgaccgccaaagattttgggcgtgtttcgggtctgacgatgaaagacatcattcgcgaagcagcacgcgaaggccatgatctgttgtctgctgataacccgagcgcggtgctgaaggagctgacaggcctcatccagaacacgattcgctccaaatggcacgaagttctggag

SEQ ID NO: 2116 - protein, 346 aa, synthetic construct
  REGION 1..346: note = variant of RNA ligase 2 from Klebsiella phage KP179
MHHHHHHGGSNMFAYYSSLENHTNAKFISKIRGAGFLSHTVEWVAREKIHGTNFSVIITPTEIQPAKRTGPILEDESFFGHEIIMKKYMDSFKKVQNMLNAMDLVSVQIFGEFAGGGIQKGVDYGDKDFYVFDILSDSGNEKVYWDDYRVESFCTTVGLKLAPLLGRGSFAELSQYPNDFKSLVNRYNELVETVGLEMANKHVFGPQASSETGLAEGYVLKPVYPRFFNVGTRVAIKCKNSKFSEKAFLIEPIKVKVELTENDKRLLGIFSEYVTWNRVSNVLSHIGSVTAKDFGRVSGLTMKDIIREAAREGHDLLSADNPSAVLKELTGLIQNTIRSKWHEVLE

SEQ ID NO: 2117 - DNA, 1038 bp, synthetic construct
  misc_feature 1..1038: note = variant of RNA ligase 2 from Klebsiella phage KP179
  source 1..1038: mol_type = other DNA
atgcatcaccatcaccatcacggtggcagcaacatgtttgcgtattattcaagtctggaaaaccataccaatgccaagttcattagcaagatccgtggtgcaggcttcctgagccacaccgtggaatgggtagctcgcgagaagattcatggaacgaactttagcgttatcattactccgaccgaaatcgtgccggccaaacgcacagggccgatcttggaagacgagagcttctttggtcatgaaattatcatggataaatatatggactccttcaaaaaggtgcagaacatgctgaatgcgatggatcttgttagcgtgcaaatctttggcgaatttgcgggtggtggcattcagaaaggcgtcgattacggagacaaagatttctatgtgtttgacatcctgtctgatagcgggaacgagaaagtttactgggatgactatcgcgtcgaatcgttttgcaccactgtgggtctgaaattagcgcctctgctgggacgtggtagtttcgctgaactgtcccagtacccaaacgatttcaaaagcctggtgaaccgttataatgaattggttgaaacggtcggcctggagatggccaataaacacgtctttggtccgcaagcgtcttctgaaactggcctggcagaaggctacgttcttaaacccgtctatccgcgcttctttaatgtgggtacgcgcgtggcgattaaatgcaagaactccaaattttcggagaaagcctttctggaagaaccaattaaagtgaaggttgaactgacggagaacgataaacgtctgctcggaatctttagcgaatatgttacctggaaccgcgtcagtaacgtactgtcacatattggctcagtgaccgccaaagattttgggcgtgtttcgggtctgacgatgaaagacatcattcgcgaagcagcacgcgaaggccatgatctgttgtttgctgataacccgagcgcggtgctgaaggagctgacaggcctcatccagaacacgattcgctccaaatggcacgaagttctggag

SEQ ID NO: 2118 - protein, 346 aa, synthetic construct
  REGION 1..346: note = variant of RNA ligase 2 from Klebsiella phage KP179
MHHHHHHGGSNMFAYYSSLENHTNAKFISKIRGAGFLSHTVEWVAREKIHGTNFSVIITPTEIVPAKRTGPILEDESFFGHEIIMDKYMDSFKKVQNMLNAMDLVSVQIFGEFAGGGIQKGVDYGDKDFYVFDILSDSGNEKVYWDDYRVESFCTTVGLKLAPLLGRGSFAELSQYPNDFKSLVNRYNELVETVGLEMANKHVFGPQASSETGLAEGYVLKPVYPRFFNVGTRVAIKCKNSKFSEKAFLEEPIKVKVELTENDKRLLGIFSEYVTWNRVSNVLSHIGSVTAKDFGRVSGLTMKDIIREAAREGHDLLFADNPSAVLKELTGLIQNTIRSKWHEVLE

SEQ ID NO: 2119 - DNA, 1038 bp, synthetic construct
  misc_feature 1..1038: note = variant of RNA ligase 2 from Klebsiella phage KP179
  source 1..1038: mol_type = other DNA
atgcatcaccatcaccatcacggtggcagcaacatgtttgcgtattattcaagtctggaaaaccataccaatgccaagttcattagcaagatccgtggtgcaggcttcctgagccacaccgtggaatgggtagctcgcgagaagattcatggaacgaactttagcgttatcattactccgaccgaaatcgtgccggccaaacgcacagggccgatcttggaagacgagagcttctttggtcatgaagcgatcatggataaatatatggactccttcaaaaaggtgcagaacatgctgaatccgatggatcttgttagcgtgcaaatctttggcgaatttgcgggtggtggcattcagaaaggcgtcgattacggagacaaagatttctatgtgtttgacatcctgtctgatagcgggaacgagaaagtttactgggatgactatcgcgtcgaatcgttttgcaccactgtgggtctgaaattagcgcctctgctgggacgtggtagtttcgctgaactgtcccagtacccaaacgatttcaaaagcctggtgaaccgttataatgaattggttgaaacggtcggcctggagatggccaataaacacgtctttggtccgcaagcgtcttctgaaactggcctggcagaaggctacgttcttaaacccgtctatccgcgcttctttaatgtgggtacgcgcgtggcgattaaatgcaagaactccaaattttcggagaaagcctttctgattgaaccaattaaagcgaaggttgaactgacggagaacgataaacgtctgctcggaatctttagcgaatatgttacctggaaccgcgtcagtaacgtactgtcacatattggctcagtgaccgccaaagattttgggcgtgtttcgggtctgacgatgaaagacatcattcgcgaagcagcacgcgaaggccatgatctgttgttcgctgataacccgtcggcggtgctgaaggagctgacaggcctcatccagaacacgattcgctccaaatggcacgaagttctggag

SEQ ID NO: 2120 - protein, 346 aa, synthetic construct
  REGION 1..346: note = variant of RNA ligase 2 from Klebsiella phage KP179
MHHHHHHGGSNMFAYYSSLENHTNAKFISKIRGAGFLSHTVEWVAREKIHGTNFSVIITPTEIVPAKRTGPILEDESFFGHEAIMDKYMDSFKKVQNMLNPMDLVSVQIFGEFAGGGIQKGVDYGDKDFYVFDILSDSGNEKVYWDDYRVESFCTTVGLKLAPLLGRGSFAELSQYPNDFKSLVNRYNELVETVGLEMANKHVFGPQASSETGLAEGYVLKPVYPRFFNVGTRVAIKCKNSKFSEKAFLIEPIKAKVELTENDKRLLGIFSEYVTWNRVSNVLSHIGSVTAKDFGRVSGLTMKDIIREAAREGHDLLFADNPSAVLKELTGLIQNTIRSKWHEVLE

SEQ ID NO: 2121 - DNA, 1038 bp, synthetic construct
  misc_feature 1..1038: note = variant of RNA ligase 2 from Klebsiella phage KP179
  source 1..1038: mol_type = other DNA
atgcatcaccatcaccatcacggtggcagcaacatgtttgcgtattattcaagtctggaaaaccataccaatgccaagttcattagcaagatccgtggtgcaggcttcctgagccacaccgtggaatgggtagctcgcgagaagattcatggaacgaactttagcgttatcattactccgaccgaaatcgtgccggccaaacgcacagggccgatcttggaagacgagagcttctttggtcatgaagcgatcatggataaatatatggactccttcaaaaaggtgcagaacatgctgaatgcgatggatcttgttagcgtgcaaatctttggcgaatttgcgggtggtggcattcagaaaggcgtcgattacggagacaaagatttctatgtgtttgacatcctgtctgatagcgggaacgagaaagtttactgggatgactatcgcgtcgaatcgttttgcaccactgtgggtctgaaattagcgcctctgctgggacgtggtagtttcgctgaactgtcccagtacccaaacgatttcaaaagcctggtgaaccgttataatgaattggttgaaacggtcggcctggagatggccaataaacacgtctttggtccgcaagcgtcttctgaaactggcctggcagaaggctacgttcttaaacccgtctatccgcgcttctttaatgtgggtacgcgcgtggcgattaaatgcaagaactccaaattttcggagaaagcctttctgattgaaccaattaaagcgaaggttgaactgacggagaacgataaacgtctgctcggaatctttagcgaatatgttacctggaaccgcgtcagtaacgtactgtcacatattggctcagtgaccgccaaagattttgggcgtgtttcgggtctgacgatgaaagacatcattcgcgaagcagcacgcgaaggccatgatctgttgttcgctgataacccgtcggcggtgctgaaggagctgacaggcctcatccagaacacgattcgctccaaatggcacgaagttctggag

SEQ ID NO: 2122 - protein, 346 aa, synthetic construct
  REGION 1..346: note = variant of RNA ligase 2 from Klebsiella phage KP179
MHHHHHHGGSNMFAYYSSLENHTNAKFISKIRGAGFLSHTVEWVAREKIHGTNFSVIITPTEIVPAKRTGPILEDESFFGHEAIMDKYMDSFKKVQNMLNAMDLVSVQIFGEFAGGGIQKGVDYGDKDFYVFDILSDSGNEKVYWDDYRVESFCTTVGLKLAPLLGRGSFAELSQYPNDFKSLVNRYNELVETVGLEMANKHVFGPQASSETGLAEGYVLKPVYPRFFNVGTRVAIKCKNSKFSEKAFLIEPIKAKVELTENDKRLLGIFSEYVTWNRVSNVLSHIGSVTAKDFGRVSGLTMKDIIREAAREGHDLLFADNPSAVLKELTGLIQNTIRSKWHEVLE

SEQ ID NO: 2123 - DNA, 1038 bp, synthetic construct
  misc_feature 1..1038: note = variant of RNA ligase 2 from Klebsiella phage KP179
  source 1..1038: mol_type = other DNA
atgcatcaccatcaccatcacggtggcagcaacatgtttgcgtattattcaagtctggaaaaccataccaatgccaagttcattagcaagatccgtggtgcaggcttcctgagccacaccgtggaatgggtagctcgcgagaagattcatggaacgaactttagcgttatcattactccgaccgaaatcgtgccagccaaacgcacagggccgatcttggaagacgagagcttctttggtcatgaaattatcatgaaaaaatatatggactccttcgtgaaggtgcagaacatgctgaatgcgatggatcttgttagcgtgcaaatctttggcgaatttgcgggtggtggcattcagaaaggcgtcgattacggagacaaagatttctatgtgtttgacatcctgtctgatagcgggaacgagaaagtttactgggatgactatcgcgtcgaatcgttttgcaccactgtgggtctgaaattagcgcctctgctgggacgtggtagtttcgctgaactgtcccagtacccaaacgatttcaaaagcctggtgaaccgttataatgaattggttgaaacggtcggcctggagatggccaataaacacgtctttggtccgcaagcgtcttctgaaactggcctggcagaaggctacgttcttaaacccgtctatccgcgcttttttaatgtgggtacccgcgtggcgattaaatgcaagaacggcaaattttcggagaaagcctttctgattgaaccaattaaagcgaaggtgatgctgacggagaacgataaacgtctgctcggaatctttagcgaatatgttacctggaaccgcgtcagtaacgtactgtcacatattggctcagtgaccgccaaagattttgggcgtgtttcgggtctgacgatgaaagacatcattcgcgaagcagcacgcgaaggccatgatctgttgttcgctgataacccgtcggcggtgctgaaggagctgacaggcctcatccagcagacgattcgctccaaatggcacgaagttctggag

SEQ ID NO: 2124 - protein, 346 aa, synthetic construct
  REGION 1..346: note = variant of RNA ligase 2 from Klebsiella phage KP179
MHHHHHHGGSNMFAYYSSLENHTNAKFISKIRGAGFLSHTVEWVAREKIHGTNFSVIITPTEIVPAKRTGPILEDESFFGHEIIMKKYMDSFVKVQNMLNAMDLVSVQIFGEFAGGGIQKGVDYGDKDFYVFDILSDSGNEKVYWDDYRVESFCTTVGLKLAPLLGRGSFAELSQYPNDFKSLVNRYNELVETVGLEMANKHVFGPQASSETGLAEGYVLKPVYPRFFNVGTRVAIKCKNGKFSEKAFLIEPIKAKVMLTENDKRLLGIFSEYVTWNRVSNVLSHIGSVTAKDFGRVSGLTMKDIIREAAREGHDLLFADNPSAVLKELTGLIQQTIRSKWHEVLE

SEQ ID NO: 2125 - DNA, 1038 bp, synthetic construct
  misc_feature 1..1038: note = variant of RNA ligase 2 from Klebsiella phage KP179
  source 1..1038: mol_type = other DNA
atgcatcaccatcaccatcacggtggcagcaacatgtttgcgtattattcaagtctggaaaaccataccaatgccaagttcattagcaagatccgtggtgcaggcttcctgagccacaccgtggaatgggtagctcgcgagaagattcatggaacgaactttagcgttatcattactccgaccgaaatcgtgccggccaaacgcacagggccgatcttggaagacgagagcttctttggtcatgaaattatcatgaaaaaatatatggactccttcaaaaaggtgcagaacatgctgaatgcgatggatcttgttagcgtgcaaatctttggcgaatttgcgggtggtggcattcagaaaggcgtcgattacggagacaaagatttctatgtgtttgacatcctgtctgatagcgggaacgagaaagtttactgggatgactatcgcgtcgaatcgttttgcaccactgtgggtctgaaattagcgcctctgctgggacgtggtagtttcgctgaactgtcccagtacccaaacgatttcaaaagcctggtgaaccgttataatgaattggttgaaacggtcggcctggagatggccaataaacacgtctttggtccgcaagcgtcttctgaaactggcctggcagaaggctacgttcttaaacccgtctatccgcgcttctttaatgtgggtacgcgcgtggcgattaaatgcaagaactccaaattttcggagaaagcctttctggaagaaccaattaaagcgaaggttgaactgacggagaacgataaacgtctgctcggaatctttagcgaatatgttacctggaaccgcgtcagtaacgtactgtcacatattggctcagtgaccgccaaagattttgggcaggtttcgggtctgacgatgaaagacatcattcgcgaagcagcacgcgaaggccatgatctgttgtttgctgataacccgggcgcggtgctgaaggagctgacaggcctcatccagaacacgattcgctccaaatggcacgaagttctggag

SEQ ID NO: 2126 - protein, 346 aa, synthetic construct
  REGION 1..346: note = variant of RNA ligase 2 from Klebsiella phage KP179
MHHHHHHGGSNMFAYYSSLENHTNAKFISKIRGAGFLSHTVEWVAREKIHGTNFSVIITPTEIVPAKRTGPILEDESFFGHEIIMKKYMDSFKKVQNMLNAMDLVSVQIFGEFAGGGIQKGVDYGDKDFYVFDILSDSGNEKVYWDDYRVESFCTTVGLKLAPLLGRGSFAELSQYPNDFKSLVNRYNELVETVGLEMANKHVFGPQASSETGLAEGYVLKPVYPRFFNVGTRVAIKCKNSKFSEKAFLEEPIKAKVELTENDKRLLGIFSEYVTWNRVSNVLSHIGSVTAKDFGQVSGLTMKDIIREAAREGHDLLFADNPGAVLKELTGLIQNTIRSKWHEVLE

SEQ ID NO: 2127 - DNA, 1038 bp, synthetic construct
  misc_feature 1..1038: note = variant of RNA ligase 2 from Klebsiella phage KP179
  source 1..1038: mol_type = other DNA
atgcatcaccatcaccatcacggtggcagcaacatgtttgcgtattattcaagtctggaaaaccataccaatgccaagttcattagcaagatccgtggtgcaggcttcctgagccacaccgtggaatgggtagctcgcgagaagattcatggaacgaactttagcgttatcattactccgaccgaaatcgtgccagccaaacgcacagggccgatcttggaagacgagagcttctttggtcatgaaattatcatgaaaaaatatatggactccttcaaaaaggtgcagaacatgctgaatgcgatggatcttgttagcgtgcaaatctttggcgaatttgcgggtggtggcattcagaaaggcgtcgattacggagacaaagatttctatgtgtttgacatcctgtctgatagcgggaacgagaaagtttactgggatgactatcgcgtcgaatcgttttgcaccactgtgggtctgaaattagcgcctctgctgggacgtggtagtttcgctgaactgtcccagtacccaaacgatttcaaaagcctggtgaaccgttataatgaattggttgaaacggtcggcctggagatggccaataaacacgtctttggtccgcaagcgtcttctgaaactggcctggcagaaggctacgttcttaaacccgtctatccgcgcttttttaatgtgggtacccgcgtggcgattaaatgcaagaacagcaaattttcggagaaagcctttctgattgaaccaattaaagcgaaggagatgctgacggagaacgataaacgtctgctcggaatctttagcgaatatgttacctggaaccgcgtcaacaacgtactgtcacatattggctcagtgaccgccaaagattttgggcgtgtttcgggtctgacgatgaaagacatcattcgcgaagcagcacgcgaaggccatgatctgttgttcgctgataacccgtcggcggtgctgaaggagctgacaggcctcatccagaacacgattcgctccaaatggcacgaagttctggag

SEQ ID NO: 2128 - protein, 346 aa, synthetic construct
  REGION 1..346: note = variant of RNA ligase 2 from Klebsiella phage KP179
MHHHHHHGGSNMFAYYSSLENHTNAKFISKIRGAGFLSHTVEWVAREKIHGTNFSVIITPTEIVPAKRTGPILEDESFFGHEIIMKKYMDSFKKVQNMLNAMDLVSVQIFGEFAGGGIQKGVDYGDKDFYVFDILSDSGNEKVYWDDYRVESFCTTVGLKLAPLLGRGSFAELSQYPNDFKSLVNRYNELVETVGLEMANKHVFGPQASSETGLAEGYVLKPVYPRFFNVGTRVAIKCKNSKFSEKAFLIEPIKAKEMLTENDKRLLGIFSEYVTWNRVNNVLSHIGSVTAKDFGRVSGLTMKDIIREAAREGHDLLFADNPSAVLKELTGLIQNTIRSKWHEVLE

SEQ ID NO: 2129 - DNA, 1038 bp, synthetic construct
  misc_feature 1..1038: note = variant of RNA ligase 2 from Klebsiella phage KP179
  source 1..1038: mol_type = other DNA
atgcatcaccatcaccatcacggtggcagcaacatgtttgcgtattattcaagtctggaaaaccataccaatgccaagttcattagcaagatccgtggtgcaggcttcctgatgcacaccgtggaatgggtagctcgcgagaagattcatggaacgaactttagcgttatcattactccgaccgaaatcgtgccagccaaacgcacagggccgatcttggaagatgagagcttctttggtcatgaaattatcatgaaaaaatatgatgactccttcgtgaaggtgcagaacatgctgaatgcgatggatcttgttagcgtgcaaatctttggcgaatttgcgggtggtggcattcagaaaggcgtcgattacggagacaaagatttctatgtgtttgacatcctgtctgatagcgggaacgagaaagtttactgggatgactatcgcgtcgaatcgttttgcaccactgtgggtctgaaattagcgcctctgctgggacgtggtagtttcgctgaactgtcccagtacccaaacgatttcaaaagcctggtgaaccgttataatgaattggttgacacggtcggcctggagatggccaataaacacgtctttggtccgcaagcgtcttctgaaactggcctggcagaaggctacgttcttaaacccgtctatccgcgcttctttaatgtgggtacgcgcgtggcgattaaatgcaagaactccaaattttcggagaaagccaaactgatttcgccaattaaagcgaaggttgaactgacggagaacgataaacgtctgctcggaatctttagcgaatatgttacctggaatcgcgtcagtaacgtactgtcacatattggctcagtgaccgccaaagattttgggcgtgtttcgggtctgacgatgaaagacatcattcgcgaagcagcacgcgaaggccatgatctgttgttcgctgataacccgtcggcggtgctgaaggagctgacaggcctcatccagaacacgattcgctccaaatggcacgaagttctggag

SEQ ID NO: 2130 - protein, 346 aa, synthetic construct
  REGION 1..346: note = variant of RNA ligase 2 from Klebsiella phage KP179
MHHHHHHGGSNMFAYYSSLENHTNAKFISKIRGAGFLMHTVEWVAREKIHGTNFSVIITPTEIVPAKRTGPILEDESFFGHEIIMKKYDDSFVKVQNMLNAMDLVSVQIFGEFAGGGIQKGVDYGDKDFYVFDILSDSGNEKVYWDDYRVESFCTTVGLKLAPLLGRGSFAELSQYPNDFKSLVNRYNELVDTVGLEMANKHVFGPQASSETGLAEGYVLKPVYPRFFNVGTRVAIKCKNSKFSEKAKLISPIKAKVELTENDKRLLGIFSEYVTWNRVSNVLSHIGSVTAKDFGRVSGLTMKDIIREAAREGHDLLFADNPSAVLKELTGLIQNTIRSKWHEVLE

SEQ ID NO: 2131 - DNA, 1038 bp, synthetic construct
  misc_feature 1..1038: note = variant of RNA ligase 2 from Klebsiella phage KP179
  source 1..1038: mol_type = other DNA
atgcatcaccatcaccatcacggtggcagcaacatgtttgcgtattattcaagtctggaaaaccataccaatgccaagttcattagcaagatccgtggtgcaggcttcctgatgcacaccgtggaatgggtagctcgcgagaagattcatggaacgaactttagcgttatcattactccgaccgaaatcgtgccagccaaacgcacagggccgatcttggaagatgagagcttctttggtcatgaaattatcatgaaaaaatatgaggactccttcgtgaaggtgcagaacatgctgaatgcgatggatcttgttagcgtgcaaatctttggcgaatttgcgggtggtggcattcagaaaggcgtcgattacggagacaaagatttctatgtgtttgacatcctgtctgatagcgggaacgagaaagtttactgggatgactatcgcgtcgaatcgttttgcaccactgtgggtctgaaattagcgcctctgctgggacgtggtagtttcgctgaactgtcccagtacccaaacgatttcaaaagcctggtgaaccgttataatgaattggttgacacggtcggcctggagatggccaataaacacgtctttggtccgcaagcgtcttctgaaactggcctggcagaaggctacgttcttaaacccgtctatccgcgcttctttaatgtgggtacgcgcgtggcgattaaatgcaagaactccaaattttcggagaaagccaaactgatttcgccaattaaagcgaaggttgaactgacggagaacgataaacgtctgctcggaatctttagcgaatatgttacctggaatcgcgtcagtaacgtactgtcacatattggctcagtgaccgccaaagattttgggcgtgtttcgggtctgacgatgaaagacatcattcgcgaagcagcacgcgaaggccatgatctgttgttcgctgataacccgtcggcggtgctgaaggagctgacaggcctcatccagaacacgattcgctccaaatggcacgaagttctggag

SEQ ID NO: 2132 - protein, 346 aa, synthetic construct
  REGION 1..346: note = variant of RNA ligase 2 from Klebsiella phage KP179
MHHHHHHGGSNMFAYYSSLENHTNAKFISKIRGAGFLMHTVEWVAREKIHGTNFSVIITPTEIVPAKRTGPILEDESFFGHEIIMKKYEDSFVKVQNMLNAMDLVSVQIFGEFAGGGIQKGVDYGDKDFYVFDILSDSGNEKVYWDDYRVESFCTTVGLKLAPLLGRGSFAELSQYPNDFKSLVNRYNELVDTVGLEMANKHVFGPQASSETGLAEGYVLKPVYPRFFNVGTRVAIKCKNSKFSEKAKLISPIKAKVELTENDKRLLGIFSEYVTWNRVSNVLSHIGSVTAKDFGRVSGLTMKDIIREAAREGHDLLFADNPSAVLKELTGLIQNTIRSKWHEVLE

SEQ ID NO: 2133 - DNA, 1038 bp, synthetic construct
  misc_feature 1..1038: note = variant of RNA ligase 2 from Klebsiella phage KP179
  source 1..1038: mol_type = other DNA
atgcatcaccatcaccatcacggtggcagcaacatgtttgcgtattattcaagtctggaaaaccataccaatgccaagttcattagcaagatccgtggtgcaggcttcctgatgcacaccgtggaatgggtagctcgcgagaagattcatggaacgaactttagcgttatcattactccgaccgaaatcgtgccagccaaacgcacagggccgatcttggaagatgagagcttctttggtcatgaaattatcatgaaaaaatatatggactccttcgtgaaggtgcagaacatgctgaatgcgatggatcttgttagcgtgcaaatctttggcgaatttgcgggtggtggcattcagaaaggctttgattacggagacaaagatttctatgtgtttgacatcctgtctgatagcgggaacgagaaagtttactgggatgactatcgcgtcgaatcgttttgcaccactgtgggtctgaaattagcgcctctgctgggacgtggtagtttcgctgaactgtcccagtacccaaacgatttcaaaagcctggtgaaccgttataatgaattggttgacacggtcggcctggagatggccaataaacacgtctttggtccgcaagcgtcttctgaaactggcctggcagaaggctacgttcttaaacccgtctatccgcgcttctttaatgtgggtacgcgcgtggcgattaaatgcaagaactccaaattttcggagaaagccaaactgatttcgccaattaaagcgaaggttgaactgacggagaacgataaacgtctgctcggaatctttagcgaatatgttacctggaatcgcgtcagtaacgtactgtcacatattggctcagtgaccgccaaagattttgggcgtgtttcgggtctgacgatgaaagacatcattcgcgaagcagcacgcgaaggccatgatctgttgttcgctgataacccgtcggcggtgctgaaggagctgacaggcctcatccagaacacgattcgctccaaatggcacgaagttctggag

SEQ ID NO: 2134 - protein, 346 aa, synthetic construct
  REGION 1..346: note = variant of RNA ligase 2 from Klebsiella phage KP179
MHHHHHHGGSNMFAYYSSLENHTNAKFISKIRGAGFLMHTVEWVAREKIHGTNFSVIITPTEIVPAKRTGPILEDESFFGHEIIMKKYMDSFVKVQNMLNAMDLVSVQIFGEFAGGGIQKGFDYGDKDFYVFDILSDSGNEKVYWDDYRVESFCTTVGLKLAPLLGRGSFAELSQYPNDFKSLVNRYNELVDTVGLEMANKHVFGPQASSETGLAEGYVLKPVYPRFFNVGTRVAIKCKNSKFSEKAKLISPIKAKVELTENDKRLLGIFSEYVTWNRVSNVLSHIGSVTAKDFGRVSGLTMKDIIREAAREGHDLLFADNPSAVLKELTGLIQNTIRSKWHEVLE

SEQ ID NO: 2135 - DNA, 1038 bp, synthetic construct
  misc_feature 1..1038: note = variant of RNA ligase 2 from Klebsiella phage KP179
  source 1..1038: mol_type = other DNA
atgcatcaccatcaccatcacggtggcagcaacatgtttgcgtattattcaagtctggaaaaccataccaatgccaagttcattagcaagatccgtggtgcaggcttcctgatgcacaccgtggaatgggtagctcgcgagaagattcatggaacgaactttagcgttatcattactccgaccgaaatcgtgccagccaaacgcacagggccgatcttggaagatgagagcttctttggtcatgaaattatcatgaaaaaatatatggactccttcgtgaaggtgcagaacatgctgaatgcgatggatcttgttagcgtgcaaatctttggcgaatttgcgggtggtggcattcagaaaggcgtcgattacggagacaaagatttctatgtgtttgacatcctgtctgatagcgggaacgagaaagtttactgggatgactatcgcgtcgaatcgttttgcaccactgtgggtctgaaattagcgcctctgctgggacgtggtagtttcgctgaactgtcccagtacccaaacgatttcccgagcctggtgaaccgttataatgaattggttgacacggtcggcctggagatggccaataaacacgtctttggtccgcaagcgtcttctgaaactggcctggcagaaggctacgttcttaaacccgtctatccgcgcttctttaatgtgggtacgcgcgtggcgattaaatgcaagaactccaaattttcggagaaagccaaactgatttcgccaattaaagcgaaggttgaactgacggagaacgataaacgtctgctcggaatctttagcgaatatgttacctggaatcgcgtcagtaacgtactgtcacatattggctcagtgaccgccaaagattttgggcgtgtttcgggtctgacgatgaaagacatcattcgcgaagcagcacgcgaaggccatgatctgttgttcgctgataacccgtcggcggtgctgaaggagctgacaggcctcatccagaacacgattcgctccaaatggcacgaagttctggag

SEQ ID NO: 2136 - protein, 346 aa, synthetic construct
  REGION 1..346: note = variant of RNA ligase 2 from Klebsiella phage KP179
MHHHHHHGGSNMFAYYSSLENHTNAKFISKIRGAGFLMHTVEWVAREKIHGTNFSVIITPTEIVPAKRTGPILEDESFFGHEIIMKKYMDSFVKVQNMLNAMDLVSVQIFGEFAGGGIQKGVDYGDKDFYVFDILSDSGNEKVYWDDYRVESFCTTVGLKLAPLLGRGSFAELSQYPNDFPSLVNRYNELVDTVGLEMANKHVFGPQASSETGLAEGYVLKPVYPRFFNVGTRVAIKCKNSKFSEKAKLISPIKAKVELTENDKRLLGIFSEYVTWNRVSNVLSHIGSVTAKDFGRVSGLTMKDIIREAAREGHDLLFADNPSAVLKELTGLIQNTIRSKWHEVLE

SEQ ID NO: 2137 - DNA, 1038 bp, synthetic construct
  misc_feature 1..1038: note = variant of RNA ligase 2 from Klebsiella phage KP179
  source 1..1038: mol_type = other DNA
atgcatcaccatcaccatcacggtggcagcaacatgtttgcgtattattcaagtctggaaaaccataccaatgccaagttcgtgagcaagatccgtggtgcaggcttcctgatgcacaccgtggaatgggtagctcgcgagaagattcatggaacgaactttagcgttatcattactccgaccgaaatcgtgccagccaaacgcacagggccgatcttggaagatgagagcttctttggtcatgaaattatcatgaaaaaatatatggactccttcgtgaaggtgcagaacatgctgaatgcgatggatcttgttagcgtgcaaatctttggcgaatttgcgggtggtggcattcagaaaggcgtcgattacggagacaaagatttctatgtgtttgacatcctgtctgatagcgggaacgagaaagtttactgggatgactatcgcgtcgaatcgttttgcaccactgtgggtctgaaattagcgcctctgctgggacgtggtagtttcgctgaactgtcccagtacccaaacgatttcaaaagcctggtgaaccgttataatgaattggttgacacggtcggcctggagatggccaataaacacgtctttggtccgcaagcgtcttctgaaactggcctggcagaaggctacgttcttaaacccgtctatccgcgcttctttaatgtgggtacgcgcgtggcgattaaatgcaagaactccaaattttcggagaaagccaaactgatttcgccaattaaagcgaaggttgaactgacggagaacgataaacgtctgctcggaatctttagcgaatatgttacctggaatcgcgtcagtaacgtactgtcacatattggctcagtgaccgccaaagattttgggcgtgtttcgggtctgacgatgaaagacatcattcgcgaagcagcacgcgaaggccatgatctgttgttcgctgataacccgtcggcggtgctgaaggagctgacaggcctcatccagaacacgattcgctccaaatggcacgaagttctggag

SEQ ID NO: 2138 - protein, 346 aa, synthetic construct
  REGION 1..346: note = variant of RNA ligase 2 from Klebsiella phage KP179
MHHHHHHGGSNMFAYYSSLENHTNAKFVSKIRGAGFLMHTVEWVAREKIHGTNFSVIITPTEIVPAKRTGPILEDESFFGHEIIMKKYMDSFVKVQNMLNAMDLVSVQIFGEFAGGGIQKGVDYGDKDFYVFDILSDSGNEKVYWDDYRVESFCTTVGLKLAPLLGRGSFAELSQYPNDFKSLVNRYNELVDTVGLEMANKHVFGPQASSETGLAEGYVLKPVYPRFFNVGTRVAIKCKNSKFSEKAKLISPIKAKVELTENDKRLLGIFSEYVTWNRVSNVLSHIGSVTAKDFGRVSGLTMKDIIREAAREGHDLLFADNPSAVLKELTGLIQNTIRSKWHEVLE

SEQ ID NO: 2139 - DNA, 1038 bp, synthetic construct
  misc_feature 1..1038: note = variant of RNA ligase 2 from Klebsiella phage KP179
  source 1..1038: mol_type = other DNA
atgcatcaccatcaccatcacggtggcagcaacatgtttgcgtattattcaagtctggaaaaccataccaatgccaagttcattagcaagatccgtggtgcaggcttcctgatgcacaccgtggaatgggtagctcgcgagaagattcatggaacgaactttagcgttatcattactccgaccgaaatcgtgccagccaaacgcacagggccgatcttggaagatgagagcttctttggtcatgaaattatcatgaaaaaatatatggactccttcgtgaaggtgcagaacatgctgaatgcgatggatcttgttagcgtgcaaatctttggcgaatttgcgggtggtggcattcagaaaggcgtcgattacaaggacaaagatttctatgtgtttgacatcctgtctgatagcgggaacgagaaagtttactgggatgactatcgcgtcgaatcgttttgcaccactgtgggtctgaaattagcgcctctgctgggacgtggtagtttcgctgaactgtcccagtacccaaacgatttcaaaagcctggtgaaccgttataatgaattggttgacacggtcggcctggagatggccaataaacacgtctttggtccgcaagcgtcttctgaaactggcctggcagaaggctacgttcttaaacccgtctatccgcgcttctttaatgtgggtacgcgcgtggcgattaaatgcaagaactccaaattttcggagaaagccaaactgatttcgccaattaaagcgaaggttgaactgacggagaacgataaacgtctgctcggaatctttagcgaatatgttacctggaatcgcgtcagtaacgtactgtcacatattggctcagtgaccgccaaagattttgggcgtgtttcgggtctgacgatgaaagacatcattcgcgaagcagcacgcgaaggccatgatctgttgttcgctgataacccgtcggcggtgctgaaggagctgacaggcctcatccagaacacgattcgctccaaatggcacgaagttctggag

SEQ ID NO: 2140 - protein, 346 aa, synthetic construct
  REGION 1..346: note = variant of RNA ligase 2 from Klebsiella phage KP179
MHHHHHHGGSNMFAYYSSLENHTNAKFISKIRGAGFLMHTVEWVAREKIHGTNFSVIITPTEIVPAKRTGPILEDESFFGHEIIMKKYMDSFVKVQNMLNAMDLVSVQIFGEFAGGGIQKGVDYKDKDFYVFDILSDSGNEKVYWDDYRVESFCTTVGLKLAPLLGRGSFAELSQYPNDFKSLVNRYNELVDTVGLEMANKHVFGPQASSETGLAEGYVLKPVYPRFFNVGTRVAIKCKNSKFSEKAKLISPIKAKVELTENDKRLLGIFSEYVTWNRVSNVLSHIGSVTAKDFGRVSGLTMKDIIREAAREGHDLLFADNPSAVLKELTGLIQNTIRSKWHEVLE

SEQ ID NO: 2141 - DNA, 1038 bp, synthetic construct
  misc_feature 1..1038: note = variant of RNA ligase 2 from Klebsiella phage KP179
  source 1..1038: mol_type = other DNA
atgcatcaccatcaccatcacggtggcagcaacatgtttgcgtattattcaagtctggaaaaccataccaatgccaagttcattagcaagatccgtggtgcaggcttcctgatgcacaccgtggaatgggtagctcgcgagaagattcatggaacgaactttagcgttatcattactccgaccgaaatcgtgccagccaaacgcacagggccgatcttggaagatgagagcttctttggtcatgaaattatcatgaaaaaatatatggactccttcgtgaaggtgcagaacatgctgaatgcgatggatcttgttagcgtgcaaatctttggcgaatttgcgggtggtggcattcagaaaggcgtcgattacggagacaaagatttctatgtgtttgacatcctgtctgatagcgggaacgagaaagtttactgggatgactatcgcgtcgaatcgttttgcaccactgtgggtctgaaattagcgcctctgctgggacgtggtagtttcgctgaactgtcccagtacccaaacgatttccgtagcctggtgaaccgttataatgaattggttgacacggtcggcctggagatggccaataaacacgtctttggtccgcaagcgtcttctgaaactggcctggcagaaggctacgttcttaaacccgtctatccgcgcttctttaatgtgggtacgcgcgtggcgattaaatgcaagaactccaaattttcggagaaagccaaactgatttcgccaattaaagcgaaggttgaactgacggagaacgataaacgtctgctcggaatctttagcgaatatgttacctggaatcgcgtcagtaacgtactgtcacatattggctcagtgaccgccaaagattttgggcgtgtttcgggtctgacgatgaaagacatcattcgcgaagcagcacgcgaaggccatgatctgttgttcgctgataacccgtcggcggtgctgaaggagctgacaggcctcatccagaacacgattcgctccaaatggcacgaagttctggag

SEQ ID NO: 2142 - protein, 346 aa, synthetic construct
  REGION 1..346: note = variant of RNA ligase 2 from Klebsiella phage KP179
MHHHHHHGGSNMFAYYSSLENHTNAKFISKIRGAGFLMHTVEWVAREKIHGTNFSVIITPTEIVPAKRTGPILEDESFFGHEIIMKKYMDSFVKVQNMLNAMDLVSVQIFGEFAGGGIQKGVDYGDKDFYVFDILSDSGNEKVYWDDYRVESFCTTVGLKLAPLLGRGSFAELSQYPNDFRSLVNRYNELVDTVGLEMANKHVFGPQASSETGLAEGYVLKPVYPRFFNVGTRVAIKCKNSKFSEKAKLISPIKAKVELTENDKRLLGIFSEYVTWNRVSNVLSHIGSVTAKDFGRVSGLTMKDIIREAAREGHDLLFADNPSAVLKELTGLIQNTIRSKWHEVLE

SEQ ID NO: 2143 - DNA, 1038 bp, synthetic construct
  misc_feature 1..1038: note = variant of RNA ligase 2 from Klebsiella phage KP179
  source 1..1038: mol_type = other DNA
atgcatcaccatcaccatcacggtggcagcaacatgtttgcgtattattcaagtctggaaaaccataccaatgccaagttcattagcaagatccgtggtgcaggcttcctgatgcacaccgtggaatgggtagctcgcgagaagattcatggaacgaactttagcgttatcattactccgaccgaaatcgtgccagccaaacgcacagggccgatcttggaagatgagagcttctttggtcatgaaattatcatgaaaaaatatatggactccttcgtgaaggtgcagaacatgctgaatgcgatggatcttgttagcgtgcaaatctttggcgaatttgcgggtggtggcattcagaaaggcgtcgattacggagacaaagatttctatgtgtttgacatcctgtctgatagcgggaacgagaaagtttactgggatgactatcgcgtcgaatcgttttgcaccacttttggtctgaaattagcgcctctgctgggacgtggtagtttcgctgaactgtcccagtacccaaacgatttcaaaagcctggtgaaccgttataatgaattggttgacacggtcggcctggagatggccaataaacacgtctttggtccgcaagcgtcttctgaaactggcctggcagaaggctacgttcttaaacccgtctatccgcgcttctttaatgtgggtacgcgcgtggcgattaaatgcaagaactccaaattttcggagaaagccaaactgatttcgccaattaaagcgaaggttgaactgacggagaacgataaacgtctgctcggaatctttagcgaatatgttacctggaatcgcgtcagtaacgtactgtcacatattggctcagtgaccgccaaagattttgggcgtgtttcgggtctgacgatgaaagacatcattcgcgaagcagcacgcgaaggccatgatctgttgttcgctgataacccgtcggcggtgctgaaggagctgacaggcctcatccagaacacgattcgctccaaatggcacgaagttctggag

SEQ ID NO: 2144 - protein, 346 aa, synthetic construct
  REGION 1..346: note = variant of RNA ligase 2 from Klebsiella phage KP179
MHHHHHHGGSNMFAYYSSLENHTNAKFISKIRGAGFLMHTVEWVAREKIHGTNFSVIITPTEIVPAKRTGPILEDESFFGHEIIMKKYMDSFVKVQNMLNAMDLVSVQIFGEFAGGGIQKGVDYGDKDFYVFDILSDSGNEKVYWDDYRVESFCTTFGLKLAPLLGRGSFAELSQYPNDFKSLVNRYNELVDTVGLEMANKHVFGPQASSETGLAEGYVLKPVYPRFFNVGTRVAIKCKNSKFSEKAKLISPIKAKVELTENDKRLLGIFSEYVTWNRVSNVLSHIGSVTAKDFGRVSGLTMKDIIREAAREGHDLLFADNPSAVLKELTGLIQNTIRSKWHEVLE

SEQ ID NO: 2145 - DNA, 1038 bp, synthetic construct
  misc_feature 1..1038: note = variant of RNA ligase 2 from Klebsiella phage KP179
  source 1..1038: mol_type = other DNA
atgcatcaccatcaccatcacggtggcagcaacatgtttgcgtattattcaagtctggaaaaccataccaatgccaagttcattagcaagatccgtggtgcaggcttcctgatgcacaccgtggaatgggtagctcgcgagaagattcatggaacgaactttagcgttatcattactccgaccgaaatcgtgccagccaaacgcacagggccgatcttggaagatgagagcttctttggtcatgaaattatcatgaaaaaatatatggactccttcgtgaaggtgcagaacatgctgaatgcgatggatcttgttagcgtgcaaatctttggcgaatttgcgggtggtggcattcagaaaggcgtcgattacggagacaaagatttctatgtgtttgacatcctgtctgatagcgggaacgagaaagtttactgggatgactatcgcgtcgaatcgttttgcaccactgtgggtctgaaattagcgcctctgctgggacgtggtagtttcgctgaactgtcccagtacccaaacgatttcaaaagcctggtgaaccgttataatgaattggttgacacggtcggcctggagatggccaataaacacgtctttggtccgcaagcgtcttctgaaactggcctggcagaaggctacgttcttaaacccgtctatccgcgcttctttaatgtgggtacgcgcgtggcgattaaaaagaagaactccaaattttcggagaaagccaaactgatttcgccaattaaagcgaaggttgaactgacggagaacgataaacgtctgctcggaatctttagcgaatatgttacctggaatcgcgtcagtaacgtactgtcacatattggctcagtgaccgccaaagattttgggcgtgtttcgggtctgacgatgaaagacatcattcgcgaagcagcacgcgaaggccatgatctgttgttcgctgataacccgtcggcggtgctgaaggagctgacaggcctcatccagaacacgattcgctccaaatggcacgaagttctggag

SEQ ID NO: 2146 - protein, 346 aa, synthetic construct
  REGION 1..346: note = variant of RNA ligase 2 from Klebsiella phage KP179
MHHHHHHGGSNMFAYYSSLENHTNAKFISKIRGAGFLMHTVEWVAREKIHGTNFSVIITPTEIVPAKRTGPILEDESFFGHEIIMKKYMDSFVKVQNMLNAMDLVSVQIFGEFAGGGIQKGVDYGDKDFYVFDILSDSGNEKVYWDDYRVESFCTTVGLKLAPLLGRGSFAELSQYPNDFKSLVNRYNELVDTVGLEMANKHVFGPQASSETGLAEGYVLKPVYPRFFNVGTRVAIKKKNSKFSEKAKLISPIKAKVELTENDKRLLGIFSEYVTWNRVSNVLSHIGSVTAKDFGRVSGLTMKDIIREAAREGHDLLFADNPSAVLKELTGLIQNTIRSKWHEVLE

SEQ ID NO: 2147 - DNA, 1038 bp, synthetic construct
  misc_feature 1..1038: note = variant of RNA ligase 2 from Klebsiella phage KP179
  source 1..1038: mol_type = other DNA
atgcatcaccatcaccatcacggtggcagcaacatgtttgcgtattattcaagtctggaaaaccataccaatgccaagttcattagcaagatccgtggtgcaggcttcctgatgcacaccgtggaatgggtagctcgcgagaagattcatggaacgaactttagcgttatcattactccgaccgaaatcgtgccagccaaacgcacagggccgatcttggaagatgagagcttctttggtcatgaaattatcatgaaaaaatatcaggactccttcgtgaaggtgcagaacatgctgaatgcgatggatcttgttagcgtgcaaatctttggcgaatttgcgggtggtggcattcagaaaggcgtcgattacggagacaaagatttctatgtgtttgacatcctgtctgatagcgggaacgagaaagtttactgggatgactatcgcgtcgaatcgttttgcaccactgtgggtctgaaattagcgcctctgctgggacgtggtagtttcgctgaactgtcccagtacccaaacgatttcaaaagcctggtgaaccgttataatgaattggttgacacggtcggcctggagatggccaataaacacgtctttggtccgcaagcgtcttctgaaactggcctggcagaaggctacgttcttaaacccgtctatccgcgcttctttaatgtgggtacgcgcgtggcgattaaatgcaagaactccaaattttcggagaaagccaaactgatttcgccaattaaagcgaaggttgaactgacggagaacgataaacgtctgctcggaatctttagcgaatatgttacctggaatcgcgtcagtaacgtactgtcacatattggctcagtgaccgccaaagattttgggcgtgtttcgggtctgacgatgaaagacatcattcgcgaagcagcacgcgaaggccatgatctgttgttcgctgataacccgtcggcggtgctgaaggagctgacaggcctcatccagaacacgattcgctccaaatggcacgaagttctggag

SEQ ID NO: 2148 - protein, 346 aa, synthetic construct
  REGION 1..346: note = variant of RNA ligase 2 from Klebsiella phage KP179
MHHHHHHGGSNMFAYYSSLENHTNAKFISKIRGAGFLMHTVEWVAREKIHGTNFSVIITPTEIVPAKRTGPILEDESFFGHEIIMKKYQDSFVKVQNMLNAMDLVSVQIFGEFAGGGIQKGVDYGDKDFYVFDILSDSGNEKVYWDDYRVESFCTTVGLKLAPLLGRGSFAELSQYPNDFKSLVNRYNELVDTVGLEMANKHVFGPQASSETGLAEGYVLKPVYPRFFNVGTRVAIKCKNSKFSEKAKLISPIKAKVELTENDKRLLGIFSEYVTWNRVSNVLSHIGSVTAKDFGRVSGLTMKDIIREAAREGHDLLFADNPSAVLKELTGLIQNTIRSKWHEVLE

SEQ ID NO: 2149 - DNA, 1038 bp, synthetic construct
  misc_feature 1..1038: note = variant of RNA ligase 2 from Klebsiella phage KP179
  source 1..1038: mol_type = other DNA
atgcatcaccatcaccatcacggtggcagcaacatgtttgcgtattattcaagtctggaaaaccataccaatgccaagttcattagcaagatccgtggtgcaggcttcctgatgcacaccgtggaatgggtagctcgcgagaagattcatggaacgaactttagcgttatcattactccgaccgaaatcgtgccagccaaacgcacagggccgatcttggaagatgagagcttctttggtcatgaaattatcatgaaaaaatattcggactccttcgtgaaggtgcagaacatgctgaatgcgatggatcttgttagcgtgcaaatctttggcgaatttgcgggtggtggcattcagaaaggcgtcgattacggagacaaagatttctatgtgtttgacatcctgtctgatagcgggaacgagaaagtttactgggatgactatcgcgtcgaatcgttttgcaccactgtgggtctgaaattagcgcctctgctgggacgtggtagtttcgctgaactgtcccagtacccaaacgatttcaaaagcctggtgaaccgttataatgaattggttgacacggtcggcctggagatggccaataaacacgtctttggtccgcaagcgtcttctgaaactggcctggcagaaggctacgttcttaaacccgtctatccgcgcttctttaatgtgggtacgcgcgtggcgattaaatgcaagaactccaaattttcggagaaagccaaactgatttcgccaattaaagcgaaggttgaactgacggagaacgataaacgtctgctcggaatctttagcgaatatgttacctggaatcgcgtcagtaacgtactgtcacatattggctcagtgaccgccaaagattttgggcgtgtttcgggtctgacgatgaaagacatcattcgcgaagcagcacgcgaaggccatgatctgttgttcgctgataacccgtcggcggtgctgaaggagctgacaggcctcatccagaacacgattcgctccaaatggcacgaagttctggag

SEQ ID NO: 2150 - protein, 346 aa, synthetic construct
  REGION 1..346: note = variant of RNA ligase 2 from Klebsiella phage KP179
MHHHHHHGGSNMFAYYSSLENHTNAKFISKIRGAGFLMHTVEWVAREKIHGTNFSVIITPTEIVPAKRTGPILEDESFFGHEIIMKKYSDSFVKVQNMLNAMDLVSVQIFGEFAGGGIQKGVDYGDKDFYVFDILSDSGNEKVYWDDYRVESFCTTVGLKLAPLLGRGSFAELSQYPNDFKSLVNRYNELVDTVGLEMANKHVFGPQASSETGLAEGYVLKPVYPRFFNVGTRVAIKCKNSKFSEKAKLISPIKAKVELTENDKRLLGIFSEYVTWNRVSNVLSHIGSVTAKDFGRVSGLTMKDIIREAAREGHDLLFADNPSAVLKELTGLIQNTIRSKWHEVLE

SEQ ID NO: 2151 - DNA, 1038 bp, synthetic construct
  misc_feature 1..1038: note = variant of RNA ligase 2 from Klebsiella phage KP179
  source 1..1038: mol_type = other DNA
atgcatcaccatcaccatcacggtggcagcaacatgtttgcgtattattcaagtctggaaaaccataccaatgccaagttcattagcaagatccgtggtgcaggcttcctgatgcacaccgtggaatgggtagctcgcgagaagattcatggaacgaactttagcgttatcattactccgaccgaaatcgtgccagccaaacgcacagggccgatcttggaagatgagagcttctttggtcatgaaattatcatgaaaaaatatatggactccttcgtgaaggtgcagaacatgctgaatgcgatggatcttgttagcgtgcaaatctttggcgaatttgcgggtggtggcattcagaaaggcgtcgattacggagacaaagatttctatgtgtttgacatcctgtctgatagcgggaacgagaaagtttactgggatgactatcgcgtcgaatcgttttgcaccactgtgggtctgaaattagcgcctctgctgggacgtggtagtttcgctgaactgtcccagtacccaaacgatttcaaaagcctggtgaaccgttataatgaattggttgacacggtcggcctggagatggccaataaacacgtctttggtccgcaagcgtcttctgaaactggcctggcagaaggctacgttcttaaacccgtctatccgcgcttctttaatgtgggtacgcgcgtggcgattaaatgcaagaactccaaattttcggagaaagccaaactgatttcgccaattaaagcgaaggttgaactgacggagaacgataaacgtctgctcggaatctttagcgaatatgttacctggaatcgcgtcagtaacgtactgtcacatattggctcagtgaccgccaaagattttgggcgtgtttcgggtctgacgatgaaagacatcattcgcgaagcagcacgcgaaggccatgatctgttgttcgctgataacccgtcggcggtgctgaaggagctggagggcctcatccagaacacgattcgctccaaatggcacgaagttctggag

SEQ ID NO: 2152 - protein, 346 aa, synthetic construct
  REGION 1..346: note = variant of RNA ligase 2 from Klebsiella phage KP179
MHHHHHHGGSNMFAYYSSLENHTNAKFISKIRGAGFLMHTVEWVAREKIHGTNFSVIITPTEIVPAKRTGPILEDESFFGHEIIMKKYMDSFVKVQNMLNAMDLVSVQIFGEFAGGGIQKGVDYGDKDFYVFDILSDSGNEKVYWDDYRVESFCTTVGLKLAPLLGRGSFAELSQYPNDFKSLVNRYNELVDTVGLEMANKHVFGPQASSETGLAEGYVLKPVYPRFFNVGTRVAIKCKNSKFSEKAKLISPIKAKVELTENDKRLLGIFSEYVTWNRVSNVLSHIGSVTAKDFGRVSGLTMKDIIREAAREGHDLLFADNPSAVLKELEGLIQNTIRSKWHEVLE

SEQ ID NO: 2153 - DNA, 1038 bp, synthetic construct
  misc_feature 1..1038: note = variant of RNA ligase 2 from Klebsiella phage KP179
  source 1..1038: mol_type = other DNA
atgcatcaccatcaccatcacggtggcagcaacatgtttgcgtattattcaagtctggaaaaccataccaatgccaagttcattagcaagatccgtggtgcaggcttcctgatgcacaccgtggaatgggtagctcgcgagaagattcatggaacgaactttagcgttatcattactccgaccgaaatcgtgccagccaaacgcacagggccgatcttggaagatgagagcttctttggtcatgaaattatcatgaaaaaatatatggactccttcgtgaaggtgcagaacatgctgaatgcgatggatcttgttagcgtgcaaatctttggcgaatttgcgggtggtggcattcagaaaggctgtgattacggagacaaagatttctatgtgtttgacatcctgtctgatagcgggaacgagaaagtttactgggatgactatcgcgtcgaatcgttttgcaccactgtgggtctgaaattagcgcctctgctgggacgtggtagtttcgctgaactgtcccagtacccaaacgatttcaaaagcctggtgaaccgttataatgaattggttgacacggtcggcctggagatggccaataaacacgtctttggtccgcaagcgtcttctgaaactggcctggcagaaggctacgttcttaaacccgtctatccgcgcttctttaatgtgggtacgcgcgtggcgattaaatgcaagaactccaaattttcggagaaagccaaactgatttcgccaattaaagcgaaggttgaactgacggagaacgataaacgtctgctcggaatctttagcgaatatgttacctggaatcgcgtcagtaacgtactgtcacatattggctcagtgaccgccaaagattttgggcgtgtttcgggtctgacgatgaaagacatcattcgcgaagcagcacgcgaaggccatgatctgttgttcgctgataacccgtcggcggtgctgaaggagctgacaggcctcatccagaacacgattcgctccaaatggcacgaagttctggag

SEQ ID NO: 2154 - protein, 346 aa, synthetic construct
  REGION 1..346: note = variant of RNA ligase 2 from Klebsiella phage KP179
MHHHHHHGGSNMFAYYSSLENHTNAKFISKIRGAGFLMHTVEWVAREKIHGTNFSVIITPTEIVPAKRTGPILEDESFFGHEIIMKKYMDSFVKVQNMLNAMDLVSVQIFGEFAGGGIQKGCDYGDKDFYVFDILSDSGNEKVYWDDYRVESFCTTVGLKLAPLLGRGSFAELSQYPNDFKSLVNRYNELVDTVGLEMANKHVFGPQASSETGLAEGYVLKPVYPRFFNVGTRVAIKCKNSKFSEKAKLISPIKAKVELTENDKRLLGIFSEYVTWNRVSNVLSHIGSVTAKDFGRVSGLTMKDIIREAAREGHDLLFADNPSAVLKELTGLIQNTIRSKWHEVLE

SEQ ID NO: 2155 - DNA, 1038 bp, synthetic construct
  misc_feature 1..1038: note = variant of RNA ligase 2 from Klebsiella phage KP179
  source 1..1038: mol_type = other DNA
atgcatcaccatcaccatcacggtggcagcaacatgtttgcgtattattcaagtctggaaaaccataccaatgccaagttcattagcaagatccgtggtgcaggcttcctgatgcacaccgtggaatgggtagctcgcgagaagattcatggaacgaactttagcgttatcattactccgaccgaaatcgtgccagccaaacgcacagggccgatcttggaagatgagagcttctttggtcatgaaattatcatgaaaaaatattatgactccttcgtgaaggtgcagaacatgctgaatgcgatggatcttgttagcgtgcaaatctttggcgaatttgcgggtggtggcattcagaaaggcgtcgattacggagacaaagatttctatgtgtttgacatcctgtctgatagcgggaacgagaaagtttactgggatgactatcgcgtcgaatcgttttgcaccactgtgggtctgaaattagcgcctctgctgggacgtggtagtttcgctgaactgtcccagtacccaaacgatttcaaaagcctggtgaaccgttataatgaattggttgacacggtcggcctggagatggccaataaacacgtctttggtccgcaagcgtcttctgaaactggcctggcagaaggctacgttcttaaacccgtctatccgcgcttctttaatgtgggtacgcgcgtggcgattaaatgcaagaactccaaattttcggagaaagccaaactgatttcgccaattaaagcgaaggttgaactgacggagaacgataaacgtctgctcggaatctttagcgaatatgttacctggaatcgcgtcagtaacgtactgtcacatattggctcagtgaccgccaaagattttgggcgtgtttcgggtctgacgatgaaagacatcattcgcgaagcagcacgcgaaggccatgatctgttgttcgctgataacccgtcggcggtgctgaaggagctgacaggcctcatccagaacacgattcgctccaaatggcacgaagttctggag

SEQ ID NO: 2156 - protein, 346 aa, synthetic construct
  REGION 1..346: note = variant of RNA ligase 2 from Klebsiella phage KP179
MHHHHHHGGSNMFAYYSSLENHTNAKFISKIRGAGFLMHTVEWVAREKIHGTNFSVIITPTEIVPAKRTGPILEDESFFGHEIIMKKYYDSFVKVQNMLNAMDLVSVQIFGEFAGGGIQKGVDYGDKDFYVFDILSDSGNEKVYWDDYRVESFCTTVGLKLAPLLGRGSFAELSQYPNDFKSLVNRYNELVDTVGLEMANKHVFGPQASSETGLAEGYVLKPVYPRFFNVGTRVAIKCKNSKFSEKAKLISPIKAKVELTENDKRLLGIFSEYVTWNRVSNVLSHIGSVTAKDFGRVSGLTMKDIIREAAREGHDLLFADNPSAVLKELTGLIQNTIRSKWHEVLE

SEQ ID NO: 2157 - DNA, 1038 bp, synthetic construct
  misc_feature 1..1038: note = variant of RNA ligase 2 from Klebsiella phage KP179
  source 1..1038: mol_type = other DNA
atgcatcaccatcaccatcacggtggcagcaacatgtttgcgtattattcaagtctggaaaaccataccaatgccaagttcattagcaagatccgtggtgcaggcttcctgatgcacaccgtggaatgggtagctcgcgagaagattcatggaacgaactttagcgttatcattactccgaccgaaatcgtgccagccaaacgcacagggccgatcttggaagatgagagcttctttggtcatgaaattatcatgaaaaaatattgtgactccttcgtgaaggtgcagaacatgctgaatgcgatggatcttgttagcgtgcaaatctttggcgaatttgcgggtggtggcattcagaaaggcgtcgattacggagacaaagatttctatgtgtttgacatcctgtctgatagcgggaacgagaaagtttactgggatgactatcgcgtcgaatcgttttgcaccactgtgggtctgaaattagcgcctctgctgggacgtggtagtttcgctgaactgtcccagtacccaaacgatttcaaaagcctggtgaaccgttataatgaattggttgacacggtcggcctggagatggccaataaacacgtctttggtccgcaagcgtcttctgaaactggcctggcagaaggctacgttcttaaacccgtctatccgcgcttctttaatgtgggtacgcgcgtggcgattaaatgcaagaactccaaattttcggagaaagccaaactgatttcgccaattaaagcgaaggttgaactgacggagaacgataaacgtctgctcggaatctttagcgaatatgttacctggaatcgcgtcagtaacgtactgtcacatattggctcagtgaccgccaaagattttgggcgtgtttcgggtctgacgatgaaagacatcattcgcgaagcagcacgcgaaggccatgatctgttgttcgctgataacccgtcggcggtgctgaaggagctgacaggcctcatccagaacacgattcgctccaaatggcacgaagttctggag

SEQ ID NO: 2158 - protein, 346 aa, synthetic construct
  REGION 1..346: note = variant of RNA ligase 2 from Klebsiella phage KP179
MHHHHHHGGSNMFAYYSSLENHTNAKFISKIRGAGFLMHTVEWVAREKIHGTNFSVIITPTEIVPAKRTGPILEDESFFGHEIIMKKYCDSFVKVQNMLNAMDLVSVQIFGEFAGGGIQKGVDYGDKDFYVFDILSDSGNEKVYWDDYRVESFCTTVGLKLAPLLGRGSFAELSQYPNDFKSLVNRYNELVDTVGLEMANKHVFGPQASSETGLAEGYVLKPVYPRFFNVGTRVAIKCKNSKFSEKAKLISPIKAKVELTENDKRLLGIFSEYVTWNRVSNVLSHIGSVTAKDFGRVSGLTMKDIIREAAREGHDLLFADNPSAVLKELTGLIQNTIRSKWHEVLE

SEQ ID NO: 2159 - DNA, 1038 bp, synthetic construct
  misc_feature 1..1038: note = variant of RNA ligase 2 from Klebsiella phage KP179
  source 1..1038: mol_type = other DNA
atgcatcaccatcaccatcacggtggcagcaacatgtttgcgtattattcaagtctggaaaaccataccaatgccaagttcattagcaagatccgtggtgcaggcttcctgatgcacaccgtggaatgggtagctcgcgagaagattcatggaacgaactttagcgttatcattactccgaccgaaatcgtgccagccaaacgcacagggccgatcttggaagatgagagcttctttggtcatgaaattatcatgaaaaaatatatggactccttcgtgaaggtgcagaacatgctgaatgcgatggatcttgttagcgtgcaaatctttggcgaatttgcgggtggtggcattcagaaaggcgtcgattacggagacaaagatttctatgtgtttgacatcctgtctgatagcgggaacgagaaagtttactgggatgactatcgcgtcgaatcgttttgcaccactgtgggtctgaaattagcgcctctgctgggacgtggtagtttcgctgaactgtcccagtacccaaacgatttcaaaagcctggtgaaccgttataatgaattggttgacacggtcggcctggagatggccaataaacacgtctttggtccgcaagcgtcttctgaagagggcctggcagaaggctacgttcttaaacccgtctatccgcgcttctttaatgtgggtacgcgcgtggcgattaaatgcaagaactccaaattttcggagaaagccaaactgatttcgccaattaaagcgaaggttgaactgacggagaacgataaacgtctgctcggaatctttagcgaatatgttacctggaatcgcgtcagtaacgtactgtcacatattggctcagtgaccgccaaagattttgggcgtgtttcgggtctgacgatgaaagacatcattcgcgaagcagcacgcgaaggccatgatctgttgttcgctgataacccgtcggcggtgctgaaggagctgacaggcctcatccagaacacgattcgctccaaatggcacgaagttctggag

SEQ ID NO: 2160 - protein, 346 aa, synthetic construct
  REGION 1..346: note = variant of RNA ligase 2 from Klebsiella phage KP179
MHHHHHHGGSNMFAYYSSLENHTNAKFISKIRGAGFLMHTVEWVAREKIHGTNFSVIITPTEIVPAKRTGPILEDESFFGHEIIMKKYMDSFVKVQNMLNAMDLVSVQIFGEFAGGGIQKGVDYGDKDFYVFDILSDSGNEKVYWDDYRVESFCTTVGLKLAPLLGRGSFAELSQYPNDFKSLVNRYNELVDTVGLEMANKHVFGPQASSEEGLAEGYVLKPVYPRFFNVGTRVAIKCKNSKFSEKAKLISPIKAKVELTENDKRLLGIFSEYVTWNRVSNVLSHIGSVTAKDFGRVSGLTMKDIIREAAREGHDLLFADNPSAVLKELTGLIQNTIRSKWHEVLE

SEQ ID NO: 2161 - DNA, 1038 bp, synthetic construct
  misc_feature 1..1038: note = variant of RNA ligase 2 from Klebsiella phage KP179
  source 1..1038: mol_type = other DNA
atgcatcaccatcaccatcacggtggcagcaacatgtttgcgtattattcaagtctggaaaaccataccaatgccaagttcattagcaagatccgtggtgcaggcttcctgatgcacaccgtggaatgggtagctcgcgagaagattcatggaacgaactttagcgttatcattactccgaccgaaatcgtgccagccaaacgcacagggccgatcttggaagatgagagcttctttggtcatgaaattatcatgaaaaaatattgggactccttcgtgaaggtgcagaacatgctgaatgcgatggatcttgttagcgtgcaaatctttggcgaatttgcgggtggtggcattcagaaaggcgtcgattacggagacaaagatttctatgtgtttgacatcctgtctgatagcgggaacgagaaagtttactgggatgactatcgcgtcgaatcgttttgcaccactgtgggtctgaaattagcgcctctgctgggacgtggtagtttcgctgaactgtcccagtacccaaacgatttcaaaagcctggtgaaccgttataatgaattggttgacacggtcggcctggagatggccaataaacacgtctttggtccgcaagcgtcttctgaaactggcctggcagaaggctacgttcttaaacccgtctatccgcgcttctttaatgtgggtacgcgcgtggcgattaaatgcaagaactccaaattttcggagaaagccaaactgatttcgccaattaaagcgaaggttgaactgacggagaacgataaacgtctgctcggaatctttagcgaatatgttacctggaatcgcgtcagtaacgtactgtcacatattggctcagtgaccgccaaagattttgggcgtgtttcgggtctgacgatgaaagacatcattcgcgaagcagcacgcgaaggccatgatctgttgttcgctgataacccgtcggcggtgctgaaggagctgacaggcctcatccagaacacgattcgctccaaatggcacgaagttctggag

SEQ ID NO: 2162 - protein, 346 aa, synthetic construct
  REGION 1..346: note = variant of RNA ligase 2 from Klebsiella phage KP179
MHHHHHHGGSNMFAYYSSLENHTNAKFISKIRGAGFLMHTVEWVAREKIHGTNFSVIITPTEIVPAKRTGPILEDESFFGHEIIMKKYWDSFVKVQNMLNAMDLVSVQIFGEFAGGGIQKGVDYGDKDFYVFDILSDSGNEKVYWDDYRVESFCTTVGLKLAPLLGRGSFAELSQYPNDFKSLVNRYNELVDTVGLEMANKHVFGPQASSETGLAEGYVLKPVYPRFFNVGTRVAIKCKNSKFSEKAKLISPIKAKVELTENDKRLLGIFSEYVTWNRVSNVLSHIGSVTAKDFGRVSGLTMKDIIREAAREGHDLLFADNPSAVLKELTGLIQNTIRSKWHEVLE

SEQ ID NO: 2163 - DNA, 1038 bp, synthetic construct
  misc_feature 1..1038: note = variant of RNA ligase 2 from Klebsiella phage KP179
  source 1..1038: mol_type = other DNA
atgcatcaccatcaccatcacggtggcagcaacatgtttgcgtattattcaagtctggaaaaccataccaatgccaagttcattagcaagatccgtggtgcaggcttcctgatgcacaccgtggaatgggtagctcgcgagaagattcatggaacgaactttagcgttatcattactccgaccgaaatcgtgccagccaaacgcacagggccgatcttggaagatgagagcttctttggtcatgaaattatcatgaaaaaatatatggactccttcgtgaaggtgcagaacatgctgaatgcgatggatcttgttagcgtgcaaatctttggcgaatttgcgggtggtggcattcagaaaggcgtcgattacggagacaaagatttctatgtgtttgacatcctgtctgatagcgggaacgagaaatcgtactgggatgactatcgcgtcgaatcgttttgcaccactgtgggtctgaaattagcgcctctgctgggacgtggtagtttcgctgaactgtcccagtacccaaacgatttcaaaagcctggtgaaccgttataatgaattggttgacacggtcggcctggagatggccaataaacacgtctttggtccgcaagcgtcttctgaaactggcctggcagaaggctacgttcttaaacccgtctatccgcgcttctttaatgtgggtacgcgcgtggcgattaaatgcaagaactccaaattttcggagaaagccaaactgatttcgccaattaaagcgaaggttgaactgacggagaacgataaacgtctgctcggaatctttagcgaatatgttacctggaatcgcgtcagtaacgtactgtcacatattggctcagtgaccgccaaagattttgggcgtgtttcgggtctgacgatgaaagacatcattcgcgaagcagcacgcgaaggccatgatctgttgttcgctgataacccgtcggcggtgctgaaggagctgacaggcctcatccagaacacgattcgctccaaatggcacgaagttctggag

SEQ ID NO: 2164 - protein, 346 aa, synthetic construct
  REGION 1..346: note = variant of RNA ligase 2 from Klebsiella phage KP179
MHHHHHHGGSNMFAYYSSLENHTNAKFISKIRGAGFLMHTVEWVAREKIHGTNFSVIITPTEIVPAKRTGPILEDESFFGHEIIMKKYMDSFVKVQNMLNAMDLVSVQIFGEFAGGGIQKGVDYGDKDFYVFDILSDSGNEKSYWDDYRVESFCTTVGLKLAPLLGRGSFAELSQYPNDFKSLVNRYNELVDTVGLEMANKHVFGPQASSETGLAEGYVLKPVYPRFFNVGTRVAIKCKNSKFSEKAKLISPIKAKVELTENDKRLLGIFSEYVTWNRVSNVLSHIGSVTAKDFGRVSGLTMKDIIREAAREGHDLLFADNPSAVLKELTGLIQNTIRSKWHEVLE

SEQ ID NO: 2165 - DNA, 1038 bp, synthetic construct
  misc_feature 1..1038: note = variant of RNA ligase 2 from Klebsiella phage KP179
  source 1..1038: mol_type = other DNA
atgcatcaccatcaccatcacggtggcagcaacatgtttgcgtattattcaagtctggaaaaccataccaatgccaagttcattagcaagatccgtggtgcaggcttcctgatgcacaccgtggaatgggtagctcgcgagaagattcatggaacgaactttagcgttatcattactccgaccgaaatcgtgccagccaaacgcacagggccgatcttggaagatgagagcttctttggtcatgaaattatcatgaaaaaatatgttgactccttcgtgaaggtgcagaacatgctgaatgcgatggatcttgttagcgtgcaaatctttggcgaatttgcgggtggtggcattcagaaaggcgtcgattacggagacaaagatttctatgtgtttgacatcctgtctgatagcgggaacgagaaagtttactgggatgactatcgcgtcgaatcgttttgcaccactgtgggtctgaaattagcgcctctgctgggacgtggtagtttcgctgaactgtcccagtacccaaacgatttcaaaagcctggtgaaccgttataatgaattggttgacacggtcggcctggagatggccaataaacacgtctttggtccgcaagcgtcttctgaaactggcctggcagaaggctacgttcttaaacccgtctatccgcgcttctttaatgtgggtacgcgcgtggcgattaaatgcaagaactccaaattttcggagaaagccaaactgatttcgccaattaaagcgaaggttgaactgacggagaacgataaacgtctgctcggaatctttagcgaatatgttacctggaatcgcgtcagtaacgtactgtcacatattggctcagtgaccgccaaagattttgggcgtgtttcgggtctgacgatgaaagacatcattcgcgaagcagcacgcgaaggccatgatctgttgttcgctgataacccgtcggcggtgctgaaggagctgacaggcctcatccagaacacgattcgctccaaatggcacgaagttctggag

SEQ ID NO: 2166 - protein, 346 aa, synthetic construct
  REGION 1..346: note = variant of RNA ligase 2 from Klebsiella phage KP179
MHHHHHHGGSNMFAYYSSLENHTNAKFISKIRGAGFLMHTVEWVAREKIHGTNFSVIITPTEIVPAKRTGPILEDESFFGHEIIMKKYVDSFVKVQNMLNAMDLVSVQIFGEFAGGGIQKGVDYGDKDFYVFDILSDSGNEKVYWDDYRVESFCTTVGLKLAPLLGRGSFAELSQYPNDFKSLVNRYNELVDTVGLEMANKHVFGPQASSETGLAEGYVLKPVYPRFFNVGTRVAIKCKNSKFSEKAKLISPIKAKVELTENDKRLLGIFSEYVTWNRVSNVLSHIGSVTAKDFGRVSGLTMKDIIREAAREGHDLLFADNPSAVLKELTGLIQNTIRSKWHEVLE

SEQ ID NO: 2167 - DNA, 1038 bp, synthetic construct
  misc_feature 1..1038: note = variant of RNA ligase 2 from Klebsiella phage KP179
  source 1..1038: mol_type = other DNA
atgcatcaccatcaccatcacggtggcagcaacatgtttgcgtattattcaagtctggaaaaccataccaatgccaagttcattagcaagatccgtggtgcaggcttcctgatgcacaccgtggaatgggtagctcgcgagaagattcatggaacgaactttagcgttatcattactccgaccgaaatcgtgccagccaaacgcacagggccgatcttggaagatgagagcttctttggtcatgaaattatcatgaaaaaatatatggactccttcgtgaaggtgcagaacatgctgaatgcgatggatcttgttagcgtgcaaatctttggcgaatttgcgggtggtggcattcagaaaggcgtcgattacggagacaaagatttctatgtgtttgacatcctgtctgatagcgggaacgagaaagtttactgggatgactatcgcgtcgaatcgttttgcaccactgtgggtctgaaattagcgcctctgctgggacgtggtagtttcgctgaactgtcccagtacccaaacgatttcaaaagcctggtgaaccgttataatgaattggttgacacggtcggcctggagatggccaataaacacgtctttggtccgcaaccttcttctgaaactggcctggcagaaggctacgttcttaaacccgtctatccgcgcttctttaatgtgggtacgcgcgtggcgattaaatgcaagaactccaaattttcggagaaagccaaactgatttcgccaattaaagcgaaggttgaactgacggagaacgataaacgtctgctcggaatctttagcgaatatgttacctggaatcgcgtcagtaacgtactgtcacatattggctcagtgaccgccaaagattttgggcgtgtttcgggtctgacgatgaaagacatcattcgcgaagcagcacgcgaaggccatgatctgttgttcgctgataacccgtcggcggtgctgaaggagctgacaggcctcatccagaacacgattcgctccaaatggcacgaagttctggag

SEQ ID NO: 2168 - protein, 346 aa, synthetic construct
  REGION 1..346: note = variant of RNA ligase 2 from Klebsiella phage KP179
MHHHHHHGGSNMFAYYSSLENHTNAKFISKIRGAGFLMHTVEWVAREKIHGTNFSVIITPTEIVPAKRTGPILEDESFFGHEIIMKKYMDSFVKVQNMLNAMDLVSVQIFGEFAGGGIQKGVDYGDKDFYVFDILSDSGNEKVYWDDYRVESFCTTVGLKLAPLLGRGSFAELSQYPNDFKSLVNRYNELVDTVGLEMANKHVFGPQPSSETGLAEGYVLKPVYPRFFNVGTRVAIKCKNSKFSEKAKLISPIKAKVELTENDKRLLGIFSEYVTWNRVSNVLSHIGSVTAKDFGRVSGLTMKDIIREAAREGHDLLFADNPSAVLKELTGLIQNTIRSKWHEVLE

SEQ ID NO: 2169 - DNA, 1038 bp, synthetic construct
  misc_feature 1..1038: note = variant of RNA ligase 2 from Klebsiella phage KP179
  source 1..1038: mol_type = other DNA
atgcatcaccatcaccatcacggtggcagcaacatgtttgcgtattattcaagtctggaaaaccataccaatgccaagttcattagcaagatccgtggtgcaggcttcctgatgcacaccgtggaatgggtagctcgcgagaagattcatggaacgaactttagcgttatcattactccgaccgaaatcgtgccagccaaacgcacagggccgatcttggaagatgagagcttctttggtcatgaaattatcatgaaaaaatatatggactccttcgtgaaggtgcagaacatgctgaatgcgatggatcttgttagcgtgcaaatctttggcgaatttgcgggtggtggcattcagaaaggcgtcgattacggagacaaagatttctatgtgtttgacatcctgtctgatagcgggaacgagaaagtttactgggatgactatcgcgtcgaatcgttttgcaccactgtgggtctgaaattagcgcctctgctgggacgtggtagtttcgctgaactgtcccagtacccaaacgatttcaaaagcctggtgaaccgttataatgaattggttgacacggtcggcctggagatggccaataaacacgtctttggtccgcaagcgtcttctgaaactggcctggcagaaggctacgttcttaaacccgtctatccgcgcttctttaatgtgggtacgcgcgtggcgattaaatgcaagaactccaaattttcggagaaagccaaactgatttcgccaattaaagcgaaggttgaactgacggagaacgataaacgtctgctcggaatctttagcgaatatgttacctggaatcgcgtcagtaacgtactgtcacatattggctcagtggatgccaaagattttgggcgtgtttcgggtctgacgatgaaagacatcattcgcgaagcagcacgcgaaggccatgatctgttgttcgctgataacccgtcggcggtgctgaaggagctgacaggcctcatccagaacacgattcgctccaaatggcacgaagttctggag

SEQ ID NO: 2170 - protein, 346 aa, synthetic construct
  REGION 1..346: note = variant of RNA ligase 2 from Klebsiella phage KP179
MHHHHHHGGSNMFAYYSSLENHTNAKFISKIRGAGFLMHTVEWVAREKIHGTNFSVIITPTEIVPAKRTGPILEDESFFGHEIIMKKYMDSFVKVQNMLNAMDLVSVQIFGEFAGGGIQKGVDYGDKDFYVFDILSDSGNEKVYWDDYRVESFCTTVGLKLAPLLGRGSFAELSQYPNDFKSLVNRYNELVDTVGLEMANKHVFGPQASSETGLAEGYVLKPVYPRFFNVGTRVAIKCKNSKFSEKAKLISPIKAKVELTENDKRLLGIFSEYVTWNRVSNVLSHIGSVDAKDFGRVSGLTMKDIIREAAREGHDLLFADNPSAVLKELTGLIQNTIRSKWHEVLE

SEQ ID NO: 2171 - DNA, 1038 bp, synthetic construct
  misc_feature 1..1038: note = variant of RNA ligase 2 from Klebsiella phage KP179
  source 1..1038: mol_type = other DNA
atgcatcaccatcaccatcacggtggcagcaacatgtttgcgtattattcaagtctggaaaaccataccaatgccaagttcattagcaagatccgtggtgcaggcttcctgatgcacaccgtggaatgggtagctcgcgagaagattcatggaacgaactttagcgttatcattactccgaccgaaatcgtgccagccaaacgcacagggccgatcttggaagatgagagcttctttggtcatgaaattatcatgaaaaaatatatggactccttcgtgaaggtgcagaacatgctgaatgcgatggatcttgttagcgtgcaaatctttggcgaatttgcgggtggtggcattcagaaaggcgtcgattacggagacaaagatttctatgtgtttgacatcctgtctgatagcgggaacgagaaagtttactgggatgactatcgcgtcgaatcgttttgcaccactgtgggtctgaaagtggcgcctctgctgggacgtggtagtttcgctgaactgtcccagtacccaaacgatttcaaaagcctggtgaaccgttataatgaattggttgacacggtcggcctggagatggccaataaacacgtctttggtccgcaagcgtcttctgaaactggcctggcagaaggctacgttcttaaacccgtctatccgcgcttctttaatgtgggtacgcgcgtggcgattaaatgcaagaactccaaattttcggagaaagccaaactgatttcgccaattaaagcgaaggttgaactgacggagaacgataaacgtctgctcggaatctttagcgaatatgttacctggaatcgcgtcagtaacgtactgtcacatattggctcagtgaccgccaaagattttgggcgtgtttcgggtctgacgatgaaagacatcattcgcgaagcagcacgcgaaggccatgatctgttgttcgctgataacccgtcggcggtgctgaaggagctgacaggcctcatccagaacacgattcgctccaaatggcacgaagttctggag

SEQ ID NO: 2172 - protein, 346 aa, synthetic construct
  REGION 1..346: note = variant of RNA ligase 2 from Klebsiella phage KP179
MHHHHHHGGSNMFAYYSSLENHTNAKFISKIRGAGFLMHTVEWVAREKIHGTNFSVIITPTEIVPAKRTGPILEDESFFGHEIIMKKYMDSFVKVQNMLNAMDLVSVQIFGEFAGGGIQKGVDYGDKDFYVFDILSDSGNEKVYWDDYRVESFCTTVGLKVAPLLGRGSFAELSQYPNDFKSLVNRYNELVDTVGLEMANKHVFGPQASSETGLAEGYVLKPVYPRFFNVGTRVAIKCKNSKFSEKAKLISPIKAKVELTENDKRLLGIFSEYVTWNRVSNVLSHIGSVTAKDFGRVSGLTMKDIIREAAREGHDLLFADNPSAVLKELTGLIQNTIRSKWHEVLE

SEQ ID NO: 2173 - DNA, 1038 bp, synthetic construct
  misc_feature 1..1038: note = variant of RNA ligase 2 from Klebsiella phage KP179
  source 1..1038: mol_type = other DNA
atgcatcaccatcaccatcacggtggcagcaacatgtttgcgtattattcaagtctggaaaaccataccaatgccaagttcattagcaagatccgtggtgcaggcttcctgatgcacaccgtggaatgggtagctcgcgagaagattcatggaacgaactttagcgttatcattactccgaccgaaatcgtgccagccaaacgcacagggccgatcttggaagatgagagcttctttggtcatgaaattatcatgaaaaaatatatggactccttcgtgaaggtgcagaacatgctgaatgcgatggatcttgttagcgtgcaaatctttggcgaatttgcgggtggtggcattcagaaaggcgtcgattacggagacaaagatttctatgtgtttgacatcctgtctgatagcgggaacgagaaagtttactgggatgactatcgcgtcgaatcgttttgcaccactgtgggtctgaaaatggcgcctctgctgggacgtggtagtttcgctgaactgtcccagtacccaaacgatttcaaaagcctggtgaaccgttataatgaattggttgacacggtcggcctggagatggccaataaacacgtctttggtccgcaagcgtcttctgaaactggcctggcagaaggctacgttcttaaacccgtctatccgcgcttctttaatgtgggtacgcgcgtggcgattaaatgcaagaactccaaattttcggagaaagccaaactgatttcgccaattaaagcgaaggttgaactgacggagaacgataaacgtctgctcggaatctttagcgaatatgttacctggaatcgcgtcagtaacgtactgtcacatattggctcagtgaccgccaaagattttgggcgtgtttcgggtctgacgatgaaagacatcattcgcgaagcagcacgcgaaggccatgatctgttgttcgctgataacccgtcggcggtgctgaaggagctgacaggcctcatccagaacacgattcgctccaaatggcacgaagttctggag

SEQ ID NO: 2174 - protein, 346 aa, synthetic construct
  REGION 1..346: note = variant of RNA ligase 2 from Klebsiella phage KP179
MHHHHHHGGSNMFAYYSSLENHTNAKFISKIRGAGFLMHTVEWVAREKIHGTNFSVIITPTEIVPAKRTGPILEDESFFGHEIIMKKYMDSFVKVQNMLNAMDLVSVQIFGEFAGGGIQKGVDYGDKDFYVFDILSDSGNEKVYWDDYRVESFCTTVGLKMAPLLGRGSFAELSQYPNDFKSLVNRYNELVDTVGLEMANKHVFGPQASSETGLAEGYVLKPVYPRFFNVGTRVAIKCKNSKFSEKAKLISPIKAKVELTENDKRLLGIFSEYVTWNRVSNVLSHIGSVTAKDFGRVSGLTMKDIIREAAREGHDLLFADNPSAVLKELTGLIQNTIRSKWHEVLE

SEQ ID NO: 2175 - DNA, 1038 bp, synthetic construct
  misc_feature 1..1038: note = variant of RNA ligase 2 from Klebsiella phage KP179
  source 1..1038: mol_type = other DNA
atgcatcaccatcaccatcacggtggcagcaacatgtttgcgtattattcaagtctggaaaaccataccaatgccaagttcattagcaagatccgtggtgcaggcttcctgatgcacaccgtggaatgggtagctcgcgagaagattcatggaacgaactttagcgttatcattactccgaccgaaatcgtgccagccaaacgcacagggccgatcttggaagatgagagcttctttggtcatgaaattatcatgaaaaaatatatggactccttcgtgaaggtgcagaacatgctgaatgcgatggatcttgttagcgtgcaaatctttggcgaatttgcgggtggtggcattcagaaaggcgtcgattacggagacaaagatttctatgtgtttgacatcctgtctgatagcgggaacgagaaagtttactgggatgactatcgcgtcgaatcgttttgcaccactgtgggtctgaaattagcgcctctgctgggacgtggtagtttcgctgaactgtcccagtacccaaacgatttcaaaagcctggtgaaccgttataatgaattggttgacacggtcggcctggagatggccaataaacacgtctttggtccgcaagcgtcttctgaaactggctgtgcagaaggctacgttcttaaacccgtctatccgcgcttctttaatgtgggtacgcgcgtggcgattaaatgcaagaactccaaattttcggagaaagccaaactgatttcgccaattaaagcgaaggttgaactgacggagaacgataaacgtctgctcggaatctttagcgaatatgttacctggaatcgcgtcagtaacgtactgtcacatattggctcagtgaccgccaaagattttgggcgtgtttcgggtctgacgatgaaagacatcattcgcgaagcagcacgcgaaggccatgatctgttgttcgctgataacccgtcggcggtgctgaaggagctgacaggcctcatccagaacacgattcgctccaaatggcacgaagttctggag

SEQ ID NO: 2176 - protein, 346 aa, synthetic construct
  REGION 1..346: note = variant of RNA ligase 2 from Klebsiella phage KP179
MHHHHHHGGSNMFAYYSSLENHTNAKFISKIRGAGFLMHTVEWVAREKIHGTNFSVIITPTEIVPAKRTGPILEDESFFGHEIIMKKYMDSFVKVQNMLNAMDLVSVQIFGEFAGGGIQKGVDYGDKDFYVFDILSDSGNEKVYWDDYRVESFCTTVGLKLAPLLGRGSFAELSQYPNDFKSLVNRYNELVDTVGLEMANKHVFGPQASSETGCAEGYVLKPVYPRFFNVGTRVAIKCKNSKFSEKAKLISPIKAKVELTENDKRLLGIFSEYVTWNRVSNVLSHIGSVTAKDFGRVSGLTMKDIIREAAREGHDLLFADNPSAVLKELTGLIQNTIRSKWHEVLE

SEQ ID NO: 2177 - DNA, 1038 bp, synthetic construct
  misc_feature 1..1038: note = variant of RNA ligase 2 from Klebsiella phage KP179
  source 1..1038: mol_type = other DNA
atgcatcaccatcaccatcacggtggcagcaacatgtttgcgtattattcaagtctggaaaaccataccaatgccaagttcattagcaagatccgtggtgcaggcttcctgatgcacaccgtggaatgggtagctcgcgagaagattcatggaacgaactttagcgttatcattactccgaccgaaatcgtgccagccaaacgcacagggccgatcttggaagatgagagcttctttggtcatgaaattatcatgaaaaaatatatggactccttcgtgaaggtgcagaacatgctgaatgcgatggatcttgttagcgtgcaaatctttggcgaatttgcgggtggtggcattcagaaaggcgtcgattacggagacaaagatttctatgtgtttgacatcctgtctgatagcgggaacgagaaagtttactgggatgactatcgcgtcgaatcgttttgcaccactgtgggtctgaaattagcgcctctgctgggacgtggtagtttcgctgaactgtcccagtacccaaacgatttcaatagcctggtgaaccgttataatgaattggttgacacggtcggcctggagatggccaataaacacgtctttggtccgcaagcgtcttctgaaactggcctggcagaaggctacgttcttaaacccgtctatccgcgcttctttaatgtgggtacgcgcgtggcgattaaatgcaagaactccaaattttcggagaaagccaaactgatttcgccaattaaagcgaaggttgaactgacggagaacgataaacgtctgctcggaatctttagcgaatatgttacctggaatcgcgtcagtaacgtactgtcacatattggctcagtgaccgccaaagattttgggcgtgtttcgggtctgacgatgaaagacatcattcgcgaagcagcacgcgaaggccatgatctgttgttcgctgataacccgtcggcggtgctgaaggagctgacaggcctcatccagaacacgattcgctccaaatggcacgaagttctggag

SEQ ID NO: 2178 - protein, 346 aa, synthetic construct
  REGION 1..346: note = variant of RNA ligase 2 from Klebsiella phage KP179
MHHHHHHGGSNMFAYYSSLENHTNAKFISKIRGAGFLMHTVEWVAREKIHGTNFSVIITPTEIVPAKRTGPILEDESFFGHEIIMKKYMDSFVKVQNMLNAMDLVSVQIFGEFAGGGIQKGVDYGDKDFYVFDILSDSGNEKVYWDDYRVESFCTTVGLKLAPLLGRGSFAELSQYPNDFNSLVNRYNELVDTVGLEMANKHVFGPQASSETGLAEGYVLKPVYPRFFNVGTRVAIKCKNSKFSEKAKLISPIKAKVELTENDKRLLGIFSEYVTWNRVSNVLSHIGSVTAKDFGRVSGLTMKDIIREAAREGHDLLFADNPSAVLKELTGLIQNTIRSKWHEVLE

SEQ ID NO: 2179 - DNA, 1038 bp, synthetic construct
  misc_feature 1..1038: note = variant of RNA ligase 2 from Klebsiella phage KP179
  source 1..1038: mol_type = other DNA
atgcatcaccatcaccatcacggtggcagcaacatgtttgcgtattattcaagtctggaaaaccataccaatgccaagttcattagcaagatccgtggtgcaggcttcctgatgcacaccgtggaatgggtagctcgcgagaagattcatggaacgaactttagcgttatcattactccgaccgaaatcgtgccagccaaacgcacagggccgatcttggaagatgagagcttctttggtcatgaaattgtgatgaaaaaatatatggactccttcgtgaaggtgcagaacatgctgaatgcgatggatcttgttagcgtgcaaatctttggcgaatttgcgggtggtggcattcagaaaggcgtcgattacggagacaaagatttctatgtgtttgacatcctgtctgatagcgggaacgagaaagtttactgggatgactatcgcgtcgaatcgttttgcaccactgtgggtctgaaattagcgcctctgctgggacgtggtagtttcgctgaactgtcccagtacccaaacgatttcaaaagcctggtgaaccgttataatgaattggttgacacggtcggcctggagatggccaataaacacgtctttggtccgcaagcgtcttctgaaactggcctggcagaaggctacgttcttaaacccgtctatccgcgcttctttaatgtgggtacgcgcgtggcgattaaatgcaagaactccaaattttcggagaaagccaaactgatttcgccaattaaagcgaaggttgaactgacggagaacgataaacgtctgctcggaatctttagcgaatatgttacctggaatcgcgtcagtaacgtactgtcacatattggctcagtgaccgccaaagattttgggcgtgtttcgggtctgacgatgaaagacatcattcgcgaagcagcacgcgaaggccatgatctgttgttcgctgataacccgtcggcggtgctgaaggagctgacaggcctcatccagaacacgattcgctccaaatggcacgaagttctggag

SEQ ID NO: 2180 - protein, 346 aa, synthetic construct
  REGION 1..346: note = variant of RNA ligase 2 from Klebsiella phage KP179
MHHHHHHGGSNMFAYYSSLENHTNAKFISKIRGAGFLMHTVEWVAREKIHGTNFSVIITPTEIVPAKRTGPILEDESFFGHEIVMKKYMDSFVKVQNMLNAMDLVSVQIFGEFAGGGIQKGVDYGDKDFYVFDILSDSGNEKVYWDDYRVESFCTTVGLKLAPLLGRGSFAELSQYPNDFKSLVNRYNELVDTVGLEMANKHVFGPQASSETGLAEGYVLKPVYPRFFNVGTRVAIKCKNSKFSEKAKLISPIKAKVELTENDKRLLGIFSEYVTWNRVSNVLSHIGSVTAKDFGRVSGLTMKDIIREAAREGHDLLFADNPSAVLKELTGLIQNTIRSKWHEVLE

SEQ ID NO: 2181 - DNA, 1038 bp, synthetic construct
  misc_feature 1..1038: note = variant of RNA ligase 2 from Klebsiella phage KP179
  source 1..1038: mol_type = other DNA
atgcatcaccatcaccatcacggtggcagcaacatgtttgcgtattattcaagtctggaaaaccataccaatgccaagttcattagcaagatccgtggtgcaggcttcctgatgcacaccgtggaatgggtagctcgcgagaagattcatggaacgaactttagcgttatcattactccgaccgaaatcgtgccagccaaacgcacagggccgatcttggaagatgagagcttctttggtcatgaaattatcatgaaaaaatatatggactccttcgtgaaggtgcagaacatgctgaatgcgatggatcttgttagcgtgcaaatctttggcgaatttgcgggtggtggcattcagaaaggcgtcgattacggagacaaagatttctatgtgtttgacatcctgtctgatagcgggaacgagaaagtttactgggatgactatcgcgtcgaatcgttttgcaccactgtgggtctgaaattagcgcctctgctgggacgtggtagtttcgctgaactgtcccagtacccaaacgatttcaaaagcctggtgaaccgttataatgaattggttgacacggtcggcctggagatggccaataaacacgtctttggtccgcaagcgtcttctgaaactggcctggcagaaggctacgttcttaaacccgtctatccgcgcttctttaatgtgggtacgcgcgtggcgattaaatgcaagaactccaaattttcggagaaagccaaactgatttcgccaattaaagcgaaggttgaactgacggagaacgataaacgtctgctcggaatccttagcgaatatgttacctggaatcgcgtcagtaacgtactgtcacatattggctcagtgaccgccaaagattttgggcgtgtttcgggtctgacgatgaaagacatcattcgcgaagcagcacgcgaaggccatgatctgttgttcgctgataacccgtcggcggtgctgaaggagctgacaggcctcatccagaacacgattcgctccaaatggcacgaagttctggag

SEQ ID NO: 2182 - protein, 346 aa, synthetic construct
  REGION 1..346: note = variant of RNA ligase 2 from Klebsiella phage KP179
MHHHHHHGGSNMFAYYSSLENHTNAKFISKIRGAGFLMHTVEWVAREKIHGTNFSVIITPTEIVPAKRTGPILEDESFFGHEIIMKKYMDSFVKVQNMLNAMDLVSVQIFGEFAGGGIQKGVDYGDKDFYVFDILSDSGNEKVYWDDYRVESFCTTVGLKLAPLLGRGSFAELSQYPNDFKSLVNRYNELVDTVGLEMANKHVFGPQASSETGLAEGYVLKPVYPRFFNVGTRVAIKCKNSKFSEKAKLISPIKAKVELTENDKRLLGILSEYVTWNRVSNVLSHIGSVTAKDFGRVSGLTMKDIIREAAREGHDLLFADNPSAVLKELTGLIQNTIRSKWHEVLE

SEQ ID NO: 2183 - DNA, 1038 bp, synthetic construct
  misc_feature 1..1038: note = variant of RNA ligase 2 from Klebsiella phage KP179
  source 1..1038: mol_type = other DNA
atgcatcaccatcaccatcacggtggcagcaacatgtttgcgtattattcaagtctggaaaaccataccaatgccaagttcattagcaagatccgtggtgcaggcttcctgatgcacaccgtggaatgggtagctcgcgagaagattcatggaacgaactttagcgttatcattactccgaccgaaatcgtgccagccaaacgcacagggccgatcttggaagatgagagcttctttggtcatgaaattatcatgaaaaaatatatggacgctttcgtgaaggtgcagaacatgctgaatgcgatggatcttgttagcgtgcaaatctttggcgaatttgcgggtggtggcattcagaaaggcgtcgattacggagacaaagatttctatgtgtttgacatcctgtctgatagcgggaacgagaaagtttactgggatgactatcgcgtcgaatcgttttgcaccactgtgggtctgaaattagcgcctctgctgggacgtggtagtttcgctgaactgtcccagtacccaaacgatttcaaaagcctggtgaaccgttataatgaattggttgacacggtcggcctggagatggccaataaacacgtctttggtccgcaagcgtcttctgaaactggcctggcagaaggctacgttcttaaacccgtctatccgcgcttctttaatgtgggtacgcgcgtggcgattaaatgcaagaactccaaattttcggagaaagccaaactgatttcgccaattaaagcgaaggttgaactgacggagaacgataaacgtctgctcggaatctttagcgaatatgttacctggaatcgcgtcagtaacgtactgtcacatattggctcagtgaccgccaaagattttgggcgtgtttcgggtctgacgatgaaagacatcattcgcgaagcagcacgcgaaggccatgatctgttgttcgctgataacccgtcggcggtgctgaaggagctgacaggcctcatccagaacacgattcgctccaaatggcacgaagttctggag

SEQ ID NO: 2184 - protein, 346 aa, synthetic construct
  REGION 1..346: note = variant of RNA ligase 2 from Klebsiella phage KP179
MHHHHHHGGSNMFAYYSSLENHTNAKFISKIRGAGFLMHTVEWVAREKIHGTNFSVIITPTEIVPAKRTGPILEDESFFGHEIIMKKYMDAFVKVQNMLNAMDLVSVQIFGEFAGGGIQKGVDYGDKDFYVFDILSDSGNEKVYWDDYRVESFCTTVGLKLAPLLGRGSFAELSQYPNDFKSLVNRYNELVDTVGLEMANKHVFGPQASSETGLAEGYVLKPVYPRFFNVGTRVAIKCKNSKFSEKAKLISPIKAKVELTENDKRLLGIFSEYVTWNRVSNVLSHIGSVTAKDFGRVSGLTMKDIIREAAREGHDLLFADNPSAVLKELTGLIQNTIRSKWHEVLE

SEQ ID NO: 2185 - DNA, 1038 bp, synthetic construct
  misc_feature 1..1038: note = variant of RNA ligase 2 from Klebsiella phage KP179
  source 1..1038: mol_type = other DNA
atgcatcaccatcaccatcacggtggcagcaacatgtttgcgtattattcaagtctggaaaaccataccaatgccaagttcattagcaagatccgtggtgcaggcttcctgatgcacaccgtggaatgggtagctcgcgagaagattcatggaacgaactttagcgttatcattactccgaccgaaatcgtgccagccaaacgcacagggccgatcttggaagatgagagcttctttggtcatgaaattatcatgaaaaaatatatggactccttcgtgaaggtgcagaacatgctgaatgcgatggatcttgttagcgtgcaaatctttggcgaatttgcgggtggtggcattcagaaaggcgtcgattacggagacaaagatttctatgtgtttgacatcctgtctgatagcgggaacgagaaagtttactgggatgactatcgcgtcgaatcgttttgcaccactgtgggtctgaaattagcgcctctgctgggacgtggtagtttcgctgaactgtcccagtacccaaacgatttcaaaagcctggtgaaccgttataatgaattggttgacacggtcggcctggagatggccaataaacacgtctttggtccgcaagcgtcttctgaaactggcctggcagaaggctacgttcttaaacccgtctatccgcgcttctttaatgtgggtacgcgcgtggcgattaaatgcaagaactccaaattttcggagaaagccaaactgatttcgccaattaaagcgaaggttgaactgacggagaacgataaacgtctgctcggaatctttagcgaatatgttacctggaatcgcgtcagtaacgtactgtcacatattggctcagtgaccgccaaagattttgtgcgtgtttcgggtctgacgatgaaagacatcattcgcgaagcagcacgcgaaggccatgatctgttgttcgctgataacccgtcggcggtgctgaaggagctgacaggcctcatccagaacacgattcgctccaaatggcacgaagttctggag

SEQ ID NO: 2186 - protein, 346 aa, synthetic construct
  REGION 1..346: note = variant of RNA ligase 2 from Klebsiella phage KP179
MHHHHHHGGSNMFAYYSSLENHTNAKFISKIRGAGFLMHTVEWVAREKIHGTNFSVIITPTEIVPAKRTGPILEDESFFGHEIIMKKYMDSFVKVQNMLNAMDLVSVQIFGEFAGGGIQKGVDYGDKDFYVFDILSDSGNEKVYWDDYRVESFCTTVGLKLAPLLGRGSFAELSQYPNDFKSLVNRYNELVDTVGLEMANKHVFGPQASSETGLAEGYVLKPVYPRFFNVGTRVAIKCKNSKFSEKAKLISPIKAKVELTENDKRLLGIFSEYVTWNRVSNVLSHIGSVTAKDFVRVSGLTMKDIIREAAREGHDLLFADNPSAVLKELTGLIQNTIRSKWHEVLE

SEQ ID NO: 2187 - DNA, 1038 bp, synthetic construct
  misc_feature 1..1038: note = variant of RNA ligase 2 from Klebsiella phage KP179
  source 1..1038: mol_type = other DNA
atgcatcaccatcaccatcacggtggcagcaacatgtttgcgtattattcaagtctggaaaaccataccaatgccaagttcattagcaagatccgtggtgcaggcttcctgatgcacaccgtggaatgggtagctcgcgagaagattcatggaacgaactttagcgttatcattactccgaccgaaatcgtgccagccaaacgcacagggccgatcttggaagatgagagcttctttggtcatgaaattatcatgaaaaaatatatggactccttcgtgaaggtgcagaacatgctgaatgcgatggatcttgttagcgtgcaaatctttggcgaatttgcgggtggtggcattcagaaaggctgggattacggagacaaagatttctatgtgtttgacatcctgtctgatagcgggaacgagaaagtttactgggatgactatcgcgtcgaatcgttttgcaccactgtgggtctgaaattagcgcctctgctgggacgtggtagtttcgctgaactgtcccagtacccaaacgatttcaaaagcctggtgaaccgttataatgaattggttgacacggtcggcctggagatggccaataaacacgtctttggtccgcaagcgtcttctgaaactggcctggcagaaggctacgttcttaaacccgtctatccgcgcttctttaatgtgggtacgcgcgtggcgattaaatgcaagaactccaaattttcggagaaagccaaactgatttcgccaattaaagcgaaggttgaactgacggagaacgataaacgtctgctcggaatctttagcgaatatgttacctggaatcgcgtcagtaacgtactgtcacatattggctcagtgaccgccaaagattttgggcgtgtttcgggtctgacgatgaaagacatcattcgcgaagcagcacgcgaaggccatgatctgttgttcgctgataacccgtcggcggtgctgaaggagctgacaggcctcatccagaacacgattcgctccaaatggcacgaagttctggag

SEQ ID NO: 2188 - protein, 346 aa, synthetic construct
  REGION 1..346: note = variant of RNA ligase 2 from Klebsiella phage KP179
MHHHHHHGGSNMFAYYSSLENHTNAKFISKIRGAGFLMHTVEWVAREKIHGTNFSVIITPTEIVPAKRTGPILEDESFFGHEIIMKKYMDSFVKVQNMLNAMDLVSVQIFGEFAGGGIQKGWDYGDKDFYVFDILSDSGNEKVYWDDYRVESFCTTVGLKLAPLLGRGSFAELSQYPNDFKSLVNRYNELVDTVGLEMANKHVFGPQASSETGLAEGYVLKPVYPRFFNVGTRVAIKCKNSKFSEKAKLISPIKAKVELTENDKRLLGIFSEYVTWNRVSNVLSHIGSVTAKDFGRVSGLTMKDIIREAAREGHDLLFADNPSAVLKELTGLIQNTIRSKWHEVLE

SEQ ID NO: 2189 - DNA, 1038 bp, synthetic construct
  misc_feature 1..1038: note = variant of RNA ligase 2 from Klebsiella phage KP179
  source 1..1038: mol_type = other DNA
atgcatcaccatcaccatcacggtggcagcaacatgtttgcgtattattcaagtctggaaaaccataccaatgccaagttcattagcaagatccgtggtgcaggcttcctgatgcacaccgtggaatgggtagctcgcgagaagattcatggaacgaactttagcgttatcattactccgaccgaaatcgtgccagccaaacgcacagggccgatcttggaagatgagagcttctttggtcatgaaattatcatgaaaaaatatatggactccttcgtgaaggtgcagaacatgctgaatgcgatggatcttgttagcgtgcaaatctttggcgaatttgcgggtggtggcattcagaaaggcgtcgattacggagacaaagatttctatgtgtttgacatcctgtctgatagcgggaacgagaaagtttactgggatgactatcgcgtcgaatcgttttgcaccactgtgggtctgaaattagcgcctctgctgggacgtggtagtttcgctgaactgtcccagtacccaaacgatttcaaaagcctggtgaaccgttataatgaattggttgacacggtcggcctggagatggccaataaacacgtctttggtccgcaagcgtcttctgaaactggcctggcagaaggctacgttcttaaacccgtctatccgcgcttctttaatgtgggtacgcgcgtggcgattaaatgcaagaactccaaattttcggagaaagccaaactgatttcgccaattaaagcgaaggttgaactgacggagaacgataaacgtctgctcggaatctttagcgaatatgttacctggaatcgcgtcagtaacgtactgtcacatattggctcagtgaccgccaaagattttgggcgtgtttcgggtctgacgatgaaagacatcattcgcgaagcagcacgcgaaggccatgattatttgttcgctgataacccgtcggcggtgctgaaggagctgacaggcctcatccagaacacgattcgctccaaatggcacgaagttctggag

SEQ ID NO: 2190 - protein, 346 aa, synthetic construct
  REGION 1..346: note = variant of RNA ligase 2 from Klebsiella phage KP179
MHHHHHHGGSNMFAYYSSLENHTNAKFISKIRGAGFLMHTVEWVAREKIHGTNFSVIITPTEIVPAKRTGPILEDESFFGHEIIMKKYMDSFVKVQNMLNAMDLVSVQIFGEFAGGGIQKGVDYGDKDFYVFDILSDSGNEKVYWDDYRVESFCTTVGLKLAPLLGRGSFAELSQYPNDFKSLVNRYNELVDTVGLEMANKHVFGPQASSETGLAEGYVLKPVYPRFFNVGTRVAIKCKNSKFSEKAKLISPIKAKVELTENDKRLLGIFSEYVTWNRVSNVLSHIGSVTAKDFGRVSGLTMKDIIREAAREGHDYLFADNPSAVLKELTGLIQNTIRSKWHEVLE

SEQ ID NO: 2191 - DNA, 1038 bp, synthetic construct
  misc_feature 1..1038: note = variant of RNA ligase 2 from Klebsiella phage KP179
  source 1..1038: mol_type = other DNA
atgcatcaccatcaccatcacggtggcagcaacatgtttgcgtattattcaagtctggaaaaccataccaatgccaagttcattagcaagatccgtggtgcaggcttcctgatgcacaccgtggaatgggtagctcgcgagaagattcatggaacgaactttagcgttatcattactccgaccgaaatcgtgccagccaaacgcacagggccgatcttggaagatgagagcttctttggtcatgaaattatcatgaaaaaatatatggactccttcgtgaaggtgcagaacatgctgaatgcgatggatcttgttagcgtgcaaatctttggcgaatttgcgggtggtggcattcagaaaggcgtcgattacggagacaaagatttctatgtgtttgacatcctgtctgatagcgggaacgagaaagtttactgggatgactatcgcgtcgaatcgttttgcaccactgtgggtctgaaattagcgcctctgctgggacgtggtagtttcgctgaactgtcccagtacccaaacgatttcaaaagcctggtgaaccgttataatgaattggttgacacggtcggcctggagatggccaataaacacgtctttggtccgcaagcgtcttctgaaactggcctggcagaaggctacgttcttaaacccgtctatccgcgcttctttaatgtgggtacgcgcgtggcgattaaatgcaagaactccaaattttcggagaaagccaaactgatttcgccaattaaagcgaaggttgaactgacggagaacgataaacgtctgctcggaatctttagcgaatatgttacctggaatcgcgtcagtaacgtactgtcacatgagggctcagtgaccgccaaagattttgggcgtgtttcgggtctgacgatgaaagacatcattcgcgaagcagcacgcgaaggccatgatctgttgttcgctgataacccgtcggcggtgctgaaggagctgacaggcctcatccagaacacgattcgctccaaatggcacgaagttctggag

SEQ ID NO: 2192 - protein, 346 aa, synthetic construct
  REGION 1..346: note = variant of RNA ligase 2 from Klebsiella phage KP179
MHHHHHHGGSNMFAYYSSLENHTNAKFISKIRGAGFLMHTVEWVAREKIHGTNFSVIITPTEIVPAKRTGPILEDESFFGHEIIMKKYMDSFVKVQNMLNAMDLVSVQIFGEFAGGGIQKGVDYGDKDFYVFDILSDSGNEKVYWDDYRVESFCTTVGLKLAPLLGRGSFAELSQYPNDFKSLVNRYNELVDTVGLEMANKHVFGPQASSETGLAEGYVLKPVYPRFFNVGTRVAIKCKNSKFSEKAKLISPIKAKVELTENDKRLLGIFSEYVTWNRVSNVLSHEGSVTAKDFGRVSGLTMKDIIREAAREGHDLLFADNPSAVLKELTGLIQNTIRSKWHEVLE

SEQ ID NO: 2193 - DNA, 1038 bp, synthetic construct
  misc_feature 1..1038: note = variant of RNA ligase 2 from Klebsiella phage KP179
  source 1..1038: mol_type = other DNA
atgcatcaccatcaccatcacggtggcagcaacatgtttgcgtattattcaagtctggaaaaccataccaatgccaagttcattagcaagatccgtggtgcaggcttcctgatgcacaccgtggaatgggtagctcgcgagaagattcatggaacgaactttagcgttatcattactccgaccgaaatcgtgccagccaaacgcacagggccgatcttggaagatgagagcttctttggtcatgaaattatcatgaaaaaatatatggactccttcgtgaaggtgcagaacatgctgaatgcgatggatcttgttagcgtgcaaatctttggcgaatttgcgggtggtggcattcagaaaggcgtcgattacggagacaaagatttctatgtgtttgacatcctgtctgatagcgggaacgagaaagtttactgggatgactatcgcgtcgaatcgttttgcaccactgtgggtctgaaattagcgcctctgctgggacgtggtagtttcgctgaactgtcccagtacccaaacgatttcaaaagcctggtgaaccgttataatgaattggttgacacggtcggcctggagatggccaataaacacgtctttggtccgcaagcgtcttctgaaactggcctggcagaaggctacgttcttaaacccgtctatccgcgcttctttaatgtgggtacgcgcgtggcgattaaatgcaagaactccaaattttcggagaaagccaaactgatttcgccaattaaagcgaaggttgaactgacggagaacgataaacgtctgctcggaatctttagcgaatatgttacctggaatcgcgtcagtaacgtactgtcacatattggctcagtgaccgccaaagattttgggcgtgtttcgggtctgatgatgaaagacatcattcgcgaagcagcacgcgaaggccatgatctgttgttcgctgataacccgtcggcggtgctgaaggagctgacaggcctcatccagaacacgattcgctccaaatggcacgaagttctggag

SEQ ID NO: 2194 - protein, 346 aa, synthetic construct
  REGION 1..346: note = variant of RNA ligase 2 from Klebsiella phage KP179
MHHHHHHGGSNMFAYYSSLENHTNAKFISKIRGAGFLMHTVEWVAREKIHGTNFSVIITPTEIVPAKRTGPILEDESFFGHEIIMKKYMDSFVKVQNMLNAMDLVSVQIFGEFAGGGIQKGVDYGDKDFYVFDILSDSGNEKVYWDDYRVESFCTTVGLKLAPLLGRGSFAELSQYPNDFKSLVNRYNELVDTVGLEMANKHVFGPQASSETGLAEGYVLKPVYPRFFNVGTRVAIKCKNSKFSEKAKLISPIKAKVELTENDKRLLGIFSEYVTWNRVSNVLSHIGSVTAKDFGRVSGLMMKDIIREAAREGHDLLFADNPSAVLKELTGLIQNTIRSKWHEVLE

SEQ ID NO: 2195 - DNA, 1038 bp, synthetic construct
  misc_feature 1..1038: note = variant of RNA ligase 2 from Klebsiella phage KP179
  source 1..1038: mol_type = other DNA
atgcatcaccatcaccatcacggtggcagcaacatgtttgcgtattattcaagtctggaaaaccataccaatgccaagttcattagcaagatccgtggtgcaggcttcctgatgcacaccgtggaatgggtagctcgcgagaagattcatggaacgaactttagcgttatcattactccgaccgaaatcgtgccagccaaacgcacagggccgatcttggaagatgagagcttctttggtcatgaaattatcatgaaaaaatatatggactccttcgtgaaggtgcagaacatgctgaatgcgatggatcttgttagcgtgcaaatctttggcgaatttgcgggtggtggcattcagaaaggcgtcgattacggagacaaagatttctatgtgtttgacatcctgtctgatagcgggaacgagaaagtttactgggatgactatcgcgtcgaatcgttttgcaccactgtgggtctgaaattagcgcctctgctgggacgtggtagttatgctgaactgtcccagtacccaaacgatttcaaaagcctggtgaaccgttataatgaattggttgacacggtcggcctggagatggccaataaacacgtctttggtccgcaagcgtcttctgaaactggcctggcagaaggctacgttcttaaacccgtctatccgcgcttctttaatgtgggtacgcgcgtggcgattaaatgcaagaactccaaattttcggagaaagccaaactgatttcgccaattaaagcgaaggttgaactgacggagaacgataaacgtctgctcggaatctttagcgaatatgttacctggaatcgcgtcagtaacgtactgtcacatattggctcagtgaccgccaaagattttgggcgtgtttcgggtctgacgatgaaagacatcattcgcgaagcagcacgcgaaggccatgatctgttgttcgctgataacccgtcggcggtgctgaaggagctgacaggcctcatccagaacacgattcgctccaaatggcacgaagttctggag

SEQ ID NO: 2196 - protein, 346 aa, synthetic construct
  REGION 1..346: note = variant of RNA ligase 2 from Klebsiella phage KP179
MHHHHHHGGSNMFAYYSSLENHTNAKFISKIRGAGFLMHTVEWVAREKIHGTNFSVIITPTEIVPAKRTGPILEDESFFGHEIIMKKYMDSFVKVQNMLNAMDLVSVQIFGEFAGGGIQKGVDYGDKDFYVFDILSDSGNEKVYWDDYRVESFCTTVGLKLAPLLGRGSYAELSQYPNDFKSLVNRYNELVDTVGLEMANKHVFGPQASSETGLAEGYVLKPVYPRFFNVGTRVAIKCKNSKFSEKAKLISPIKAKVELTENDKRLLGIFSEYVTWNRVSNVLSHIGSVTAKDFGRVSGLTMKDIIREAAREGHDLLFADNPSAVLKELTGLIQNTIRSKWHEVLE

SEQ ID NO: 2197 - DNA, 1038 bp, synthetic construct
  misc_feature 1..1038: note = variant of RNA ligase 2 from Klebsiella phage KP179
  source 1..1038: mol_type = other DNA
atgcatcaccatcaccatcacggtggcagcaacatgtttgcgtattattcaagtctggaaaaccataccaatgccaagttcattagcaagatccgtggtgcaggcttcctgatgcacaccgtggaatgggtagctcgcgagaagattcatggaacgaactttagcgttatcattactccgaccgaaatcgtgccagccaaacgcacagggccgatcttggaagatgagagcttctttggtcatgaaattatcatgaaaaaatatatggactccttcgtgaaggtgcagaacatgctgaatgcgatggatcttgttagcgtgcaaatctttggcgaatttgcgggtggtggcattcagaaaggcgtcgattacggagacaaagatttctatgtgtttgacatcctgtctgatagcgggaacgagaaagtttactgggatgactatcgcgtcgaatcgttttgcaccactgtgggtctgaaattagcgcctctgctgggacgtggtagtttcgctgaactgtcccagtacccaaacgatttcaaaagcctggtgaaccgttataatgaattggttgacacggtcggcctggagatggccaataaacacgtctttggtccgcaagcgtcttctgaaactggcctggcagaaggctacgttcttaaacccgtctatccgcgcttctttaatgtgggtacgcgcgtggcgattaaatgcaagaactccaaattttcggagaaagccaaactgatttcgccaattaaagcgaaggttgaactgacggagaacgatgcgcgtctgctcggaatctttagcgaatatgttacctggaatcgcgtcagtaacgtactgtcacatattggctcagtgaccgccaaagattttgggcgtgtttcgggtctgacgatgaaagacatcattcgcgaagcagcacgcgaaggccatgatctgttgttcgctgataacccgtcggcggtgctgaaggagctgacaggcctcatccagaacacgattcgctccaaatggcacgaagttctggag

SEQ ID NO: 2198 - protein, 346 aa, synthetic construct
  REGION 1..346: note = variant of RNA ligase 2 from Klebsiella phage KP179
MHHHHHHGGSNMFAYYSSLENHTNAKFISKIRGAGFLMHTVEWVAREKIHGTNFSVIITPTEIVPAKRTGPILEDESFFGHEIIMKKYMDSFVKVQNMLNAMDLVSVQIFGEFAGGGIQKGVDYGDKDFYVFDILSDSGNEKVYWDDYRVESFCTTVGLKLAPLLGRGSFAELSQYPNDFKSLVNRYNELVDTVGLEMANKHVFGPQASSETGLAEGYVLKPVYPRFFNVGTRVAIKCKNSKFSEKAKLISPIKAKVELTENDARLLGIFSEYVTWNRVSNVLSHIGSVTAKDFGRVSGLTMKDIIREAAREGHDLLFADNPSAVLKELTGLIQNTIRSKWHEVLE

SEQ ID NO: 2199 - DNA, 1038 bp, synthetic construct
  misc_feature 1..1038: note = variant of RNA ligase 2 from Klebsiella phage KP179
  source 1..1038: mol_type = other DNA
atgcatcaccatcaccatcacggtggcagcaacatgtttgcgtattattcaagtctggaaaaccataccaatgccaagttcattagcaagatccgtggtgcaggcttcctgatgcacaccgtggaatgggtagctcgcgagaagattcatggaacgaactttagcgttatcattactccgaccgaaatcgtgccagccaaacgcacagggccgatcttggaagatgagagcttctttggtcatgaaattatcatgaaaaaatatatggactccttcgtgaaggtgcagaacatgctgaatgcgatggatcttgttagcgtgcaaatctttggcgaatttgcgggtggtggcattcagaaaggcgtcgattacggagacaaagatttctatgtgtttgacatcctgtctgatagcgggaacgagaaagtttactgggatgactatcgcgtcgaatcgttttgcaccactgtgggtctgaaattagcgcctctgctgggacgtggtagtttcgctgaactgtcccagtacccaaacgatttcaaaagcctggtgaaccgttataatgaattggttgacacggtcggcctggagatggccaataaacacgtctttggtccgcaagcgtcttctgaaactggcctggcagaaggctacgttcttaaacccgtctatccgcgcttctttaatgtgggtacgcgcgtggcgattaaatgcaagaactccaaattttcggagaaagccaaactgatttcgccaattaaagcgaaggttgaactgacggagaacgataaacgtctgctcggaatctttagcgaatatgttacctggaatcgcgtcagtaacgtactgtcacatattggctcagataccgccaaagattttgggcgtgtttcgggtctgacgatgaaagacatcattcgcgaagcagcacgcgaaggccatgatctgttgttcgctgataacccgtcggcggtgctgaaggagctgacaggcctcatccagaacacgattcgctccaaatggcacgaagttctggag

SEQ ID NO: 2200 - protein, 346 aa, synthetic construct
  REGION 1..346: note = variant of RNA ligase 2 from Klebsiella phage KP179
MHHHHHHGGSNMFAYYSSLENHTNAKFISKIRGAGFLMHTVEWVAREKIHGTNFSVIITPTEIVPAKRTGPILEDESFFGHEIIMKKYMDSFVKVQNMLNAMDLVSVQIFGEFAGGGIQKGVDYGDKDFYVFDILSDSGNEKVYWDDYRVESFCTTVGLKLAPLLGRGSFAELSQYPNDFKSLVNRYNELVDTVGLEMANKHVFGPQASSETGLAEGYVLKPVYPRFFNVGTRVAIKCKNSKFSEKAKLISPIKAKVELTENDKRLLGIFSEYVTWNRVSNVLSHIGSDTAKDFGRVSGLTMKDIIREAAREGHDLLFADNPSAVLKELTGLIQNTIRSKWHEVLE

SEQ ID NO: 2201 - DNA, 1038 bp, synthetic construct
  misc_feature 1..1038: note = variant of RNA ligase 2 from Klebsiella phage KP179
  source 1..1038: mol_type = other DNA
atgcatcaccatcaccatcacggtggcagcaacatgtttgcgtattattcaagtctggaaaaccataccaatgccaagttcattagcaagatccgtggtgcaggcttcctgatgcacaccgtggaatgggtagctcgcgagaagattcatggaacgaactttagcgttatcattactccgaccgaaatcgtgccagccaaacgcacagggccgatcttggaagatgagagcttctttggtcatgaaattatcatgaaaaaatatatggactccttcgtgaaggtgcagaacatgctgaatgcgatggatcttgttagcgtgcaaatctttggcgaatttgcgggtggtggcattcagaaaggcgtcgattacggagacaaagatttctatgtgtttgacatcctgtctgatagcgggaacgagaaagtttactgggatgactatcgcgtcgaatcgttttgcaccactgtgggtctgaaattagcgcctctgctgggacgtggtagtttcgctgaactgtcccagtacccaaacgatttcaaaagcctggtgaaccgttataatgaattggttgacacggtcggcctggagatggccaataaacacgtctttggtccgcaagcgtcttctgaaactggcctggcagaaggctacgttcttaaacccgtctatccgcgcttctttaatgtgggtacgcgcgtggcgattaaatgcaagaactccaaattttcggagaaagccaaactgatttcgccaattaaagcgaaggttgaactgacggagaacgataaacgtctgctcggaatctttagcgaatatgttacctggaatcgcgtcagtaacgtactgtcacatattggctcaacgaccgccaaagattttgggcgtgtttcgggtctgacgatgaaagacatcattcgcgaagcagcacgcgaaggccatgatctgttgttcgctgataacccgtcggcggtgctgaaggagctgacaggcctcatccagaacacgattcgctccaaatggcacgaagttctggag

SEQ ID NO: 2202 - protein, 346 aa, synthetic construct
  REGION 1..346: note = variant of RNA ligase 2 from Klebsiella phage KP179
MHHHHHHGGSNMFAYYSSLENHTNAKFISKIRGAGFLMHTVEWVAREKIHGTNFSVIITPTEIVPAKRTGPILEDESFFGHEIIMKKYMDSFVKVQNMLNAMDLVSVQIFGEFAGGGIQKGVDYGDKDFYVFDILSDSGNEKVYWDDYRVESFCTTVGLKLAPLLGRGSFAELSQYPNDFKSLVNRYNELVDTVGLEMANKHVFGPQASSETGLAEGYVLKPVYPRFFNVGTRVAIKCKNSKFSEKAKLISPIKAKVELTENDKRLLGIFSEYVTWNRVSNVLSHIGSTTAKDFGRVSGLTMKDIIREAAREGHDLLFADNPSAVLKELTGLIQNTIRSKWHEVLE

SEQ ID NO: 2203 - DNA, 1038 bp, synthetic construct
  misc_feature 1..1038: note = variant of RNA ligase 2 from Klebsiella phage KP179
  source 1..1038: mol_type = other DNA
atgcatcaccatcaccatcacggtggcagcaacatgtttgcgtattattcaagtctggaaaaccataccaatgccaagttcattagcaagatccgtggtgcaggcttcctgatgcacaccgtggaatgggtagctcgcgagaagattcatggaacgaactttagcgttatcattactccgaccgaaatcgtgccagccaaacgcacagggccgatcttggaagatgagagcttctttggtcatgaaattatcatgaaaaaatatatggactccttcgtgaaggtgcagaacatgctgaatgcgatggatcttgttagcgtgcaaatctttggcgaatttgcgggtggtggcattcagaaaggcgtcgattacggagacaaagatttctatgtgtttgacatcctgtctgatagcgggaacgagaaagtttactgggatgactatcgcgtcgaatcgttttgcaccactgtgggtctgaaattagcgcctctgctgggacgtggtagtttcgctgaactgtcccagtacccaaacgatttcaaaagcctggtgaaccgttataatgaattggttgacacggtcggcctggagatggccaataaacacgtctttggtccgcaagcgtcttctgaaactggcctggcagaaggctacgttcttaaacccgtctatccgcgcttctttaatgtgggtacgcgcgtggcgattaaatgcaagaactccaaattttcggagaaagccaaactgatttcgccaattaaagcgaaggttgaactgacggagaacgataaacgtctgctcggaatctttagcgaatatgttacctggaatcgcgtcagtaacgtactgtcacatattggctcagtgccggccaaagattttgggcgtgtttcgggtctgacgatgaaagacatcattcgcgaagcagcacgcgaaggccatgatctgttgttcgctgataacccgtcggcggtgctgaaggagctgacaggcctcatccagaacacgattcgctccaaatggcacgaagttctggag

SEQ ID NO: 2204 - protein, 346 aa, synthetic construct
  REGION 1..346: note = variant of RNA ligase 2 from Klebsiella phage KP179
MHHHHHHGGSNMFAYYSSLENHTNAKFISKIRGAGFLMHTVEWVAREKIHGTNFSVIITPTEIVPAKRTGPILEDESFFGHEIIMKKYMDSFVKVQNMLNAMDLVSVQIFGEFAGGGIQKGVDYGDKDFYVFDILSDSGNEKVYWDDYRVESFCTTVGLKLAPLLGRGSFAELSQYPNDFKSLVNRYNELVDTVGLEMANKHVFGPQASSETGLAEGYVLKPVYPRFFNVGTRVAIKCKNSKFSEKAKLISPIKAKVELTENDKRLLGIFSEYVTWNRVSNVLSHIGSVPAKDFGRVSGLTMKDIIREAAREGHDLLFADNPSAVLKELTGLIQNTIRSKWHEVLE

SEQ ID NO: 2205 - DNA, 1038 bp, synthetic construct
  misc_feature 1..1038: note = variant of RNA ligase 2 from Klebsiella phage KP179
  source 1..1038: mol_type = other DNA
atgcatcaccatcaccatcacggtggcagcaacatgtttgcgtattattcaagtctggaaaaccataccaatgccaagttcattagcaagatccgtggtgcaggcttcctgatgcacaccgtggaatgggtagctcgcgagaagattcatggaacgaactttagcgttatcattactccgaccgaaatcgtgccagccaaacgcacagggccgatcttggaagatgagagcttctttggtcatgaaattatcatgaaaaaatatatggactccttcgtgaaggtgcagaacatgctgaatgcgatggatcttgttagcgtgcaaatctttggcgaatttgcgggtggtggcattcagaaaggcgtcgattacggagacaaagatttctatgtgtttgacatcctgtctgatagcgggaacgagaaagtttactgggatgactatcgcgtcgaatcgttttgcaccactgtgggtctgaaattagcgcctctgctgggacgtggtagtttcgctgaactgtcccagtacccaaacgatttcaaaagcctggtgaaccgttataatgaaattgttgacacggtcggcctggagatggccaataaacacgtctttggtccgcaagcgtcttctgaaactggcctggcagaaggctacgttcttaaacccgtctatccgcgcttctttaatgtgggtacgcgcgtggcgattaaatgcaagaactccaaattttcggagaaagccaaactgatttcgccaattaaagcgaaggttgaactgacggagaacgataaacgtctgctcggaatctttagcgaatatgttacctggaatcgcgtcagtaacgtactgtcacatattggctcagtgaccgccaaagattttgggcgtgtttcgggtctgacgatgaaagacatcattcgcgaagcagcacgcgaaggccatgatctgttgttcgctgataacccgtcggcggtgctgaaggagctgacaggcctcatccagaacacgattcgctccaaatggcacgaagttctggag

SEQ ID NO: 2206 - protein, 346 aa, synthetic construct
  REGION 1..346: note = variant of RNA ligase 2 from Klebsiella phage KP179
MHHHHHHGGSNMFAYYSSLENHTNAKFISKIRGAGFLMHTVEWVAREKIHGTNFSVIITPTEIVPAKRTGPILEDESFFGHEIIMKKYMDSFVKVQNMLNAMDLVSVQIFGEFAGGGIQKGVDYGDKDFYVFDILSDSGNEKVYWDDYRVESFCTTVGLKLAPLLGRGSFAELSQYPNDFKSLVNRYNEIVDTVGLEMANKHVFGPQASSETGLAEGYVLKPVYPRFFNVGTRVAIKCKNSKFSEKAKLISPIKAKVELTENDKRLLGIFSEYVTWNRVSNVLSHIGSVTAKDFGRVSGLTMKDIIREAAREGHDLLFADNPSAVLKELTGLIQNTIRSKWHEVLE

SEQ ID NO: 2207 - DNA, 1038 bp, synthetic construct
  misc_feature 1..1038: note = variant of RNA ligase 2 from Klebsiella phage KP179
  source 1..1038: mol_type = other DNA
atgcatcaccatcaccatcacggtggcagcaacatgtttgcgtattattcaagtctggaaaaccataccaatgccaagttcattagcaagatccgtggtgcaggcttcctgatgcacaccgtggaatgggtagctcgcgagaagattcatggaacgaactttagcgttatcattactccgaccgaaatcgtgccagccaaacgcacagggccgatcttggaagatgagagcttctttggtcatgaaattatcatgaaaaaatatatggactccttcgtgaaggtgcagaacatgctgaatgcgatggatcttgttagcgtgcaaatctttggcgaatttgcgggtggtggcattcagaaaggcgtcgattacggagacaaagatttctatgtgtttgacatcctgtctgatagcgggaacgagaaagtttactgggatgactatcgcgtcgaatcgttttgcaccactgtgggtctgaaattagcgcctctgctgggacgtggtagtttcgctgaactgtcccagtacccaaacgatttcaaaagcctggtgaaccgttataatgaattggttgacacggtcggcctggagatggccaataaacacgtctttggtccgcaagcgtcttctgaaactggcctggcagaaggctacgttcttaaacccgtctatccgcgcttctttaatgtgggtacgcgcgtggcgattaaatgcaagaactccaaattttcggagaaagccaaactgatttcgccaattaaagcgaaggttgaactgacggagaacgataaacgtctgctcggaatctttagcgaatatgttacctggaatcgcgtcagtaacgtactgtcacatattggctcagtgaccgccaaagattttgggcgtgtttcgggtctgacgatgaaagacatcattcgcgaagcagcacgcgaaggccatgatattttgttcgctgataacccgtcggcggtgctgaaggagctgacaggcctcatccagaacacgattcgctccaaatggcacgaagttctggag

SEQ ID NO: 2208 - protein, 346 aa, synthetic construct
  REGION 1..346: note = variant of RNA ligase 2 from Klebsiella phage KP179
MHHHHHHGGSNMFAYYSSLENHTNAKFISKIRGAGFLMHTVEWVAREKIHGTNFSVIITPTEIVPAKRTGPILEDESFFGHEIIMKKYMDSFVKVQNMLNAMDLVSVQIFGEFAGGGIQKGVDYGDKDFYVFDILSDSGNEKVYWDDYRVESFCTTVGLKLAPLLGRGSFAELSQYPNDFKSLVNRYNELVDTVGLEMANKHVFGPQASSETGLAEGYVLKPVYPRFFNVGTRVAIKCKNSKFSEKAKLISPIKAKVELTENDKRLLGIFSEYVTWNRVSNVLSHIGSVTAKDFGRVSGLTMKDIIREAAREGHDILFADNPSAVLKELTGLIQNTIRSKWHEVLE

SEQ ID NO: 2209 - DNA, 1038 bp, synthetic construct
  misc_feature 1..1038: note = variant of RNA ligase 2 from Klebsiella phage KP179
  source 1..1038: mol_type = other DNA
atgcatcaccatcaccatcacggtggcagcaacatgtttgcgtattattcaagtctggaaaaccataccaatgccaagttcattagcaagatccgtggtgcaggcttcctgatgcacaccgtggaatgggtagctcgcgagaagattcatggaacgaactttagcgttatcattactccgaccgaaatcgtgccagccaaacgcacagggccgatcttggaagatgagagcttctttggtcatgaaattatcatgaaaaaatatatggactccttcgtgaaggtgcagaacatgctgaatgcgatggatcttgttagcgtgcaaatctttggcgaatttgcgggtggtggcattcagaaaggcgtcgattacggagacaaagatttctatgtgtttgacatcctgtctgatagcgggaacgagaaagtttactgggatgactatcgcgtcgaatcgttttgcaccactgtgggtctgaaattagcgcctctgctgggacgtggtagtttcgctgaactgtcccagtacccaaacgatttcaaaagcgtggtgaaccgttataatgaattggttgacacggtcggcctggagatggccaataaacacgtctttggtccgcaagcgtcttctgaaactggcctggcagaaggctacgttcttaaacccgtctatccgcgcttctttaatgtgggtacgcgcgtggcgattaaatgcaagaactccaaattttcggagaaagccaaactgatttcgccaattaaagcgaaggttgaactgacggagaacgataaacgtctgctcggaatctttagcgaatatgttacctggaatcgcgtcagtaacgtactgtcacatattggctcagtgaccgccaaagattttgggcgtgtttcgggtctgacgatgaaagacatcattcgcgaagcagcacgcgaaggccatgatctgttgttcgctgataacccgtcggcggtgctgaaggagctgacaggcctcatccagaacacgattcgctccaaatggcacgaagttctggag

SEQ ID NO: 2210 - protein, 346 aa, synthetic construct
  REGION 1..346: note = variant of RNA ligase 2 from Klebsiella phage KP179
MHHHHHHGGSNMFAYYSSLENHTNAKFISKIRGAGFLMHTVEWVAREKIHGTNFSVIITPTEIVPAKRTGPILEDESFFGHEIIMKKYMDSFVKVQNMLNAMDLVSVQIFGEFAGGGIQKGVDYGDKDFYVFDILSDSGNEKVYWDDYRVESFCTTVGLKLAPLLGRGSFAELSQYPNDFKSVVNRYNELVDTVGLEMANKHVFGPQASSETGLAEGYVLKPVYPRFFNVGTRVAIKCKNSKFSEKAKLISPIKAKVELTENDKRLLGIFSEYVTWNRVSNVLSHIGSVTAKDFGRVSGLTMKDIIREAAREGHDLLFADNPSAVLKELTGLIQNTIRSKWHEVLE

SEQ ID NO: 2211 - DNA, 1038 bp, synthetic construct
  misc_feature 1..1038: note = variant of RNA ligase 2 from Klebsiella phage KP179
  source 1..1038: mol_type = other DNA
atgcatcaccatcaccatcacggtggcagcaacatgtttgcgtattattcaagtctggaaaaccataccaatgccaagttcattagcaagatccgtggtgcaggcttcctgatgcacaccgtggaatgggtagctcgcgagaagattcatggaacgaactttagcgttatcattactccgaccgaaatcgtgccagccaaacgcacagggccgatcttggaagatgagagcttctttggtcatgaaattatcatgaaaaaatatatggactccttcgtgaaggtgcagaacatgctgaatgcgatggatcttgttagcgtgcaaatctttggcgaatttgcgggtggtggcattcagaaaggcgtcgattacggagacaaagagttctatgtgtttgacatcctgtctgatagcgggaacgagaaagtttactgggatgactatcgcgtcgaatcgttttgcaccactgtgggtctgaaattagcgcctctgctgggacgtggtagtttcgctgaactgtcccagtacccaaacgatttcaaaagcctggtgaaccgttataatgaattggttgacacggtcggcctggagatggccaataaacacgtctttggtccgcaagcgtcttctgaaactggcctggcagaaggctacgttcttaaacccgtctatccgcgcttctttaatgtgggtacgcgcgtggcgattaaatgcaagaactccaaattttcggagaaagccaaactgatttcgccaattaaagcgaaggttgaactgacggagaacgataaacgtctgctcggaatctttagcgaatatgttacctggaatcgcgtcagtaacgtactgtcacatattggctcagtgaccgccaaagattttgggcgtgtttcgggtctgacgatgaaagacatcattcgcgaagcagcacgcgaaggccatgatctgttgttcgctgataacccgtcggcggtgctgaaggagctgacaggcctcatccagaacacgattcgctccaaatggcacgaagttctggag

SEQ ID NO: 2212 - protein, 346 aa, synthetic construct
  REGION 1..346: note = variant of RNA ligase 2 from Klebsiella phage KP179
MHHHHHHGGSNMFAYYSSLENHTNAKFISKIRGAGFLMHTVEWVAREKIHGTNFSVIITPTEIVPAKRTGPILEDESFFGHEIIMKKYMDSFVKVQNMLNAMDLVSVQIFGEFAGGGIQKGVDYGDKEFYVFDILSDSGNEKVYWDDYRVESFCTTVGLKLAPLLGRGSFAELSQYPNDFKSLVNRYNELVDTVGLEMANKHVFGPQASSETGLAEGYVLKPVYPRFFNVGTRVAIKCKNSKFSEKAKLISPIKAKVELTENDKRLLGIFSEYVTWNRVSNVLSHIGSVTAKDFGRVSGLTMKDIIREAAREGHDLLFADNPSAVLKELTGLIQNTIRSKWHEVLE

SEQ ID NO: 2213 - DNA, 1038 bp, synthetic construct
  misc_feature 1..1038: note = variant of RNA ligase 2 from Klebsiella phage KP179
  source 1..1038: mol_type = other DNA
atgcatcaccatcaccatcacggtggcagcaacatgtttgcgtattattcaagtctggaaaaccataccaatgccaagttcattagcaagatccgtggtgcaggcttcctgatgcacaccgtggaatgggtagctcgcgagaagattcatggaacgaactttagcgttatcattactccgaccgaaatcgtgccagccaaacgcacagggccgatcttggaagatgagagcttctttggtcatgaaattatcatgaaaaaatatatggactccttcgtgaaggtgcagaacatgctgaatgcgatggatcttgttagcgtgcaaatctttggcgaatttgcgggtggtggcattcagaaaggcgtcgattacggagacaaagatttctatgtgtttgacatcctgtctgatagcgggaacgagaaagtttactgggatgactatcgcgtcgaatcgttttgcaccactgtgggtctgaaattagcgcctctgctgggacgtggtagtttcgctgaactgtcccagtacccaaacgatttcaaaagcctggtgaaccgttataatgaattggttgacacggtcggcctggagatggccaataaacacgtctttggtccgcaagcgtcttctgaaactggcctggcagaaggctacgttcttaaacccgtctatccgcgcttctttaatgtgggtacgcgcgtggcgattaaatgcaagaactccaaattttcggagaaagccaaactgatttcgccaattaaagcgaaggttgaactgacggagaacgataaacgtctgctcggaatctttagcgaatatgttacctggaatcgcgtcagtaacgtactgtcacatattggctcagagaccgccaaagattttgggcgtgtttcgggtctgacgatgaaagacatcattcgcgaagcagcacgcgaaggccatgatctgttgttcgctgataacccgtcggcggtgctgaaggagctgacaggcctcatccagaacacgattcgctccaaatggcacgaagttctggag

SEQ ID NO: 2214 - protein, 346 aa, synthetic construct
  REGION 1..346: note = variant of RNA ligase 2 from Klebsiella phage KP179
MHHHHHHGGSNMFAYYSSLENHTNAKFISKIRGAGFLMHTVEWVAREKIHGTNFSVIITPTEIVPAKRTGPILEDESFFGHEIIMKKYMDSFVKVQNMLNAMDLVSVQIFGEFAGGGIQKGVDYGDKDFYVFDILSDSGNEKVYWDDYRVESFCTTVGLKLAPLLGRGSFAELSQYPNDFKSLVNRYNELVDTVGLEMANKHVFGPQASSETGLAEGYVLKPVYPRFFNVGTRVAIKCKNSKFSEKAKLISPIKAKVELTENDKRLLGIFSEYVTWNRVSNVLSHIGSETAKDFGRVSGLTMKDIIREAAREGHDLLFADNPSAVLKELTGLIQNTIRSKWHEVLE

SEQ ID NO: 2215 - DNA, 1038 bp, synthetic construct
  misc_feature 1..1038: note = variant of RNA ligase 2 from Klebsiella phage KP179
  source 1..1038: mol_type = other DNA
atgcatcaccatcaccatcacggtggcagcaacatgtttgcgtattattcaagtctggaaaaccataccaatgccaagttcattagcaagatccgtggtgcaggcttcctgatgcacaccgtggaatgggtagctcgcgagaagattcatggaacgaactttagcgttatcattactccgaccgaaatcgtgccagccaaacgcacagggccgatcttggaagatgagagcttctttggtcatgaaattatcatgaaaaaatatatggacgagttcgtgaaggtgcagaacatgctgaatgcgatggatcttgttagcgtgcaaatctttggcgaatttgcgggtggtggcattcagaaaggcgtcgattacggagacaaagatttctatgtgtttgacatcctgtctgatagcgggaacgagaaagtttactgggatgactatcgcgtcgaatcgttttgcaccactgtgggtctgaaattagcgcctctgctgggacgtggtagtttcgctgaactgtcccagtacccaaacgatttcaaaagcctggtgaaccgttataatgaattggttgacacggtcggcctggagatggccaataaacacgtctttggtccgcaagcgtcttctgaaactggcctggcagaaggctacgttcttaaacccgtctatccgcgcttctttaatgtgggtacgcgcgtggcgattaaatgcaagaactccaaattttcggagaaagccaaactgatttcgccaattaaagcgaaggttgaactgacggagaacgataaacgtctgctcggaatctttagcgaatatgttacctggaatcgcgtcagtaacgtactgtcacatattggctcagtgaccgccaaagattttgggcgtgtttcgggtctgacgatgaaagacatcattcgcgaagcagcacgcgaaggccatgatctgttgttcgctgataacccgtcggcggtgctgaaggagctgacaggcctcatccagaacacgattcgctccaaatggcacgaagttctggag

SEQ ID NO: 2216 - protein, 346 aa, synthetic construct
  REGION 1..346: note = variant of RNA ligase 2 from Klebsiella phage KP179
MHHHHHHGGSNMFAYYSSLENHTNAKFISKIRGAGFLMHTVEWVAREKIHGTNFSVIITPTEIVPAKRTGPILEDESFFGHEIIMKKYMDEFVKVQNMLNAMDLVSVQIFGEFAGGGIQKGVDYGDKDFYVFDILSDSGNEKVYWDDYRVESFCTTVGLKLAPLLGRGSFAELSQYPNDFKSLVNRYNELVDTVGLEMANKHVFGPQASSETGLAEGYVLKPVYPRFFNVGTRVAIKCKNSKFSEKAKLISPIKAKVELTENDKRLLGIFSEYVTWNRVSNVLSHIGSVTAKDFGRVSGLTMKDIIREAAREGHDLLFADNPSAVLKELTGLIQNTIRSKWHEVLE

SEQ ID NO: 2217 - DNA, 1038 bp, synthetic construct
  misc_feature 1..1038: note = variant of RNA ligase 2 from Klebsiella phage KP179
  source 1..1038: mol_type = other DNA
atgcatcaccatcaccatcacggtggcagcaacatgtttgcgtattattcaagtctggaaaaccataccaatgccaagttcattagcaagatccgtggtgcaggcttcctgatgcacaccgtggaatgggtagctcgcgagaagattcatggaacgaactttagcgttatcattactgtgaccgaaatcgtgccagccaaacgcacagggccgatcttggaagatgagagcttctttggtcatgaaattatcatgaaaaaatatatggactccttcgtgaaggtgcagaacatgctgaatgcgatggatcttgttagcgtgcaaatctttggcgaatttgcgggtggtggcattcagaaaggcgtcgattacggagacaaagatttctatgtgtttgacatcctgtctgatagcgggaacgagaaagtttactgggatgactatcgcgtcgaatcgttttgcaccactgtgggtctgaaattagcgcctctgctgggacgtggtagtttcgctgaactgtcccagtacccaaacgatttcaaaagcctggtgaaccgttataatgaattggttgacacggtcggcctggagatggccaataaacacgtctttggtccgcaagcgtcttctgaaactggcctggcagaaggctacgttcttaaacccgtctatccgcgcttctttaatgtgggtacgcgcgtggcgattaaatgcaagaactccaaattttcggagaaagccaaactgatttcgccaattaaagcgaaggttgaactgacggagaacgataaacgtctgctcggaatctttagcgaatatgttacctggaatcgcgtcagtaacgtactgtcacatattggctcagtgaccgccaaagattttgggcgtgtttcgggtctgacgatgaaagacatcattcgcgaagcagcacgcgaaggccatgatctgttgttcgctgataacccgtcggcggtgctgaaggagctgacaggcctcatccagaacacgattcgctccaaatggcacgaagttctggag

SEQ ID NO: 2218 - protein, 346 aa, synthetic construct
  REGION 1..346: note = variant of RNA ligase 2 from Klebsiella phage KP179
MHHHHHHGGSNMFAYYSSLENHTNAKFISKIRGAGFLMHTVEWVAREKIHGTNFSVIITVTEIVPAKRTGPILEDESFFGHEIIMKKYMDSFVKVQNMLNAMDLVSVQIFGEFAGGGIQKGVDYGDKDFYVFDILSDSGNEKVYWDDYRVESFCTTVGLKLAPLLGRGSFAELSQYPNDFKSLVNRYNELVDTVGLEMANKHVFGPQASSETGLAEGYVLKPVYPRFFNVGTRVAIKCKNSKFSEKAKLISPIKAKVELTENDKRLLGIFSEYVTWNRVSNVLSHIGSVTAKDFGRVSGLTMKDIIREAAREGHDLLFADNPSAVLKELTGLIQNTIRSKWHEVLE

SEQ ID NO: 2219 - DNA, 1038 bp, synthetic construct
  misc_feature 1..1038: note = variant of RNA ligase 2 from Klebsiella phage KP179
  source 1..1038: mol_type = other DNA
atgcatcaccatcaccatcacggtggcagcaacatgtttgcgtattattcaagtctggaaaaccataccaatgccaagttcattagcaagatccgtggtgcaggcttcctgatgcacaccgtggaatgggtagctcgcgagaagattcatggaacgaactttagcgttatcattactccgaccgaaatcgtgccagccaaacgcacagggccgatcttggaagatgagagcttctttggtcatgaaattatcatgaaaaaatatatggactccttcgtgaaggtgcagaacatgctgaatgcgatggatcttgttagcgtgcaaatctttggcgaatttgcgggtggtggcattcagaaaggcgtcgattacggagacaaagatttctatgtgtttgacatcctgtctgatagcgggaacgagaaagtttactgggatgactatcgcgtcgaatcgttttgcaccactgtgggtctgaaattagcgcctctgctgggacgtggtagtttcgctgaactgtcccagtacccaaacgatttcaaaagcctggtgaaccgttataatgaattggttgacacggtcggcctggagatggccaataaacacgtctttggtccgcaagcgtcttctgaaactggcctggcagaaggctacgttcttaaacccgtctatccgcgcttctttaatgtgggtacgcgcgtggcgattaaatgcaagaactccaaattttcggagaaagccaaactgatttcgccaattaaagcgaaggttgaactgacggagaacgataaacgtctgctcggaatctttagcgaatatgttacctggaatcgcgtcagtaacgtactgtcacatattggctcagtgaccgccaaagattttgggcgtgtttcgggtctgacgatgaaagacatcattcgcgaagcaatgcgcgaaggccatgatctgttgttcgctgataacccgtcggcggtgctgaaggagctgacaggcctcatccagaacacgattcgctccaaatggcacgaagttctggag

SEQ ID NO: 2220 - protein, 346 aa, synthetic construct
  REGION 1..346: note = variant of RNA ligase 2 from Klebsiella phage KP179
MHHHHHHGGSNMFAYYSSLENHTNAKFISKIRGAGFLMHTVEWVAREKIHGTNFSVIITPTEIVPAKRTGPILEDESFFGHEIIMKKYMDSFVKVQNMLNAMDLVSVQIFGEFAGGGIQKGVDYGDKDFYVFDILSDSGNEKVYWDDYRVESFCTTVGLKLAPLLGRGSFAELSQYPNDFKSLVNRYNELVDTVGLEMANKHVFGPQASSETGLAEGYVLKPVYPRFFNVGTRVAIKCKNSKFSEKAKLISPIKAKVELTENDKRLLGIFSEYVTWNRVSNVLSHIGSVTAKDFGRVSGLTMKDIIREAMREGHDLLFADNPSAVLKELTGLIQNTIRSKWHEVLE

SEQ ID NO: 2221 - DNA, 1038 bp, synthetic construct
  misc_feature 1..1038: note = variant of RNA ligase 2 from Klebsiella phage KP179
  source 1..1038: mol_type = other DNA
atgcatcaccatcaccatcacggtggcagcaacatgtttgcgtattattcaagtctggaaaaccataccaatgccaagttcattagcaagatccgtggtgcaggcttcctgatgcacaccgtggaatgggtagctcgcgagaagattcatggaacgaactttagcgttatcattactccgaccgaaatcgtgccagccaaacgcacagggccgatcttggaagatgagagcttctttggtcatgaaattatcatgaaaaaatatatggactccttcgtgaaggtgcagaacatgctgaatgcgatggatcttgttagcgtgcaaatctttggcgaatttgcgggtggtggcattcagaaaggcgtcgattacggagacaaagatttctatacttttgacatcctgtctgatagcgggaacgagaaagtttactgggatgactatcgcgtcgaatcgttttgcaccactgtgggtctgaaattagcgcctctgctgggacgtggtagtttcgctgaactgtcccagtacccaaacgatttcaaaagcctggtgaaccgttataatgaattggttgacacggtcggcctggagatggccaataaacacgtctttggtccgcaagcgtcttctgaaactggcctggcagaaggctacgttcttaaacccgtctatccgcgcttctttaatgtgggtacgcgcgtggcgattaaatgcaagaactccaaattttcggagaaagccaaactgatttcgccaattaaagcgaaggttgaactgacggagaacgataaacgtctgctcggaatctttagcgaatatgttacctggaatcgcgtcagtaacgtactgtcacatattggctcagtgaccgccaaagattttgggcgtgtttcgggtctgacgatgaaagacatcattcgcgaagcagcacgcgaaggccatgatctgttgttcgctgataacccgtcggcggtgctgaaggagctgacaggcctcatccagaacacgattcgctccaaatggcacgaagttctggag

SEQ ID NO: 2222 - protein, 346 aa, synthetic construct
  REGION 1..346: note = variant of RNA ligase 2 from Klebsiella phage KP179
MHHHHHHGGSNMFAYYSSLENHTNAKFISKIRGAGFLMHTVEWVAREKIHGTNFSVIITPTEIVPAKRTGPILEDESFFGHEIIMKKYMDSFVKVQNMLNAMDLVSVQIFGEFAGGGIQKGVDYGDKDFYTFDILSDSGNEKVYWDDYRVESFCTTVGLKLAPLLGRGSFAELSQYPNDFKSLVNRYNELVDTVGLEMANKHVFGPQASSETGLAEGYVLKPVYPRFFNVGTRVAIKCKNSKFSEKAKLISPIKAKVELTENDKRLLGIFSEYVTWNRVSNVLSHIGSVTAKDFGRVSGLTMKDIIREAAREGHDLLFADNPSAVLKELTGLIQNTIRSKWHEVLE

SEQ ID NO: 2223 - DNA, 1038 bp, synthetic construct
  misc_feature 1..1038: note = variant of RNA ligase 2 from Klebsiella phage KP179
  source 1..1038: mol_type = other DNA
atgcatcaccatcaccatcacggtggcagcaacatgtttgcgtattattcaagtctggaaaaccataccaatgccaagttcattagcaagatccgtggtgcaggcttcctgatgcacaccgtggaatgggtagctcgcgagaagattcatggaacgaactttagcgttatcattactccgaccgaaatcgtgccagccaaacgcacagggccgatcttggaagatgagagcttctttggtcatgaaattatcatgaaaaaatatatggactccttcgtgaaggtgcagaacatgctgaatgcgatggatcttgttagcgtgcaaatctttggcgaatttgcgggtggtggcattcagaaaggcgtcgattacggagacaaagatttctatgtgtttgacatcctgtctgatagcgggaacgagaaattttactgggatgactatcgcgtcgaatcgttttgcaccactgtgggtctgaaattagcgcctctgctgggacgtggtagtttcgctgaactgtcccagtacccaaacgatttcaaaagcctggtgaaccgttataatgaattggttgacacggtcggcctggagatggccaataaacacgtctttggtccgcaagcgtcttctgaaactggcctggcagaaggctacgttcttaaacccgtctatccgcgcttctttaatgtgggtacgcgcgtggcgattaaatgcaagaactccaaattttcggagaaagccaaactgatttcgccaattaaagcgaaggttgaactgacggagaacgataaacgtctgctcggaatctttagcgaatatgttacctggaatcgcgtcagtaacgtactgtcacatattggctcagtgaccgccaaagattttgggcgtgtttcgggtctgacgatgaaagacatcattcgcgaagcagcacgcgaaggccatgatctgttgttcgctgataacccgtcggcggtgctgaaggagctgacaggcctcatccagaacacgattcgctccaaatggcacgaagttctggag

SEQ ID NO: 2224 - protein, 346 aa, synthetic construct
  REGION 1..346: note = variant of RNA ligase 2 from Klebsiella phage KP179
MHHHHHHGGSNMFAYYSSLENHTNAKFISKIRGAGFLMHTVEWVAREKIHGTNFSVIITPTEIVPAKRTGPILEDESFFGHEIIMKKYMDSFVKVQNMLNAMDLVSVQIFGEFAGGGIQKGVDYGDKDFYVFDILSDSGNEKFYWDDYRVESFCTTVGLKLAPLLGRGSFAELSQYPNDFKSLVNRYNELVDTVGLEMANKHVFGPQASSETGLAEGYVLKPVYPRFFNVGTRVAIKCKNSKFSEKAKLISPIKAKVELTENDKRLLGIFSEYVTWNRVSNVLSHIGSVTAKDFGRVSGLTMKDIIREAAREGHDLLFADNPSAVLKELTGLIQNTIRSKWHEVLE

SEQ ID NO: 2225 - DNA, 1038 bp, synthetic construct
  misc_feature 1..1038: note = variant of RNA ligase 2 from Klebsiella phage KP179
  source 1..1038: mol_type = other DNA
atgcatcaccatcaccatcacggtggcagcaacatgtttgcgtattattcaagtctggaaaaccataccaatgccaagttcattagcaagatccgtggtgcaggcttcctgatgcacaccgtggaatgggtagctcgcgagaagattcatggaacgaactttagcgttatcattactccgaccgaaatcgtgccagccaaacgcacagggccgatcttggaagatgagagcttctttggtcatgaaattatcatgaaaaaatatatggactccttcgtgaaggtgcagaacatgctgaatgcgatggatcttgttagcgtgcaaatctttggcgaatttgcgggtggtggcattcagaaaggcgtcgattacggagacaaagatttctatgtgtttgacatcctgtctgatagcgggaacgagaaagtttactgggatgactatcgcgtcgaatcgttttgcaccactgtgggtctgaaattagcgcctctgctgggacgtggtagtttcgctgaactgtcccagtacccaaacgatttcaaaagcctggtgaaccgttataatgaattggttgacacggtcggcctggagatggccaataaacacgtctttggtccgcaagcgtcttctgaaactggcctggcagaaggctacgttcttaaacccgtctatccgcgcttctttaatgtgggtacgcgcgtggcgattaaatgcaagaactccaaattttcggagaaagccaaactgatttcgccaattaaagcgaaggttgaactgacggagaacgataaacgtctgctcggaatctttagcgaatatgttacctggaatcgcgtcagtaacgtactgtcacatattggctcagtgaccgccaaagattttgggcgtgtttcgggtctggtgatgaaagacatcattcgcgaagcagcacgcgaaggccatgatctgttgttcgctgataacccgtcggcggtgctgaaggagctgacaggcctcatccagaacacgattcgctccaaatggcacgaagttctggag

SEQ ID NO: 2226 - protein, 346 aa, synthetic construct
  REGION 1..346: note = variant of RNA ligase 2 from Klebsiella phage KP179
MHHHHHHGGSNMFAYYSSLENHTNAKFISKIRGAGFLMHTVEWVAREKIHGTNFSVIITPTEIVPAKRTGPILEDESFFGHEIIMKKYMDSFVKVQNMLNAMDLVSVQIFGEFAGGGIQKGVDYGDKDFYVFDILSDSGNEKVYWDDYRVESFCTTVGLKLAPLLGRGSFAELSQYPNDFKSLVNRYNELVDTVGLEMANKHVFGPQASSETGLAEGYVLKPVYPRFFNVGTRVAIKCKNSKFSEKAKLISPIKAKVELTENDKRLLGIFSEYVTWNRVSNVLSHIGSVTAKDFGRVSGLVMKDIIREAAREGHDLLFADNPSAVLKELTGLIQNTIRSKWHEVLE

SEQ ID NO: 2227 - DNA, 1038 bp, synthetic construct
  misc_feature 1..1038: note = variant of RNA ligase 2 from Klebsiella phage KP179
  source 1..1038: mol_type = other DNA
atgcatcaccatcaccatcacggtggcagcaacatgtttgcgtattattcaagtctggaaaaccataccaatgccaagttcattagcaagatccgtggtgcaggcttcctgatgcacaccgtggaatgggtagctcgcgagaagattcatggaacgaactttagcgttatcattactccgaccgaaatcgtgccagccaaacgcacagggccgatcttggaagatgagagcttctttggtcatgaaattatcatgaaaaaatatatggactccttcgtgaaggtgcagaacatgctgaatgcgatggatcttgttagcgtgcaaatctttggcgaatttgcgggtggtggcattcagaaaggcgtcgattacggagacaaagatttctatgtgtttgacatcctgtctgatagcgggaacgagaaagtttactgggatgactatcgcgtcgaatcgttttgcaccactgtgggtctgaaattagcgcctctgctgggacgtggtagtttcgctgaactgtcccagtacccaaacgatttcaaaagcctggtgaaccgttataatgaattggttgacacggtcggcctggagatggccaataaacacgtctttggtccgcaacattcttctgaaactggcctggcagaaggctacgttcttaaacccgtctatccgcgcttctttaatgtgggtacgcgcgtggcgattaaatgcaagaactccaaattttcggagaaagccaaactgatttcgccaattaaagcgaaggttgaactgacggagaacgataaacgtctgctcggaatctttagcgaatatgttacctggaatcgcgtcagtaacgtactgtcacatattggctcagtgaccgccaaagattttgggcgtgtttcgggtctgacgatgaaagacatcattcgcgaagcagcacgcgaaggccatgatctgttgttcgctgataacccgtcggcggtgctgaaggagctgacaggcctcatccagaacacgattcgctccaaatggcacgaagttctggag

SEQ ID NO: 2228 - protein, 346 aa, synthetic construct
  REGION 1..346: note = variant of RNA ligase 2 from Klebsiella phage KP179
MHHHHHHGGSNMFAYYSSLENHTNAKFISKIRGAGFLMHTVEWVAREKIHGTNFSVIITPTEIVPAKRTGPILEDESFFGHEIIMKKYMDSFVKVQNMLNAMDLVSVQIFGEFAGGGIQKGVDYGDKDFYVFDILSDSGNEKVYWDDYRVESFCTTVGLKLAPLLGRGSFAELSQYPNDFKSLVNRYNELVDTVGLEMANKHVFGPQHSSETGLAEGYVLKPVYPRFFNVGTRVAIKCKNSKFSEKAKLISPIKAKVELTENDKRLLGIFSEYVTWNRVSNVLSHIGSVTAKDFGRVSGLTMKDIIREAAREGHDLLFADNPSAVLKELTGLIQNTIRSKWHEVLE

SEQ ID NO: 2229 - DNA, 1038 bp, synthetic construct
  misc_feature 1..1038: note = variant of RNA ligase 2 from Klebsiella phage KP179
  source 1..1038: mol_type = other DNA
atgcatcaccatcaccatcacggtggcagcaacatgtttgcgtattattcaagtctggaaaaccataccaatgccaagttcattagcaagatccgtggtgcaggcttcctgatgcacaccgtggaatgggtagctcgcgagaagattcatggaacgaactttagcgttatcattactccgaccgaaatcgtgccagccaaacgcacagggccgatcttggaagatgagagcttctttggtcatgaaattatcatgaaaaaatatatggactccttcgtgaaggtgcagaacatgctgaatgcgatggatcttgttagcgtgcaaatctttggcgaatttgcgggtggtggcattcagaaaggcgtcgattacggagacaaagatttctatgtgtttgacatcctgtctgatagcgggaacgagaaagtttactgggatgactatcgcgtcgaatcgttttgcaccactgtgggtctgaaattagcgcctctgctgggacgtggtagtttcgctgaactgtcccagtacccaaacgatttcaaaagcctggtgaaccgttataatgaattggttgacacggtcggcctggagatggccaataaacacgtctttggtccgcaagcgtcttctgaaactggcctggcagaaggctacgttcttaaacccgtctatccgcgcttctttaatgtgggtacgcgcgtggcgattaaatgcaagaactccaaattttcggagaaagccaaactgatttcgccaattaaagcgaaggttgaactgacggagaacgataaacgtctgctcggaatctttagcgaatatgttacctggaatcgcgtcagtaacgtactgtcacatattggctcagtgaccgccaaagattttgggcgtgtttcgggtctgacgtctaaagacatcattcgcgaagcagcacgcgaaggccatgatctgttgttcgctgataacccgtcggcggtgctgaaggagctgacaggcctcatccagaacacgattcgctccaaatggcacgaagttctggag

SEQ ID NO: 2230 - protein, 346 aa, synthetic construct
  REGION 1..346: note = variant of RNA ligase 2 from Klebsiella phage KP179
MHHHHHHGGSNMFAYYSSLENHTNAKFISKIRGAGFLMHTVEWVAREKIHGTNFSVIITPTEIVPAKRTGPILEDESFFGHEIIMKKYMDSFVKVQNMLNAMDLVSVQIFGEFAGGGIQKGVDYGDKDFYVFDILSDSGNEKVYWDDYRVESFCTTVGLKLAPLLGRGSFAELSQYPNDFKSLVNRYNELVDTVGLEMANKHVFGPQASSETGLAEGYVLKPVYPRFFNVGTRVAIKCKNSKFSEKAKLISPIKAKVELTENDKRLLGIFSEYVTWNRVSNVLSHIGSVTAKDFGRVSGLTSKDIIREAAREGHDLLFADNPSAVLKELTGLIQNTIRSKWHEVLE

SEQ ID NO: 2231 - DNA, 1038 bp, synthetic construct
  misc_feature 1..1038: note = variant of RNA ligase 2 from Klebsiella phage KP179
  source 1..1038: mol_type = other DNA
atgcatcaccatcaccatcacggtggcagcaacatgtttgcgtattattcaagtctggaaaaccataccaatgccaagttcattagcaagatccgtggtgcaggcttcctgatgcacaccgtggaatgggtagctcgcgagaagattcatggaacgaactttagcgttatcattactcggaccgaaatcgtgccagccaaacgcacagggccgatcttggaagatgagagcttctttggtcatgaaattatcatgaaaaaatatatggactccttcgtgaaggtgcagaacatgctgaatgcgatggatcttgttagcgtgcaaatctttggcgaatttgcgggtggtggcattcagaaaggcgtcgattacggagacaaagatttctatgtgtttgacatcctgtctgatagcgggaacgagaaagtttactgggatgactatcgcgtcgaatcgttttgcaccactgtgggtctgaaattagcgcctctgctgggacgtggtagtttcgctgaactgtcccagtacccaaacgatttcaaaagcctggtgaaccgttataatgaattggttgacacggtcggcctggagatggccaataaacacgtctttggtccgcaagcgtcttctgaaactggcctggcagaaggctacgttcttaaacccgtctatccgcgcttctttaatgtgggtacgcgcgtggcgattaaatgcaagaactccaaattttcggagaaagccaaactgatttcgccaattaaagcgaaggttgaactgacggagaacgataaacgtctgctcggaatctttagcgaatatgttacctggaatcgcgtcagtaacgtactgtcacatattggctcagtgaccgccaaagattttgggcgtgtttcgggtctgacgatgaaagacatcattcgcgaagcagcacgcgaaggccatgatctgttgttcgctgataacccgtcggcggtgctgaaggagctgacaggcctcatccagaacacgattcgctccaaatggcacgaagttctggag

SEQ ID NO: 2232 - protein, 346 aa, synthetic construct
  REGION 1..346: note = variant of RNA ligase 2 from Klebsiella phage KP179
MHHHHHHGGSNMFAYYSSLENHTNAKFISKIRGAGFLMHTVEWVAREKIHGTNFSVIITRTEIVPAKRTGPILEDESFFGHEIIMKKYMDSFVKVQNMLNAMDLVSVQIFGEFAGGGIQKGVDYGDKDFYVFDILSDSGNEKVYWDDYRVESFCTTVGLKLAPLLGRGSFAELSQYPNDFKSLVNRYNELVDTVGLEMANKHVFGPQASSETGLAEGYVLKPVYPRFFNVGTRVAIKCKNSKFSEKAKLISPIKAKVELTENDKRLLGIFSEYVTWNRVSNVLSHIGSVTAKDFGRVSGLTMKDIIREAAREGHDLLFADNPSAVLKELTGLIQNTIRSKWHEVLE

SEQ ID NO: 2233 - DNA, 1038 bp, synthetic construct
  misc_feature 1..1038: note = variant of RNA ligase 2 from Klebsiella phage KP179
  source 1..1038: mol_type = other DNA
atgcatcaccatcaccatcacggtggcagcaacatgtttgcgtattattcaagtctggaaaaccataccaatgccaagttcattagcaagatccgtggtgcaggcttcctgatgcacaccgtggaatgggtagctcgcgagaagattcatggaacgaactttagcgttatcattactccgaccgaaatcgtgccagccaaacgcacagggccgatcttggaagatgagagcttctttggtcatgaaattatcatgaaaaaatatatggactccttcgtgaaggtgcagaacatgctgaatgcgatggatcttgttagcgtgcaaatctttggcgaatttgcgggtggtggcattcagaaaggcgtcgattacggagacaaagatttctatgtgtttgacatcctgtctgatagcgggaacgagaaagagtactgggatgactatcgcgtcgaatcgttttgcaccactgtgggtctgaaattagcgcctctgctgggacgtggtagtttcgctgaactgtcccagtacccaaacgatttcaaaagcctggtgaaccgttataatgaattggttgacacggtcggcctggagatggccaataaacacgtctttggtccgcaagcgtcttctgaaactggcctggcagaaggctacgttcttaaacccgtctatccgcgcttctttaatgtgggtacgcgcgtggcgattaaatgcaagaactccaaattttcggagaaagccaaactgatttcgccaattaaagcgaaggttgaactgacggagaacgataaacgtctgctcggaatctttagcgaatatgttacctggaatcgcgtcagtaacgtactgtcacatattggctcagtgaccgccaaagattttgggcgtgtttcgggtctgacgatgaaagacatcattcgcgaagcagcacgcgaaggccatgatctgttgttcgctgataacccgtcggcggtgctgaaggagctgacaggcctcatccagaacacgattcgctccaaatggcacgaagttctggag

SEQ ID NO: 2234 - protein, 346 aa, synthetic construct
  REGION 1..346: note = variant of RNA ligase 2 from Klebsiella phage KP179
MHHHHHHGGSNMFAYYSSLENHTNAKFISKIRGAGFLMHTVEWVAREKIHGTNFSVIITPTEIVPAKRTGPILEDESFFGHEIIMKKYMDSFVKVQNMLNAMDLVSVQIFGEFAGGGIQKGVDYGDKDFYVFDILSDSGNEKEYWDDYRVESFCTTVGLKLAPLLGRGSFAELSQYPNDFKSLVNRYNELVDTVGLEMANKHVFGPQASSETGLAEGYVLKPVYPRFFNVGTRVAIKCKNSKFSEKAKLISPIKAKVELTENDKRLLGIFSEYVTWNRVSNVLSHIGSVTAKDFGRVSGLTMKDIIREAAREGHDLLFADNPSAVLKELTGLIQNTIRSKWHEVLE

SEQ ID NO: 2235 - DNA, 1038 bp, synthetic construct
  misc_feature 1..1038: note = variant of RNA ligase 2 from Klebsiella phage KP179
  source 1..1038: mol_type = other DNA
atgcatcaccatcaccatcacggtggcagcaacatgtttgcgtattattcaagtctggaaaaccataccaatgccaagttcattagcaagatccgtggtgcaggcttcctgatgcacaccgtggaatgggtagctcgcgagaagattcatggaacgaactttagcgttatcattactccgaccgaaatcgtgccagccaaacgcacagggccgatcttggaagatgagagcttctttggtcatgaaattatcatgaaaaaatatatggactccttcgtgaaggtgcagaacatgctgaatgcgatggatcttgttagcgtgcaaatctttggcgaatttgcgggtggtggcattcagaaaggccaggattacggagacaaagatttctatgtgtttgacatcctgtctgatagcgggaacgagaaagtttactgggatgactatcgcgtcgaatcgttttgcaccactgtgggtctgaaattagcgcctctgctgggacgtggtagtttcgctgaactgtcccagtacccaaacgatttcaaaagcctggtgaaccgttataatgaattggttgacacggtcggcctggagatggccaataaacacgtctttggtccgcaagcgtcttctgaaactggcctggcagaaggctacgttcttaaacccgtctatccgcgcttctttaatgtgggtacgcgcgtggcgattaaatgcaagaactccaaattttcggagaaagccaaactgatttcgccaattaaagcgaaggttgaactgacggagaacgataaacgtctgctcggaatctttagcgaatatgttacctggaatcgcgtcagtaacgtactgtcacatattggctcagtgaccgccaaagattttgggcgtgtttcgggtctgacgatgaaagacatcattcgcgaagcagcacgcgaaggccatgatctgttgttcgctgataacccgtcggcggtgctgaaggagctgacaggcctcatccagaacacgattcgctccaaatggcacgaagttctggag

SEQ ID NO: 2236 - protein, 346 aa, synthetic construct
  REGION 1..346: note = variant of RNA ligase 2 from Klebsiella phage KP179
MHHHHHHGGSNMFAYYSSLENHTNAKFISKIRGAGFLMHTVEWVAREKIHGTNFSVIITPTEIVPAKRTGPILEDESFFGHEIIMKKYMDSFVKVQNMLNAMDLVSVQIFGEFAGGGIQKGQDYGDKDFYVFDILSDSGNEKVYWDDYRVESFCTTVGLKLAPLLGRGSFAELSQYPNDFKSLVNRYNELVDTVGLEMANKHVFGPQASSETGLAEGYVLKPVYPRFFNVGTRVAIKCKNSKFSEKAKLISPIKAKVELTENDKRLLGIFSEYVTWNRVSNVLSHIGSVTAKDFGRVSGLTMKDIIREAAREGHDLLFADNPSAVLKELTGLIQNTIRSKWHEVLE

SEQ ID NO: 2237 - DNA, 1038 bp, synthetic construct
  misc_feature 1..1038: note = variant of RNA ligase 2 from Klebsiella phage KP179
  source 1..1038: mol_type = other DNA
atgcatcaccatcaccatcacggtggcagcaacatgtttgcgtattattcaagtctggaaaaccataccaatgccaagttcattagcaagatccgtggtgcaggcttcctgatgcacaccgtggaatgggtagctcgcgagaagattcatggaacgaactttagcgttatcattactccgaccgaaatcgtgccagccaaacgcacagggccgatcttggaagatgagagcttctttggtcatgaaattatcatgaaaaaatatatggactccttcgtgaaggtgcagaacatgctgaatgcgatggatcttgttagcgtgcaaatctttggcgaatttgcgggtggtggcattcagaaaggcgtcgattacggagacaaagatttctatgtgtttgacatcctgtctgatagcgggaacgagaaagtttactgggatgactatcgcgtcgaatcgttttgcaccactgtgggtctgaaattagcgcctctgctgggacgtggtagtttcgctgaactgtcccagtacccaaacgatttcaaaagcctggtgaaccgttataatgaattggttgacacggtcggcctggagatggccaataaacacgtctttggtccgcaagcgtcttctgaaactggcctggcagaaggctacgttcttaaacccgtctatccgcgcttctttaatgtgggtacgcgcgtggcgattaaatgcaagaactccaaattttcggagaaagccaaactgatttcgccaattaaagcgaaggttgaactgacggagaacgataaacgtctgatgggaatctttagcgaatatgttacctggaatcgcgtcagtaacgtactgtcacatattggctcagtgaccgccaaagattttgggcgtgtttcgggtctgacgatgaaagacatcattcgcgaagcagcacgcgaaggccatgatctgttgttcgctgataacccgtcggcggtgctgaaggagctgacaggcctcatccagaacacgattcgctccaaatggcacgaagttctggag

SEQ ID NO: 2238 - protein, 346 aa, synthetic construct
  REGION 1..346: note = variant of RNA ligase 2 from Klebsiella phage KP179
MHHHHHHGGSNMFAYYSSLENHTNAKFISKIRGAGFLMHTVEWVAREKIHGTNFSVIITPTEIVPAKRTGPILEDESFFGHEIIMKKYMDSFVKVQNMLNAMDLVSVQIFGEFAGGGIQKGVDYGDKDFYVFDILSDSGNEKVYWDDYRVESFCTTVGLKLAPLLGRGSFAELSQYPNDFKSLVNRYNELVDTVGLEMANKHVFGPQASSETGLAEGYVLKPVYPRFFNVGTRVAIKCKNSKFSEKAKLISPIKAKVELTENDKRLMGIFSEYVTWNRVSNVLSHIGSVTAKDFGRVSGLTMKDIIREAAREGHDLLFADNPSAVLKELTGLIQNTIRSKWHEVLE

SEQ ID NO: 2239 - DNA, 1038 bp, synthetic construct
  misc_feature 1..1038: note = variant of RNA ligase 2 from Klebsiella phage KP179
  source 1..1038: mol_type = other DNA
atgcatcaccatcaccatcacggtggcagcaacatgtttgcgtattattcaagtctggaaaaccataccaatgccaagttcattagcaagatccgtggtgcaggcttcctgatgcacaccgtggaatgggtagctcgcgagaagattcatggaacgaactttagcgttatcattactccgaccgaaatcgtgccagccaaacgcacagggccgatcttggaagatgagagcttctttggtcatgaaattatcatgaaaaaatatatggactccttcgtgaaggtgcagaacatgctgaatgcgatggatcttgttagcgtgcaaatctttggcgaatttgcgggtggtggcattcagaaaggcgtcgattacggagacaaagatttctatgtgtttgacatcctgtctgatagcgggaacgagaaagtttactgggatgactatcgcgtcgaatcgttttgcaccactttgggtctgaaattagcgcctctgctgggacgtggtagtttcgctgaactgtcccagtacccaaacgatttcaaaagcctggtgaaccgttataatgaattggttgacacggtcggcctggagatggccaataaacacgtctttggtccgcaagcgtcttctgaaactggcctggcagaaggctacgttcttaaacccgtctatccgcgcttctttaatgtgggtacgcgcgtggcgattaaatgcaagaactccaaattttcggagaaagccaaactgatttcgccaattaaagcgaaggttgaactgacggagaacgataaacgtctgctcggaatctttagcgaatatgttacctggaatcgcgtcagtaacgtactgtcacatattggctcagtgaccgccaaagattttgggcgtgtttcgggtctgacgatgaaagacatcattcgcgaagcagcacgcgaaggccatgatctgttgttcgctgataacccgtcggcggtgctgaaggagctgacaggcctcatccagaacacgattcgctccaaatggcacgaagttctggag

SEQ ID NO: 2240 - protein, 346 aa, synthetic construct
  REGION 1..346: note = variant of RNA ligase 2 from Klebsiella phage KP179
MHHHHHHGGSNMFAYYSSLENHTNAKFISKIRGAGFLMHTVEWVAREKIHGTNFSVIITPTEIVPAKRTGPILEDESFFGHEIIMKKYMDSFVKVQNMLNAMDLVSVQIFGEFAGGGIQKGVDYGDKDFYVFDILSDSGNEKVYWDDYRVESFCTTLGLKLAPLLGRGSFAELSQYPNDFKSLVNRYNELVDTVGLEMANKHVFGPQASSETGLAEGYVLKPVYPRFFNVGTRVAIKCKNSKFSEKAKLISPIKAKVELTENDKRLLGIFSEYVTWNRVSNVLSHIGSVTAKDFGRVSGLTMKDIIREAAREGHDLLFADNPSAVLKELTGLIQNTIRSKWHEVLE

SEQ ID NO: 2241 - DNA, 1038 bp, synthetic construct
  misc_feature 1..1038: note = variant of RNA ligase 2 from Klebsiella phage KP179
  source 1..1038: mol_type = other DNA
atgcatcaccatcaccatcacggtggcagcaacatgtttgcgtattattcaagtctggaaaaccataccaatgccaagttcattagcaagatccgtggtgcaggcttcctgatgcacaccgtggaatgggtagctcgcgagaagattcatggaacgaactttagcgttatcattactccgaccgaaatcgtgccagccaaacgcacagggccgatcttggaagatgagagcttctttggtcatgaaattatcatgaaaaaatatatggactccttcgtgaaggtgcagaacatgctgaatgcgatggatcttgttagcgtgcaaatctttggcgaatttgcgggtggtggcattcagaaaggcgtcgattacggagacaaagatttctatgtgtttgacatcctgtctgatagcgggaacgagaaagtttactgggatgactatcgcgtcgaatcgttttgcaccactgtgggtctgaaattagcgcctctgctgggacgtggtagtttcgctgaactgtcccagtacccaaacgatttcaaaagcctggtgaaccgttataatgaattggttgacacggtcggcctggagatggccaataaacacgtctttggtccgcaagcgtcttctgaaactggcctggcagaaggctacgttcttaaacccgtctatccgcgcttctttaatgtgggtacgcgcgtggcgattaaatgcaagaactccaaattttcggagaaagccaaactgatttcgccaattaaagcgaaggttgaactgacggagaacgataaacgtctgctcggaatctttagcgaatatgttacctggaatcgcgtcagtaacgtactgtcacatattggctgggtgaccgccaaagattttgggcgtgtttcgggtctgacgatgaaagacatcattcgcgaagcagcacgcgaaggccatgatctgttgttcgctgataacccgtcggcggtgctgaaggagctgacaggcctcatccagaacacgattcgctccaaatggcacgaagttctggag

SEQ ID NO: 2242 - protein, 346 aa, synthetic construct
  REGION 1..346: note = variant of RNA ligase 2 from Klebsiella phage KP179
MHHHHHHGGSNMFAYYSSLENHTNAKFISKIRGAGFLMHTVEWVAREKIHGTNFSVIITPTEIVPAKRTGPILEDESFFGHEIIMKKYMDSFVKVQNMLNAMDLVSVQIFGEFAGGGIQKGVDYGDKDFYVFDILSDSGNEKVYWDDYRVESFCTTVGLKLAPLLGRGSFAELSQYPNDFKSLVNRYNELVDTVGLEMANKHVFGPQASSETGLAEGYVLKPVYPRFFNVGTRVAIKCKNSKFSEKAKLISPIKAKVELTENDKRLLGIFSEYVTWNRVSNVLSHIGWVTAKDFGRVSGLTMKDIIREAAREGHDLLFADNPSAVLKELTGLIQNTIRSKWHEVLE

SEQ ID NO: 2243 - DNA, 1038 bp, synthetic construct
  misc_feature 1..1038: note = variant of RNA ligase 2 from Klebsiella phage KP179
  source 1..1038: mol_type = other DNA
atgcatcaccatcaccatcacggtggcagcaacatgtttgcgtattattcaagtctggaaaaccataccaatgccaagttcattagcaagatccgtggtgcaggcttcctgatgcacaccgtggaatgggtagctcgcgagaagattcatggaacgaactttagcgttatcattactccgaccgaaatcgtgccagccaaacgcacagggccgatcttggaagatgagagcttctttggtcatgaaattatcatgaaaaaatatatggactccttcgtgaaggtgcagaacatgctgaatgcgatggatcttgttagcgtgcaaatctttggcgaatttgcgggtggtggcattcagaaaggcgtcgattacggagacaaagatttctatgtgtttgacatcctgtctgatagcgggaacgagaaagtttactgggatgactatcgcgtcgaatcgttttgcaccactgtgggtctgaaattagcgcctctgctgggacgtggtagtttcgctgaactgtcccagtacccaaacgatttcaaaagcctggtgaagcgttataatgaattggttgacacggtcggcctggagatggccaataaacacgtctttggtccgcaagcgtcttctgaaactggcctggcagaaggctacgttcttaaacccgtctatccgcgcttctttaatgtgggtacgcgcgtggcgattaaatgcaagaactccaaattttcggagaaagccaaactgatttcgccaattaaagcgaaggttgaactgacggagaacgataaacgtctgctcggaatctttagcgaatatgttacctggaatcgcgtcagtaacgtactgtcacatattggctcagtgaccgccaaagattttgggcgtgtttcgggtctgacgatgaaagacatcattcgcgaagcagcacgcgaaggccatgatctgttgttcgctgataacccgtcggcggtgctgaaggagctgacaggcctcatccagaacacgattcgctccaaatggcacgaagttctggag

SEQ ID NO: 2244 - protein, 346 aa, synthetic construct
  REGION 1..346: note = variant of RNA ligase 2 from Klebsiella phage KP179
MHHHHHHGGSNMFAYYSSLENHTNAKFISKIRGAGFLMHTVEWVAREKIHGTNFSVIITPTEIVPAKRTGPILEDESFFGHEIIMKKYMDSFVKVQNMLNAMDLVSVQIFGEFAGGGIQKGVDYGDKDFYVFDILSDSGNEKVYWDDYRVESFCTTVGLKLAPLLGRGSFAELSQYPNDFKSLVKRYNELVDTVGLEMANKHVFGPQASSETGLAEGYVLKPVYPRFFNVGTRVAIKCKNSKFSEKAKLISPIKAKVELTENDKRLLGIFSEYVTWNRVSNVLSHIGSVTAKDFGRVSGLTMKDIIREAAREGHDLLFADNPSAVLKELTGLIQNTIRSKWHEVLE

SEQ ID NO: 2245 - DNA, 1038 bp, synthetic construct
  misc_feature 1..1038: note = variant of RNA ligase 2 from Klebsiella phage KP179
  source 1..1038: mol_type = other DNA
atgcatcaccatcaccatcacggtggcagcaacatgtttgcgtattattcaagtctggaaaaccataccaatgccaagttcattagcaagatccgtggtgcaggcttcctgatgcacaccgtggaatgggtagctcgcgagaagattcatggaacgaactttagcgttatcattactccgaccgaaatcgtgccagccaaacgcacagggccgatcttggaagatgagagcttctttggtcatgaaattatcatgaaaaaatatatggactccttcgtgaaggtgcagaacatgctgaatgcgatggatcttgttagcgtgcaaatctttggcgaatttgcgggtggtggcattcagaaaggcgtcgattacggagacaaagatttctatgtgtttgacatcctgtctgatagcgggaacgagaaagtttactgggatgactatcgcgtcgaatcgttttgcaccactgtgggtctgaaattagcgcctctgctgggacgtggtagtttcgctgaactgtcccagtacccaaacgatttcaaaagcctggtgaaccgttataatgaattggttgacacggtcggcctggagatggccaataaacacgtctttggtccgcaagcgtcttctgaaactggcctggcagaaggctacgttcttaaacccgtctatccgcgcttctttaatgtgggtacgcgcgtggcgattaaatgcaagaactccaaattttcggagaaagccaaactgatttcgccaattaaagcgaaggttgaactgacggagaacgataaacgtctgctcggaatctttagcgaatatgttacctggaatcgcgtcagtaacgtactgtcacatattggctcagtgacccagaaagattttgggcgtgtttcgggtctgacgatgaaagacatcattcgcgaagcagcacgcgaaggccatgatctgttgttcgctgataacccgtcggcggtgctgaaggagctgacaggcctcatccagaacacgattcgctccaaatggcacgaagttctggag

SEQ ID NO: 2246 - protein, 346 aa, synthetic construct
  REGION 1..346: note = variant of RNA ligase 2 from Klebsiella phage KP179
MHHHHHHGGSNMFAYYSSLENHTNAKFISKIRGAGFLMHTVEWVAREKIHGTNFSVIITPTEIVPAKRTGPILEDESFFGHEIIMKKYMDSFVKVQNMLNAMDLVSVQIFGEFAGGGIQKGVDYGDKDFYVFDILSDSGNEKVYWDDYRVESFCTTVGLKLAPLLGRGSFAELSQYPNDFKSLVNRYNELVDTVGLEMANKHVFGPQASSETGLAEGYVLKPVYPRFFNVGTRVAIKCKNSKFSEKAKLISPIKAKVELTENDKRLLGIFSEYVTWNRVSNVLSHIGSVTQKDFGRVSGLTMKDIIREAAREGHDLLFADNPSAVLKELTGLIQNTIRSKWHEVLE

SEQ ID NO: 2247 - DNA, 1038 bp, synthetic construct
  misc_feature 1..1038: note = variant of RNA ligase 2 from Klebsiella phage KP179
  source 1..1038: mol_type = other DNA
atgcatcaccatcaccatcacggtggcagcaacatgtttgcgtattattcaagtctggaaaaccataccaatgccaagttcattagcaagatccgtggtgcaggcttcctgatgcacaccgtggaatgggtagctcgcgagaagattcatggaacgaactttagcgttatcattactccgaccgaaatcgtgccagccaaacgcacagggccgatcttggaagatgagagcttctttggtcatgaaattatcatgaaaaaatatatggactccttcgtgaaggtgcagaacatgctgaatgcgatggatcttgttagcgtgcaaatctttggcgaatttgcgggtggtggcattcagaaaggcgtcgattacggagacaaagatttctatgtgtttgacatcctgtctgatagcgggaacgagaaagtttactgggatgactatcgcgtcgaatcgttttgcaccactgtgggtctgaaattagcgcctctgctgggacgtggtagtttcgctgaactgtcccagtacccaaacgatttcaaaagcctggtgaaccgttataatgaattggttgacacggtcggcctggagatggccaataaacacgtctttggtccgcaagcgtcttctgaaactggcctggcagaaggctacgttcttaaacccgtctatccgcgcttctttaatgtgggtacgcgcgtggcgattaaatgcaagaactccaaattttcggagaaagccaaactgatttcgccaattaaagcgaaggttgaactgacggagaacgatgagcgtctgctcggaatctttagcgaatatgttacctggaatcgcgtcagtaacgtactgtcacatattggctcagtgaccgccaaagattttgggcgtgtttcgggtctgacgatgaaagacatcattcgcgaagcagcacgcgaaggccatgatctgttgttcgctgataacccgtcggcggtgctgaaggagctgacaggcctcatccagaacacgattcgctccaaatggcacgaagttctggag

SEQ ID NO: 2248 - protein, 346 aa, synthetic construct
  REGION 1..346: note = variant of RNA ligase 2 from Klebsiella phage KP179
MHHHHHHGGSNMFAYYSSLENHTNAKFISKIRGAGFLMHTVEWVAREKIHGTNFSVIITPTEIVPAKRTGPILEDESFFGHEIIMKKYMDSFVKVQNMLNAMDLVSVQIFGEFAGGGIQKGVDYGDKDFYVFDILSDSGNEKVYWDDYRVESFCTTVGLKLAPLLGRGSFAELSQYPNDFKSLVNRYNELVDTVGLEMANKHVFGPQASSETGLAEGYVLKPVYPRFFNVGTRVAIKCKNSKFSEKAKLISPIKAKVELTENDERLLGIFSEYVTWNRVSNVLSHIGSVTAKDFGRVSGLTMKDIIREAAREGHDLLFADNPSAVLKELTGLIQNTIRSKWHEVLE

SEQ ID NO: 2249 - DNA, 1038 bp, synthetic construct
  misc_feature 1..1038: note = variant of RNA ligase 2 from Klebsiella phage KP179
  source 1..1038: mol_type = other DNA
atgcatcaccatcaccatcacggtggcagcaacatgtttgcgtattattcaagtctggaaaaccataccaatgccaagttcattagcaagatccgtggtgcaggcttcctgatgcacaccgtggaatgggtagctcgcgagaagattcatggaacgaactttagcgttatcattactccgaccgaaatcgtgccagccaaacgcacagggccgatcttggaagatgagagcttctttggtcatgaaattatcatgaaaaaatatatggactccttcgtgaaggtgcagaacatgctgaatgcgatggatcttgttagcgtgcaaatctttggcgaatttgcgggtggtggcattcagaaaggcgtcgattacggagacaaagattggtatgtgtttgacatcctgtctgatagcgggaacgagaaagtttactgggatgactatcgcgtcgaatcgttttgcaccactgtgggtctgaaattagcgcctctgctgggacgtggtagtttcgctgaactgtcccagtacccaaacgatttcaaaagcctggtgaaccgttataatgaattggttgacacggtcggcctggagatggccaataaacacgtctttggtccgcaagcgtcttctgaaactggcctggcagaaggctacgttcttaaacccgtctatccgcgcttctttaatgtgggtacgcgcgtggcgattaaatgcaagaactccaaattttcggagaaagccaaactgatttcgccaattaaagcgaaggttgaactgacggagaacgataaacgtctgctcggaatctttagcgaatatgttacctggaatcgcgtcagtaacgtactgtcacatattggctcagtgaccgccaaagattttgggcgtgtttcgggtctgacgatgaaagacatcattcgcgaagcagcacgcgaaggccatgatctgttgttcgctgataacccgtcggcggtgctgaaggagctgacaggcctcatccagaacacgattcgctccaaatggcacgaagttctggag

SEQ ID NO: 2250 - protein, 346 aa, synthetic construct
  REGION 1..346: note = variant of RNA ligase 2 from Klebsiella phage KP179
MHHHHHHGGSNMFAYYSSLENHTNAKFISKIRGAGFLMHTVEWVAREKIHGTNFSVIITPTEIVPAKRTGPILEDESFFGHEIIMKKYMDSFVKVQNMLNAMDLVSVQIFGEFAGGGIQKGVDYGDKDWYVFDILSDSGNEKVYWDDYRVESFCTTVGLKLAPLLGRGSFAELSQYPNDFKSLVNRYNELVDTVGLEMANKHVFGPQASSETGLAEGYVLKPVYPRFFNVGTRVAIKCKNSKFSEKAKLISPIKAKVELTENDKRLLGIFSEYVTWNRVSNVLSHIGSVTAKDFGRVSGLTMKDIIREAAREGHDLLFADNPSAVLKELTGLIQNTIRSKWHEVLE

SEQ ID NO: 2251 - DNA, 1038 bp, synthetic construct
  misc_feature 1..1038: note = variant of RNA ligase 2 from Klebsiella phage KP179
  source 1..1038: mol_type = other DNA
atgcatcaccatcaccatcacggtggcagcaacatgtttgcgtattattcaagtctggaaaaccataccaatgccaagttcattagcaagatccgtggtgcaggcttcctgatgcacaccgtggaatgggtagctcgcgagaagattcatggaacgaactttagcgttatcattactccgaccgaaatcgtgccagccaaacgcacagggccgatcttggaagatgagagcttctttggtcatgaaattatcatgaaaaaatatatggactccttcgtgaaggtgcagaacatgctgaatgcgatggatcttgttagcgtgcaaatctttggcgaatttgcgggtggtggcattcagaaaggcgtcgattacggagacaaagatttctatgtgtttgacatcctgtctgatagcgggaacgagaaagtttactgggatgactatcgcgtcgaatcgttttgcaccactgtgggtctgaaattagcgcctctgctgggacgtggtagtttcgctgaactgtcccagtacccaaacgatttcaaaagcctggtgaaccgttataatgaattggttgacacggtcggcctggagatggccaataaacacgtctttggtccgcaagcgtcttctgaaactggcctggcagaaggctacgttcttaaacccgtctatccgcgcttctttaatgtgggtacgcgcgtggcgattaaatgcaagaactccaaattttcggagaaagccaaactgatttcgccaattaaagcgaaggttgaactgacggagaacgataaacgtctgctcggaatctttagcgaatatgttacctggaatcgcgtcctgaacgtactgtcacatattggctcagtgaccgccaaagattttgggcgtgtttcgggtctgacgatgaaagacatcattcgcgaagcagcacgcgaaggccatgatctgttgttcgctgataacccgtcggcggtgctgaaggagctgacaggcctcatccagaacacgattcgctccaaatggcacgaagttctggag

SEQ ID NO: 2252 - protein, 346 aa, synthetic construct
  REGION 1..346: note = variant of RNA ligase 2 from Klebsiella phage KP179
MHHHHHHGGSNMFAYYSSLENHTNAKFISKIRGAGFLMHTVEWVAREKIHGTNFSVIITPTEIVPAKRTGPILEDESFFGHEIIMKKYMDSFVKVQNMLNAMDLVSVQIFGEFAGGGIQKGVDYGDKDFYVFDILSDSGNEKVYWDDYRVESFCTTVGLKLAPLLGRGSFAELSQYPNDFKSLVNRYNELVDTVGLEMANKHVFGPQASSETGLAEGYVLKPVYPRFFNVGTRVAIKCKNSKFSEKAKLISPIKAKVELTENDKRLLGIFSEYVTWNRVLNVLSHIGSVTAKDFGRVSGLTMKDIIREAAREGHDLLFADNPSAVLKELTGLIQNTIRSKWHEVLE

SEQ ID NO: 2253 - DNA, 1038 bp, synthetic construct
  misc_feature 1..1038: note = variant of RNA ligase 2 from Klebsiella phage KP179
  source 1..1038: mol_type = other DNA
atgcatcaccatcaccatcacggtggcagcaacatgtttgcgtattattcaagtctggaaaaccataccaatgccaagttcattagcaagatccgtggtgcaggcttcctgatgcacaccgtggaatgggtagctcgcgagaagattcatggaacgaactttagcgttatcattactccgaccgaaatcgtgccagccaaacgcacagggccgatcttggaagatgagagcttctttggtcatgaaattatcatgaaaaaatatatggactccttcgtgaaggtgcagaacatgctgaatgcgatggatcttgttagcgtgcaaatctttggcgaatttgcgggtggtggcattcagaaaggcgtcgattacggagacaaagatttctatgtgtttgacatcctgtctgatagcgggaacgagaaagtttactgggatgactatcgcgtcgaatcgttttgcaccactgtgggtctgaaattagcgcctctgctgggacgtggtagtttcgctgaactgtcccagtacccaaacgatttcaaaagcctggtgaaccgttataatgaattggttgacacggtcggcctggagatggccaataaacacgtctttggtccgcaagcgtcttctgaaactggcctggcagaaggctacgttcttaaacccgtctatccgcgcttctttaatgtgggtacgcgcgtggcgattaaatgcaagaactccaaattttcggagaaagccaaactgatttcgccaattaaagcgaaggttgaactgacggagaacgataaacgtctgctcggaatctttagcgaatatgttacctggaatcgcgtcagtaacgtactgtcacatattggctcagtgaccgccaaagattttgggcgtgttaggggtctgacgatgaaagacatcattcgcgaagcagcacgcgaaggccatgatctgttgttcgctgataacccgtcggcggtgctgaaggagctgacaggcctcatccagaacacgattcgctccaaatggcacgaagttctggag

SEQ ID NO: 2254 - protein, 346 aa, synthetic construct
  REGION 1..346: note = variant of RNA ligase 2 from Klebsiella phage KP179
MHHHHHHGGSNMFAYYSSLENHTNAKFISKIRGAGFLMHTVEWVAREKIHGTNFSVIITPTEIVPAKRTGPILEDESFFGHEIIMKKYMDSFVKVQNMLNAMDLVSVQIFGEFAGGGIQKGVDYGDKDFYVFDILSDSGNEKVYWDDYRVESFCTTVGLKLAPLLGRGSFAELSQYPNDFKSLVNRYNELVDTVGLEMANKHVFGPQASSETGLAEGYVLKPVYPRFFNVGTRVAIKCKNSKFSEKAKLISPIKAKVELTENDKRLLGIFSEYVTWNRVSNVLSHIGSVTAKDFGRVRGLTMKDIIREAAREGHDLLFADNPSAVLKELTGLIQNTIRSKWHEVLE

SEQ ID NO: 2255 - DNA, 1038 bp, synthetic construct
  misc_feature 1..1038: note = variant of RNA ligase 2 from Klebsiella phage KP179
  source 1..1038: mol_type = other DNA
atgcatcaccatcaccatcacggtggcagcaacatgtttgcgtattattcaagtctggaaaaccataccaatgccaagttcattagcaagatccgtggtgcaggcttcctgatgcacaccgtggaatgggtagctcgcgagaagattcatggaacgaactttagcgttatcattactccgaccgaaatcgtgccagccaaacgcacagggccgatcttggaagatgagagcttctttggtcatgaaattatcatgaaaaaatatatggactccttcgtgaaggtgcagaacatgctgaatgcgatggatcttgttagcgtgcaaatctttggcgaatttgcgggtggtggcattcagaaaggcgtcgattacggagacaaagatttctatgtgtttgacatcctgtctgatagcgggaacgagaaagtttactgggatgactatcgcgtcgaatcgttttgcaccactgtgggtctgaaattagcgcctctgctgggacgtggtagtttcgctgaactgtcccagtacccaaacgatttcaaaagcctggtgaaccgttataatgaattggttgacacggtcggcctggagatggccaataaacacgtctttggtccgcaagcgtcttctgaaactggcctggcagaaggctacgttcttaaacccgtctatccgcgcttctttaatgtgggtacgcgcgtggcgattaaatgcaagaactccaaattttcggagaaagccaaactgatttcgccaattaaagcgaaggttgaactgacggagaacgataaacgtctgctcggaatctttagcgaatatgttacctggaatcgcgtcagtaacgtactgtcacatattggctcagtgaccgccaaagattttaagcgtgtttcgggtctgacgatgaaagacatcattcgcgaagcagcacgcgaaggccatgatctgttgttcgctgataacccgtcggcggtgctgaaggagctgacaggcctcatccagaacacgattcgctccaaatggcacgaagttctggag

SEQ ID NO: 2256 - protein, 346 aa, synthetic construct
  REGION 1..346: note = variant of RNA ligase 2 from Klebsiella phage KP179
MHHHHHHGGSNMFAYYSSLENHTNAKFISKIRGAGFLMHTVEWVAREKIHGTNFSVIITPTEIVPAKRTGPILEDESFFGHEIIMKKYMDSFVKVQNMLNAMDLVSVQIFGEFAGGGIQKGVDYGDKDFYVFDILSDSGNEKVYWDDYRVESFCTTVGLKLAPLLGRGSFAELSQYPNDFKSLVNRYNELVDTVGLEMANKHVFGPQASSETGLAEGYVLKPVYPRFFNVGTRVAIKCKNSKFSEKAKLISPIKAKVELTENDKRLLGIFSEYVTWNRVSNVLSHIGSVTAKDFKRVSGLTMKDIIREAAREGHDLLFADNPSAVLKELTGLIQNTIRSKWHEVLE

SEQ ID NO: 2257 - DNA, 1038 bp, synthetic construct
  misc_feature 1..1038: note = variant of RNA ligase 2 from Klebsiella phage KP179
  source 1..1038: mol_type = other DNA
atgcatcaccatcaccatcacggtggcagcaacatgtttgcgtattattcaagtctggaaaaccataccaatgccaagttcattagcaagatccgtggtgcaggcttcctgatgcacaccgtggaatgggtagctcgcgagaagattcatggaacgaactttagcgttatcattactccgaccgaaatcgtgccagccaaacgcacagggccgatcttggaagatgagagcttctttggtcatgaaattatcatgaaaaaatatatggactccttcgtgaaggtgcagaacatgctgaatgcgatggatcttgttagcgtgcaaatctttggcgaatttgcgggtggtggcattcagaaaggcactgattacggagacaaagatttctatgtgtttgacatcctgtctgatagcgggaacgagaaagtttactgggatgactatcgcgtcgaatcgttttgcaccactgtgggtctgaaattagcgcctctgctgggacgtggtagtttcgctgaactgtcccagtacccaaacgatttcaaaagcctggtgaaccgttataatgaattggttgacacggtcggcctggagatggccaataaacacgtctttggtccgcaagcgtcttctgaaactggcctggcagaaggctacgttcttaaacccgtctatccgcgcttctttaatgtgggtacgcgcgtggcgattaaatgcaagaactccaaattttcggagaaagccaaactgatttcgccaattaaagcgaaggttgaactgacggagaacgataaacgtctgctcggaatctttagcgaatatgttacctggaatcgcgtcagtaacgtactgtcacatattggctcagtgaccgccaaagattttgggcgtgtttcgggtctgacgatgaaagacatcattcgcgaagcagcacgcgaaggccatgatctgttgttcgctgataacccgtcggcggtgctgaaggagctgacaggcctcatccagaacacgattcgctccaaatggcacgaagttctggag

SEQ ID NO: 2258 - protein, 346 aa, synthetic construct
  REGION 1..346: note = variant of RNA ligase 2 from Klebsiella phage KP179
MHHHHHHGGSNMFAYYSSLENHTNAKFISKIRGAGFLMHTVEWVAREKIHGTNFSVIITPTEIVPAKRTGPILEDESFFGHEIIMKKYMDSFVKVQNMLNAMDLVSVQIFGEFAGGGIQKGTDYGDKDFYVFDILSDSGNEKVYWDDYRVESFCTTVGLKLAPLLGRGSFAELSQYPNDFKSLVNRYNELVDTVGLEMANKHVFGPQASSETGLAEGYVLKPVYPRFFNVGTRVAIKCKNSKFSEKAKLISPIKAKVELTENDKRLLGIFSEYVTWNRVSNVLSHIGSVTAKDFGRVSGLTMKDIIREAAREGHDLLFADNPSAVLKELTGLIQNTIRSKWHEVLE

SEQ ID NO: 2259 - DNA, 1038 bp, synthetic construct
  misc_feature 1..1038: note = variant of RNA ligase 2 from Klebsiella phage KP179
  source 1..1038: mol_type = other DNA
atgcatcaccatcaccatcacggtggcagcaacatgtttgcgtattattcaagtctggaaaaccataccaatgccaagttcattagcaagatccgtggtgcaggcttcctgatgcacaccgtggaatgggtagctcgcgagaagattcatggaacgaactttagcgttatcattactccgaccgaaatcgtgccagccaaacgcacagggccgatcttggaagatgagagcttctttggtcatgaaattatcatgaaaaaatatatggactccttcgtgaaggtgcagaacatgctgaatgcgatggatcttgttagcgtgcaaatctttggcgaatttgcgggtggtggcattcagaaaggcgtcgattacggagacaaagatttctatgtgtttgacatcctgtctgatagcgggaacgagaaagtttactgggatgactatcgcgtcgaatcgttttgcaccactgtgggtctgaaattagcgcctctgctgggacgtggtagtttcgctgaactgtcccagtacccaaacgatttcaaaagcctggtgaaccgttataatgaattggttgacacggtcggcctggagatggccaataaacacgtctttggtccgcaagcgtcttctgaaactggcctggcagaaggctacgttcttaaacccgtctatccgcgcttctttaatgtgggtacgcgcgtggcgattaaatgcaagaactccaaattttcggagaaagccaaactgatttcgccaattaaagcgaaggttgaactgacggagaacgataaacgtctgattggaatctttagcgaatatgttacctggaatcgcgtcagtaacgtactgtcacatattggctcagtgaccgccaaagattttgggcgtgtttcgggtctgacgatgaaagacatcattcgcgaagcagcacgcgaaggccatgatctgttgttcgctgataacccgtcggcggtgctgaaggagctgacaggcctcatccagaacacgattcgctccaaatggcacgaagttctggag

SEQ ID NO: 2260 - protein, 346 aa, synthetic construct
  REGION 1..346: note = variant of RNA ligase 2 from Klebsiella phage KP179
MHHHHHHGGSNMFAYYSSLENHTNAKFISKIRGAGFLMHTVEWVAREKIHGTNFSVIITPTEIVPAKRTGPILEDESFFGHEIIMKKYMDSFVKVQNMLNAMDLVSVQIFGEFAGGGIQKGVDYGDKDFYVFDILSDSGNEKVYWDDYRVESFCTTVGLKLAPLLGRGSFAELSQYPNDFKSLVNRYNELVDTVGLEMANKHVFGPQASSETGLAEGYVLKPVYPRFFNVGTRVAIKCKNSKFSEKAKLISPIKAKVELTENDKRLIGIFSEYVTWNRVSNVLSHIGSVTAKDFGRVSGLTMKDIIREAAREGHDLLFADNPSAVLKELTGLIQNTIRSKWHEVLE

SEQ ID NO: 2261 - DNA, 1038 bp, synthetic construct
  misc_feature 1..1038: note = variant of RNA ligase 2 from Klebsiella phage KP179
  source 1..1038: mol_type = other DNA
atgcatcaccatcaccatcacggtggcagcaacatgtttgcgtattattcaagtctggaaaaccataccaatgccaagttcattagcaagatccgtggtgcaggcttcctgatgcacaccgtggaatgggtagctcgcgagaagattcatggaacgaactttagcgttatcattactccgaccgaaatcgtgccagccaaacgcacagggccgatcttggaagatgagagcttctttggtcatgaaattatcatgaaaaaatatggggactccttcgtgaaggtgcagaacatgctgaatgcgatggatcttgttagcgtgcaaatctttggcgaatttgcgggtggtggcattcagaaaggcgtcgattacggagacaaagatttctatgtgtttgacatcctgtctgatagcgggaacgagaaagtttactgggatgactatcgcgtcgaatcgttttgcaccactgtgggtctgaaattagcgcctctgctgggacgtggtagtttcgctgaactgtcccagtacccaaacgatttcaaaagcctggtgaaccgttataatgaattggttgacacggtcggcctggagatggccaataaacacgtctttggtccgcaagcgtcttctgaaactggcctggcagaaggctacgttcttaaacccgtctatccgcgcttctttaatgtgggtacgcgcgtggcgattaaatgcaagaactccaaattttcggagaaagccaaactgatttcgccaattaaagcgaaggttgaactgacggagaacgataaacgtctgctcggaatctttagcgaatatgttacctggaatcgcgtcagtaacgtactgtcacatattggctcagtgaccgccaaagattttgggcgtgtttcgggtctgacgatgaaagacatcattcgcgaagcagcacgcgaaggccatgatctgttgttcgctgataacccgtcggcggtgctgaaggagctgacaggcctcatccagaacacgattcgctccaaatggcacgaagttctggag

SEQ ID NO: 2262 - protein, 346 aa, synthetic construct
  REGION 1..346: note = variant of RNA ligase 2 from Klebsiella phage KP179
MHHHHHHGGSNMFAYYSSLENHTNAKFISKIRGAGFLMHTVEWVAREKIHGTNFSVIITPTEIVPAKRTGPILEDESFFGHEIIMKKYGDSFVKVQNMLNAMDLVSVQIFGEFAGGGIQKGVDYGDKDFYVFDILSDSGNEKVYWDDYRVESFCTTVGLKLAPLLGRGSFAELSQYPNDFKSLVNRYNELVDTVGLEMANKHVFGPQASSETGLAEGYVLKPVYPRFFNVGTRVAIKCKNSKFSEKAKLISPIKAKVELTENDKRLLGIFSEYVTWNRVSNVLSHIGSVTAKDFGRVSGLTMKDIIREAAREGHDLLFADNPSAVLKELTGLIQNTIRSKWHEVLE

SEQ ID NO: 2263 - DNA, 1038 bp, synthetic construct
  misc_feature 1..1038: note = variant of RNA ligase 2 from Klebsiella phage KP179
  source 1..1038: mol_type = other DNA
atgcatcaccatcaccatcacggtggcagcaacatgtttgcgtattattcaagtctggaaaaccataccaatgccaagttcattagcaagatccgtggtgcaggcttcctgatgcacaccgtggaatgggtagctcgcgagaagattcatggaacgaactttagcgttatcattactccgaccgaaatcgtgccagccaaacgcacagggccgatcttggaagatgagagcttctttggtcatgaaattatcatgaaaaaatatatggactccttcgtgaaggtgcagaacatgctgaatgcgatggatcttgttagcgtgcaaatctttggcgaatttgcgggtggtggcattcagaaaggcgtcgattacggagacaaagatttctatgtgtttgacatcctgtctgatagcgggaacgagaaagtttactgggatgactatcgcgtcgaatcgttttgcaccactgtgggtctgaaattagcgcctctgctgggacgtggtagtttcgctgaactgtcccagtacccaaacgatttcaaaagcctggtgaaccgttataatgaattggttgacacggtcggcctggagatggccaataaacacgtctttggtccgcaagcgtcttctgaaactggcctggcagaaggctacgttcttaaacccgtctatccgcgcttctttaatgtgggtacgcgcgtggcgattaaatgcaagaactccaaattttcggagaaagccaaactgatttcgccaattaaagcgaaggttgaactgacggagaacgataaacgtctgctcggaatctttagcgaatatgttacctggaatcgcgtcagtaacgtactgtcacatgtgggctcagtgaccgccaaagattttgggcgtgtttcgggtctgacgatgaaagacatcattcgcgaagcagcacgcgaaggccatgatctgttgttcgctgataacccgtcggcggtgctgaaggagctgacaggcctcatccagaacacgattcgctccaaatggcacgaagttctggag

SEQ ID NO: 2264 - protein, 346 aa, synthetic construct
  REGION 1..346: note = variant of RNA ligase 2 from Klebsiella phage KP179
MHHHHHHGGSNMFAYYSSLENHTNAKFISKIRGAGFLMHTVEWVAREKIHGTNFSVIITPTEIVPAKRTGPILEDESFFGHEIIMKKYMDSFVKVQNMLNAMDLVSVQIFGEFAGGGIQKGVDYGDKDFYVFDILSDSGNEKVYWDDYRVESFCTTVGLKLAPLLGRGSFAELSQYPNDFKSLVNRYNELVDTVGLEMANKHVFGPQASSETGLAEGYVLKPVYPRFFNVGTRVAIKCKNSKFSEKAKLISPIKAKVELTENDKRLLGIFSEYVTWNRVSNVLSHVGSVTAKDFGRVSGLTMKDIIREAAREGHDLLFADNPSAVLKELTGLIQNTIRSKWHEVLE

SEQ ID NO: 2265 - DNA, 1038 bp, synthetic construct
  misc_feature 1..1038: note = variant of RNA ligase 2 from Klebsiella phage KP179
  source 1..1038: mol_type = other DNA
atgcatcaccatcaccatcacggtggcagcaacatgtttgcgtattattcaagtctggaaaaccataccaatgccaagttcattagcaagatccgtggtgcaggcttcctgatgcacaccgtggaatgggtagctcgcgagaagattcatggaacgaactttagcgttatcattactccgaccgaaatcgtgccagccaaacgcacagggccgatcttggaagatgagagcttctttggtcatgaaattatcatgaaaaaatatatggactccttcgtgaaggtgcagaacatgctgaatgcgatggatcttgttagcgtgcaaatctttggcgaatttgcgggtggtggcattcagaaaggcgtcgattacggagacaaagatttctatgtgtttgacatcctgtctgatagcgggaacgagaaagtttactgggatgactatcgcgtcgaatcgttttgcaccactgtgggtctgaaattagcgcctctgctgggacgtggtagtttcgctgaactgtcccagtacccaaacgatttcaaaagcctggtgtttcgttataatgaattggttgacacggtcggcctggagatggccaataaacacgtctttggtccgcaagcgtcttctgaaactggcctggcagaaggctacgttcttaaacccgtctatccgcgcttctttaatgtgggtacgcgcgtggcgattaaatgcaagaactccaaattttcggagaaagccaaactgatttcgccaattaaagcgaaggttgaactgacggagaacgataaacgtctgctcggaatctttagcgaatatgttacctggaatcgcgtcagtaacgtactgtcacatattggctcagtgaccgccaaagattttgggcgtgtttcgggtctgacgatgaaagacatcattcgcgaagcagcacgcgaaggccatgatctgttgttcgctgataacccgtcggcggtgctgaaggagctgacaggcctcatccagaacacgattcgctccaaatggcacgaagttctggag

SEQ ID NO: 2266 - protein, 346 aa, synthetic construct
  REGION 1..346: note = variant of RNA ligase 2 from Klebsiella phage KP179
MHHHHHHGGSNMFAYYSSLENHTNAKFISKIRGAGFLMHTVEWVAREKIHGTNFSVIITPTEIVPAKRTGPILEDESFFGHEIIMKKYMDSFVKVQNMLNAMDLVSVQIFGEFAGGGIQKGVDYGDKDFYVFDILSDSGNEKVYWDDYRVESFCTTVGLKLAPLLGRGSFAELSQYPNDFKSLVFRYNELVDTVGLEMANKHVFGPQASSETGLAEGYVLKPVYPRFFNVGTRVAIKCKNSKFSEKAKLISPIKAKVELTENDKRLLGIFSEYVTWNRVSNVLSHIGSVTAKDFGRVSGLTMKDIIREAAREGHDLLFADNPSAVLKELTGLIQNTIRSKWHEVLE

SEQ ID NO: 2267 - DNA, 1038 bp, synthetic construct
  misc_feature 1..1038: note = variant of RNA ligase 2 from Klebsiella phage KP179
  source 1..1038: mol_type = other DNA
atgcatcaccatcaccatcacggtggcagcaacatgtttgcgtattattcaagtctggaaaaccataccaatgccaagttcattagcaagatccgtggtgcaggcttcctgatgcacaccgtggaatgggtagctcgcgagaagattcatggaacgaactttagcgttatcattactccgaccgaaatcgtgccagccaaacgcacagggccgatcttggaagatgagagcttctttggtcatgaaattatcatgaaaaaatatatggactccttcgtgaaggtgcagaacatgctgaatgcgatggatcttgttagcgtgcaaatctttggcgaatttgcgggtggtggcattcagaaaggcgtcgattacggagacaaagatttctatgtgtttgacatcctgtctgatagcgggaacgagaaagtttactgggatgactatcgcgtcgaatcgttttgcaccactgtgaggctgaaattagcgcctctgctgggacgtggtagtttcgctgaactgtcccagtacccaaacgatttcaaaagcctggtgaaccgttataatgaattggttgacacggtcggcctggagatggccaataaacacgtctttggtccgcaagcgtcttctgaaactggcctgggtgaaggctacgttcttaaacccgtctatccgcgcttctttaatgtgggtacgcgcgtggcgattaaatgcaagaactccaaattttcggagaaagccaaactgatttcgccaattaaagcgaaggttgaactgacggagaacgataaacgtctgctcggaatctttagcgaatatgttacctggaatcgcgtcagtaacgtactgtcacatattggctcagtgaccgccaaagattttgggcgtgtttcgggtctgacgatgaaagacatcattcgcgaagcagcacgcgaaggccatgatctgttgttcgctgataacccgtcggcggtgctgaaggagctgacaggcctcatccagaacacgattcgctccaaatggcacgaagttctggag

SEQ ID NO: 2268 - protein, 346 aa, synthetic construct
  REGION 1..346: note = variant of RNA ligase 2 from Klebsiella phage KP179
MHHHHHHGGSNMFAYYSSLENHTNAKFISKIRGAGFLMHTVEWVAREKIHGTNFSVIITPTEIVPAKRTGPILEDESFFGHEIIMKKYMDSFVKVQNMLNAMDLVSVQIFGEFAGGGIQKGVDYGDKDFYVFDILSDSGNEKVYWDDYRVESFCTTVRLKLAPLLGRGSFAELSQYPNDFKSLVNRYNELVDTVGLEMANKHVFGPQASSETGLGEGYVLKPVYPRFFNVGTRVAIKCKNSKFSEKAKLISPIKAKVELTENDKRLLGIFSEYVTWNRVSNVLSHIGSVTAKDFGRVSGLTMKDIIREAAREGHDLLFADNPSAVLKELTGLIQNTIRSKWHEVLE

SEQ ID NO: 2269 - DNA, 1038 bp, synthetic construct
  misc_feature 1..1038: note = variant of RNA ligase 2 from Klebsiella phage KP179
  source 1..1038: mol_type = other DNA
atgcatcaccatcaccatcacggtggcagcaacatgtttgcgtattattcaagtctggaaaaccataccaatgccaagttcattagcaagatccgtggtgcaggcttcctgatgcacaccgtggaatgggtagctcgcgagaagattcatggaacgaactttagcgttatcattactccgaccgaaatcgtgccagccaaacgcacagggccgatcttggaagatgagagcttctttggtcatgaaattatcatgaaaaaatatatggactccttcgtgaaggtgcagaacatgctgaatgcgatggatcttgttagcgtgcaaatctttggcgaatttgcgggtggtggcattcagaaaggcgtcgattacggagacaaagatttctatgtgtttgacatcctgtctgatagcgggaacgagaaagtttactgggatgactatcgcgtcgaatcgttttgcaccactgtgggtctgaaattagcgcctctgctgggacgtggtagtttcgctgaactgtcccagtacccaaacgatttcaaaagcctggtgaaccgttataatgaattggttgacacggtcggcctggagatggccaataaacacgtctttggtccgcaagcgtcttctgaaactggcctggcagaaggctacgttcttaaacccgtctatccgcgcttctttaatgtgggtacgcgcgtggcgattaaatgcaagaactccaaattttcggagaaagccaaactgatttcgccaattaaagcgaaggttgaactgacggagaacgataaacgtctgctcggaatctttagcgaatatgttacctggaatcgcgtcagtaacgtactgtcacatattggctcagtgaccgccaaagattttactcgtgtttcgggtctgacgatgaaagacatcattcgcgaagcagcacgcgaaggccatgatctgttgttcgctgataacccgtcggcggtgctgaaggagctgacaggcctcatccagaacacgattcgctccaaatggcacgaagttctggag

SEQ ID NO: 2270 - protein, 346 aa, synthetic construct
  REGION 1..346: note = variant of RNA ligase 2 from Klebsiella phage KP179
MHHHHHHGGSNMFAYYSSLENHTNAKFISKIRGAGFLMHTVEWVAREKIHGTNFSVIITPTEIVPAKRTGPILEDESFFGHEIIMKKYMDSFVKVQNMLNAMDLVSVQIFGEFAGGGIQKGVDYGDKDFYVFDILSDSGNEKVYWDDYRVESFCTTVGLKLAPLLGRGSFAELSQYPNDFKSLVNRYNELVDTVGLEMANKHVFGPQASSETGLAEGYVLKPVYPRFFNVGTRVAIKCKNSKFSEKAKLISPIKAKVELTENDKRLLGIFSEYVTWNRVSNVLSHIGSVTAKDFTRVSGLTMKDIIREAAREGHDLLFADNPSAVLKELTGLIQNTIRSKWHEVLE

SEQ ID NO: 2271 - DNA, 1038 bp, synthetic construct
  misc_feature 1..1038: note = variant of RNA ligase 2 from Klebsiella phage KP179
  source 1..1038: mol_type = other DNA
atgcatcaccatcaccatcacggtggcagcaacatgtttgcgtattattcaagtctggaaaaccataccaatgccaagttcgcgagcaagatccgtggtgcaggcttcctgatgcacaccgtggaatgggtagctcgcgagaagattcatggaacgaactttagcgttatcattactccgaccgaaatcgtgccagccaaacgcacagggccgatcttggaagatgagagcttctttggtcatgaaattatcatgaaaaaatatatggactccttcgtgaaggtgcagaacatgctgaatgcgatggatcttgttagcgtgcaaatctttggcgaatttgcgggtggtggcattcagaaaggcggggattacggagacaaagatttctatgtgtttgacatcctgtctgatagcgggaacgagaaagtttactgggatgactatcgcgtcgaatcgttttgcaccactgtgggtctgaaattagcgcctctgctgggacgtggtagtttcgctgaactgtcccagtacccaaacgatttcaaaagcctggtgaaccgttataatgaattggttgacacggtcggcctggagatggccaataaacacgtctttggtccgcaagcgtcttctgaaactggcctggcagaaggctacgttcttaaacccgtctatccgcgcttctttaatgtgggtacgcgcgtggcgattaaatgcaagaactccaaattttcggagaaagccaaactgatttcgccaattaaagcgaaggttgaactgacggagaacgataaacgtctgctcggaatctttagcgaatatgttacctggaatcgcgtcagtaacgtactgtcacatattggctcagtgaccgccaaagattttgggcgtgtttcgggtctgacgatgaaagacatcattcgcgaagcagcacgcgaaggccatgatctgttgttcgctgataacccgtcggcggtgctgaaggagctgacaggcctcatccagaacacgattcgctccaaatggcacgaagttctggag

SEQ ID NO: 2272 - protein, 346 aa, synthetic construct
  REGION 1..346: note = variant of RNA ligase 2 from Klebsiella phage KP179
MHHHHHHGGSNMFAYYSSLENHTNAKFASKIRGAGFLMHTVEWVAREKIHGTNFSVIITPTEIVPAKRTGPILEDESFFGHEIIMKKYMDSFVKVQNMLNAMDLVSVQIFGEFAGGGIQKGGDYGDKDFYVFDILSDSGNEKVYWDDYRVESFCTTVGLKLAPLLGRGSFAELSQYPNDFKSLVNRYNELVDTVGLEMANKHVFGPQASSETGLAEGYVLKPVYPRFFNVGTRVAIKCKNSKFSEKAKLISPIKAKVELTENDKRLLGIFSEYVTWNRVSNVLSHIGSVTAKDFGRVSGLTMKDIIREAAREGHDLLFADNPSAVLKELTGLIQNTIRSKWHEVLE

SEQ ID NO: 2273 - DNA, 1038 bp, synthetic construct
  misc_feature 1..1038: note = variant of RNA ligase 2 from Klebsiella phage KP179
  source 1..1038: mol_type = other DNA
atgcatcaccatcaccatcacggtggcagcaacatgtttgcgtattattcaagtctggaaaaccataccaatgccaagttcattagcaagatccgtggtgcaggcttcctgatgcacaccgtggaatgggtagctcgcgagaagattcatggaacgaactttagcgttatcattactccgaccgaaatcgtgccagccaaacgcacagggccgatcttggaagatgagagcttctttggtcatgaaattatcatgaaaaaatatatggactccttcgtgaaggtgcagaacatgctgaatgcgatggatcttgttagcgtgcaaatctttggcgaatttgcgggtggtggcattcagaaaggcgtcgattacggagacaaagatttctatgtgtttgacatcctgtctgatagcgggaacgagaaagtttactgggatgactatcgcgtcgaatcgttttgcaccactgtgggtctgaaattagcgcctctgctgggacgtggtagtttcgctgaactgtcccagtacccaaacgatttcaaaagcctggtgaaccgttataatgaattggttgacacggtcggcctggagatggccaataaacacgtctttggtccgcaagcgtcttctgaaactggcctggcagaaggctacgttcttaaacccgtctatccgcgcttctttaatgtgggtacgcgcgtggcgattaaatgcaagaactccaaattttcggagaaagccaaactgatttcgccaattaaagcgaaggttgaactgacggagaacgataaacgtctgctcggaatctttagcgaatatgttaccatgaatcgcgtcagtaacgtactgtcacatattggctcagtgaccgccaaagattttgggcgtgtttcgggtctgacgatgaaagacatcattcgcgaagcagcacgcgaaggccatgatctgttgttcgctgataacccgtcggcggtgctgaaggagctgacaggcctcatccagaacacgattcgctccaaatggcacgaagttctggag

SEQ ID NO: 2274 - protein, 346 aa, synthetic construct
  REGION 1..346: note = variant of RNA ligase 2 from Klebsiella phage KP179
MHHHHHHGGSNMFAYYSSLENHTNAKFISKIRGAGFLMHTVEWVAREKIHGTNFSVIITPTEIVPAKRTGPILEDESFFGHEIIMKKYMDSFVKVQNMLNAMDLVSVQIFGEFAGGGIQKGVDYGDKDFYVFDILSDSGNEKVYWDDYRVESFCTTVGLKLAPLLGRGSFAELSQYPNDFKSLVNRYNELVDTVGLEMANKHVFGPQASSETGLAEGYVLKPVYPRFFNVGTRVAIKCKNSKFSEKAKLISPIKAKVELTENDKRLLGIFSEYVTMNRVSNVLSHIGSVTAKDFGRVSGLTMKDIIREAAREGHDLLFADNPSAVLKELTGLIQNTIRSKWHEVLE

SEQ ID NO: 2275 - DNA, 1038 bp, synthetic construct
  misc_feature 1..1038: note = variant of RNA ligase 2 from Klebsiella phage KP179
  source 1..1038: mol_type = other DNA
atgcatcaccatcaccatcacggtggcagcaacatgtttgcgtattattcaagtctggaaaaccataccaatgccaagttcattagcaagatccgtggtgcaggcttcctgatgcacaccgtggaatgggtagctcgcgagaagattcatggaacgaactttagcgttatcattactccgaccgaaatcgtgccagccaaacgcacagggccgatcttggaagatgagagcttctttggtcatgaaattatcatgaaaaaatatatggactccttcgtgaaggtgcagaacatgctgaatgcgatggatcttgttagcgtgcaaatctttggcgaatttgcgggtggtggcattcagaaaggcgtcgattacggagacaaagatttctatgtgtttgacatcctgtctgatagcgggaacgagaaagtttactgggatgactatcgcgtcgaatcgttttgcaccactgtgggtctgaaattagcgcctctgctgggacgtggtagtttcgctgaactgtcccagtacccaaacgatttcaaaagcctggtgaaccgttataatgaattggttgacacggtcggcctggagatggccaataaacacgtctttggtccgcaagcgtcttctgaaactggcctggcagaaggctacgttcttaaacccgtctatccgcgcttctttaatgtgggtacgcgcgtggcgattaaatgcaagaactccaaattttcggagaaagccaaactgatttcgccaattaaagcgaaggttgaactgacggagaacgataaacgtctgctcggaatctttagcgaatatgcgacctggaatcgcgtcagtaacgtactgtcacatattggctcagtgaccgccaaagattttgggcgtgtttcgggtctgacgatgaaagacatcattcgcgaagcagcacgcgaaggccatgatctgttgttcgctgataacccgtcggcggtgctgaaggagctgacaggcctcatccagaacacgattcgctccaaatggcacgaagttctggag

SEQ ID NO: 2276 - protein, 346 aa, synthetic construct
  REGION 1..346: note = variant of RNA ligase 2 from Klebsiella phage KP179
MHHHHHHGGSNMFAYYSSLENHTNAKFISKIRGAGFLMHTVEWVAREKIHGTNFSVIITPTEIVPAKRTGPILEDESFFGHEIIMKKYMDSFVKVQNMLNAMDLVSVQIFGEFAGGGIQKGVDYGDKDFYVFDILSDSGNEKVYWDDYRVESFCTTVGLKLAPLLGRGSFAELSQYPNDFKSLVNRYNELVDTVGLEMANKHVFGPQASSETGLAEGYVLKPVYPRFFNVGTRVAIKCKNSKFSEKAKLISPIKAKVELTENDKRLLGIFSEYATWNRVSNVLSHIGSVTAKDFGRVSGLTMKDIIREAAREGHDLLFADNPSAVLKELTGLIQNTIRSKWHEVLE

SEQ ID NO: 2277 - DNA, 1038 bp, synthetic construct
  misc_feature 1..1038: note = variant of RNA ligase 2 from Klebsiella phage KP179
  source 1..1038: mol_type = other DNA
atgcatcaccatcaccatcacggtggcagcaacatgtttgcgtattattcaagtctggaaaaccataccaatgccaagttcattagcaagatccgtggtgcaggcttcctgatgcacaccgtggaatgggtagctcgcgagaagattcatggaacgaactttagcgttatcattactccgaccgaaatcgtgccagccaaacgcacagggccgatcttggaagatgagagcttctttggtcatgaaattatcatgaaaaaatatatggactccttcgtgaaggtgcagaacatgctgaatgcgatggatcttgttagcgtgcaaatctttggcgaatttgcgggtggtggcattcagaaaggcgtcgattacggagacaaagatttctatgtgtttgacatcctgtctgatagcgggaacgagaaagtttactgggatgactatcgcgtcgaatcgttttgcaccactgtgggtctgaaattagcgcctctgctgggacgtggtagtttcgctgaactgtcccagtacccaaacgatttcaaaagcctggtgatgcgttataatgaattggttgacacggtcggcctggagatggccaataaacacgtctttggtccgcaagcgtcttctgaaactggcctggcagaaggctacgttcttaaacccgtctatccgcgcttctttaatgtgggtacgcgcgtggcgattaaatgcaagaactccaaattttcggagaaagccaaactgatttcgccaattaaagcgaaggttgaactgacggagaacgataaacgtctgctcggaatctttagcgaatatgttacctggaatcgcgtcagtaacgtactgtcacatattggctcagtgaccgccaaagattttgggcgtgtttcgggtctgacgatgaaagacatcattcgcgaagcagcacgcgaaggccatgatctgttgttcgctgataacccgtcggcggtgctgaaggagctgacaggcctcatccagaacacgattcgctccaaatggcacgaagttctggag

SEQ ID NO: 2278 - protein, 346 aa, synthetic construct
  REGION 1..346: note = variant of RNA ligase 2 from Klebsiella phage KP179
MHHHHHHGGSNMFAYYSSLENHTNAKFISKIRGAGFLMHTVEWVAREKIHGTNFSVIITPTEIVPAKRTGPILEDESFFGHEIIMKKYMDSFVKVQNMLNAMDLVSVQIFGEFAGGGIQKGVDYGDKDFYVFDILSDSGNEKVYWDDYRVESFCTTVGLKLAPLLGRGSFAELSQYPNDFKSLVMRYNELVDTVGLEMANKHVFGPQASSETGLAEGYVLKPVYPRFFNVGTRVAIKCKNSKFSEKAKLISPIKAKVELTENDKRLLGIFSEYVTWNRVSNVLSHIGSVTAKDFGRVSGLTMKDIIREAAREGHDLLFADNPSAVLKELTGLIQNTIRSKWHEVLE

SEQ ID NO: 2279 - DNA, 1038 bp, synthetic construct
  misc_feature 1..1038: note = variant of RNA ligase 2 from Klebsiella phage KP179
  source 1..1038: mol_type = other DNA
atgcatcaccatcaccatcacggtggcagcaacatgtttgcgtattattcaagtctggaaaaccataccaatgccaagttcattagcaagatccgtggtgcaggcttcctgatgcacaccgtggaatgggtagctcgcgagaagattcatggaacgaactttagcgttatcattactccgaccgaaatcgtgccagccaaacgcacagggccgatcttggaagatgagagcttctttggtcatgaaattatcatgaaaaaatatatggactccttcgtgaaggtgcagaacatgctgaatgcgatggatcttgttagcgtgcaaatctttggcgaatttgcgggtggtggcattcagaaaggcgtcgattacggagacaaagatttctatgtgtttgacatcctgtctgatagcgggaacgagaaagtttactgggatgactatcgcgtcgaatcgttttgcaccactgtgggtctgaaattagcgcctctgctgggacgtggtagtttcgctgaactgtcccagtacccaaacgatttcaaaagcctggtgaaccgttataatgaattggttgacacggtcggcctggagatggccaataaacacgtctttggtccgcaagcgtcttctgaaactggcctggcagaaggctacgttcttaaacccgtctatccgcgcttctttaatgtgggtacgcgcgtggcgattaaatgcaagaactccaaattttcggagaaagccaaactgatttcgccaattaaagcgaaggttgaactgacggagaacgataaacgtctgctcggaatctttacggaatatgttacctggaatcgcgtcagtaacgtactgtcacatattggctcagtgaccgccaaagattttgggcgtgtttcgggtctgacgatgaaagacatcattcgcgaagcagcacgcgaaggccatgatctgttgttcgctgataacccgtcggcggtgctgaaggagctgacaggcctcatccagaacacgattcgctccaaatggcacgaagttctggag

SEQ ID NO: 2280 - protein, 346 aa, synthetic construct
  REGION 1..346: note = variant of RNA ligase 2 from Klebsiella phage KP179
MHHHHHHGGSNMFAYYSSLENHTNAKFISKIRGAGFLMHTVEWVAREKIHGTNFSVIITPTEIVPAKRTGPILEDESFFGHEIIMKKYMDSFVKVQNMLNAMDLVSVQIFGEFAGGGIQKGVDYGDKDFYVFDILSDSGNEKVYWDDYRVESFCTTVGLKLAPLLGRGSFAELSQYPNDFKSLVNRYNELVDTVGLEMANKHVFGPQASSETGLAEGYVLKPVYPRFFNVGTRVAIKCKNSKFSEKAKLISPIKAKVELTENDKRLLGIFTEYVTWNRVSNVLSHIGSVTAKDFGRVSGLTMKDIIREAAREGHDLLFADNPSAVLKELTGLIQNTIRSKWHEVLE

SEQ ID NO: 2281 - DNA, 1038 bp, synthetic construct
  misc_feature 1..1038: note = variant of RNA ligase 2 from Klebsiella phage KP179
  source 1..1038: mol_type = other DNA
atgcatcaccatcaccatcacggtggcagcaacatgtttgcgtattattcaagtctggaaaaccataccaatgccaagttcattagcaagatccgtggtgcaggcttcctgatgcacaccgtggaatgggtagctcgcgagaagattcatggaacgaactttagcgttatcattactccgaccgaaatcgtgccagccaaacgcacagggccgatcttggaagatgagagcttctttggtcatgaaattatcatgaaaaaatatatggactccttcgtgaaggtgcagaacatgctgaatgcgatggatcttgttagcgtgcaaatctttggcgaatttgcgggtggtggcattcagaaaggcgtcgattacggagacaaagatttctatgtgtttgacatcctgtctgatagcgggaacgagaaagtttactgggatgactatcgcgtcgaatcgttttgcaccactgtgggtctgaaattagcgcctctgctgggacgtggtagtttcgctgaactgtcccagtacccaaacgatttcaaaagcctggtgaaccgttataatgaattggttgacacggtcggcctggagatggccaataaacacgtctttggtccgcaagcgtcttctgaaactggcctgacggaaggctacgttcttaaacccgtctatccgcgcttctttaatgtgggtacgcgcgtggcgattaaatgcaagaactccaaattttcggagaaagccaaactgatttcgccaattaaagcgaaggttgaactgacggagaacgataaacgtctgctcggaatctttagcgaatatgttacctggaatcgcgtcagtaacgtactgtcacatattggctcagtgaccgccaaagattttgggcgtgtttcgggtctgacgatgaaagacatcattcgcgaagcagcacgcgaaggccatgatctgttgttcgctgataacccgtcggcggtgctgaaggagctgacaggcctcatccagaacacgattcgctccaaatggcacgaagttctggag

SEQ ID NO: 2282 - protein, 346 aa, synthetic construct
  REGION 1..346: note = variant of RNA ligase 2 from Klebsiella phage KP179
MHHHHHHGGSNMFAYYSSLENHTNAKFISKIRGAGFLMHTVEWVAREKIHGTNFSVIITPTEIVPAKRTGPILEDESFFGHEIIMKKYMDSFVKVQNMLNAMDLVSVQIFGEFAGGGIQKGVDYGDKDFYVFDILSDSGNEKVYWDDYRVESFCTTVGLKLAPLLGRGSFAELSQYPNDFKSLVNRYNELVDTVGLEMANKHVFGPQASSETGLTEGYVLKPVYPRFFNVGTRVAIKCKNSKFSEKAKLISPIKAKVELTENDKRLLGIFSEYVTWNRVSNVLSHIGSVTAKDFGRVSGLTMKDIIREAAREGHDLLFADNPSAVLKELTGLIQNTIRSKWHEVLE

SEQ ID NO: 2283 - DNA, 1038 bp, synthetic construct
  misc_feature 1..1038: note = variant of RNA ligase 2 from Klebsiella phage KP179
  source 1..1038: mol_type = other DNA
atgcatcaccatcaccatcacggtggcagcaacatgtttgcgtattattcaagtctggaaaaccataccaatgccaagttcattagcaagatccgtggtgcaggcttcctgatgcacaccgtggaatgggtagctcgcgagaagattcatggaacgaactttagcgttatcattactccgaccgaaatcgtgccagccaaacgcacagggccgatcttggaagatgagagcttctttggtcatgaaattatcatgaaaaaatatatggactccttcgtgaaggtgcagaacatgctgaatgcgatggatcttgttagcgtgcaaatctttggcgaatttgcgggtggtggcattcagaaaggcgtcgattacggagacaaagatttctatgtgtttgacatcctgtctgatagcgggaacgagaaagtttactgggatgactatcgcgtcgaatcgttttgcaccactgtgggtctgaaattagcgcctctgctgggacgtggtagtttcgctgaactgtcccagtacccaaacgatttcaaaagcctggtgaaccgttataatgaattggttgacacggtcggcctggagatggccaataaacacgtctttggtccgcaagcgtcttctgaaactggcctggcagaaggctacgttcttaaacccgtctatccgcgcttctttaatgtgggtacgcgcgtggcgattaaatgcaagaactccaaattttcggagaaagccaaactgatttcgccaattaaagcgaaggttgaactgacggagaacgataaacgtctgctcggaatctttagcgaatatgttacctggaatcgcgtcagtaacgtactgtcacatattggctcagtgaccgccaaagattttccgcgtgtttcgggtctgacgatgaaagacatcattcgcgaagcagcacgcgaaggccatgatctgttgttcgctgataacccgtcggcggtgctgaaggagctgacaggcctcatccagaacacgattcgctccaaatggcacgaagttctggag

SEQ ID NO: 2284 - protein, 346 aa, synthetic construct
  REGION 1..346: note = variant of RNA ligase 2 from Klebsiella phage KP179
MHHHHHHGGSNMFAYYSSLENHTNAKFISKIRGAGFLMHTVEWVAREKIHGTNFSVIITPTEIVPAKRTGPILEDESFFGHEIIMKKYMDSFVKVQNMLNAMDLVSVQIFGEFAGGGIQKGVDYGDKDFYVFDILSDSGNEKVYWDDYRVESFCTTVGLKLAPLLGRGSFAELSQYPNDFKSLVNRYNELVDTVGLEMANKHVFGPQASSETGLAEGYVLKPVYPRFFNVGTRVAIKCKNSKFSEKAKLISPIKAKVELTENDKRLLGIFSEYVTWNRVSNVLSHIGSVTAKDFPRVSGLTMKDIIREAAREGHDLLFADNPSAVLKELTGLIQNTIRSKWHEVLE

SEQ ID NO: 2285 - DNA, 1038 bp, synthetic construct
  misc_feature 1..1038: note = variant of RNA ligase 2 from Klebsiella phage KP179
  source 1..1038: mol_type = other DNA
atgcatcaccatcaccatcacggtggcagcaacatgtttgcgtattattcaagtctggaaaaccataccaatgccaagttcattagcaagatccgtggtgcaggcttcctgatgcacaccgtggaatgggtagctcgcgagaagattcatggaacgaactttagcgttatcattactccgaccgaaatcgtgccagccaaacgcacagggccgatcttggaagatgagagcttctttggtcatgaaattatcatgaaaaaatatatggactccttcgtgaaggtgcagaacatgctgaatgcgatggatcttgttagcgtgcaaatctttggcgaatttgcgggtggtggcattcagaaaggcgtcgattacggagacaaagatttctatgtgtttgacatcctgtctgatagcgggaacgagaaagtttactgggatgactatcgcgtcgaatcgttttgcaccactgtgggtctgaaattagcgcctctgctgggacgtggtagtttcgctgaactgtcccagtacccaaacgatttcaaaagcctggtgaaccgttataatgaattggttgacacggtcggcctggagatggccaataaacacgtctttggtccgcaagcgtcttctgaaactggcctggcagaaggctacgttcttaaacccgtctatccgcgcttctttaatgtgggtacgcgcgtggcgattaaatgcaagaactccaaattttcggagaaagccaaactgatttcgccaattaaagcgaaggttgaactgacggagaacgataaacgtctgctcggaatctttagcgaatatgttacctggaatcgcgtcagtaacgtactgtcacatattggctcagtgaccgccaaagatgtggggcgtgtttcgggtctgacgatgaaagacatcattcgcgaagcagcacgcgaaggccatgatctgttgttcgctgataacccgtcggcggtgctgaaggagctgacaggcctcatccagaacacgattcgctccaaatggcacgaagttctggag

SEQ ID NO: 2286 - protein, 346 aa, synthetic construct
  REGION 1..346: note = variant of RNA ligase 2 from Klebsiella phage KP179
MHHHHHHGGSNMFAYYSSLENHTNAKFISKIRGAGFLMHTVEWVAREKIHGTNFSVIITPTEIVPAKRTGPILEDESFFGHEIIMKKYMDSFVKVQNMLNAMDLVSVQIFGEFAGGGIQKGVDYGDKDFYVFDILSDSGNEKVYWDDYRVESFCTTVGLKLAPLLGRGSFAELSQYPNDFKSLVNRYNELVDTVGLEMANKHVFGPQASSETGLAEGYVLKPVYPRFFNVGTRVAIKCKNSKFSEKAKLISPIKAKVELTENDKRLLGIFSEYVTWNRVSNVLSHIGSVTAKDVGRVSGLTMKDIIREAAREGHDLLFADNPSAVLKELTGLIQNTIRSKWHEVLE

SEQ ID NO: 2287 - DNA, 1038 bp, synthetic construct
  misc_feature 1..1038: note = variant of RNA ligase 2 from Klebsiella phage KP179
  source 1..1038: mol_type = other DNA
atgcatcaccatcaccatcacggtggcagcaacatgtttgcgtattattcaagtctggaaaaccataccaatgccaagttcattagcaagatccgtggtgcaggcttcctgatgcacaccgtggaatgggtagctcgcgagaagattcatggaacgaactttagcgttatcattactccgaccgaaatcgtgccagccaaacgcacagggccgatcttggaagatgagagcttctttggtcatgaaattatcatgaaaaaatatatggactccttcgtgaaggtgcagaacatgctgaatgcgatggatcttgttagcgtgcaaatctttggcgaatttgcgggtggtggcattcagaaaggcgtcgattacggagacaaagatttctatgtgtttgacatcctgtctgatagcgggaacgagaaagtttactgggatgactatcgcgtcgaatcgttttgcaccactgtgggtctgaaattagcgcctctgctgggacgtggtagtttcgctgaactgtcccagtacccaaacgatttcaaaagcctggtgaaccgttataatgaattggttgacacggtcggcctggagatggccaataaacacgtctttggtccgcaagcgtcttctgaaactggcctggcagaaggctacgttcttaaacccgtctatccgcgcttctttaatgtgggtacgcgcgtggcgattaaatgcaagaactccaaattttcggagaaagccaaactgatttcgccaattaaagcgaaggttgaactgacggagaacgataaacgtctgctcggaatcatgagcgaatatgttacctggaatcgcgtcagtaacgtactgtcacatattggctcagtgaccgccaaagattttgggcgtgtttcgggtctgacgatgaaagacatcattcgcgaagcagcacgcgaaggccatgatctgttgttcgctgataacccgtcggcggtgctgaaggagctgacaggcctcatccagaacacgattcgctccaaatggcacgaagttctggag

SEQ ID NO: 2288 - protein, 346 aa, synthetic construct
  REGION 1..346: note = variant of RNA ligase 2 from Klebsiella phage KP179
MHHHHHHGGSNMFAYYSSLENHTNAKFISKIRGAGFLMHTVEWVAREKIHGTNFSVIITPTEIVPAKRTGPILEDESFFGHEIIMKKYMDSFVKVQNMLNAMDLVSVQIFGEFAGGGIQKGVDYGDKDFYVFDILSDSGNEKVYWDDYRVESFCTTVGLKLAPLLGRGSFAELSQYPNDFKSLVNRYNELVDTVGLEMANKHVFGPQASSETGLAEGYVLKPVYPRFFNVGTRVAIKCKNSKFSEKAKLISPIKAKVELTENDKRLLGIMSEYVTWNRVSNVLSHIGSVTAKDFGRVSGLTMKDIIREAAREGHDLLFADNPSAVLKELTGLIQNTIRSKWHEVLE

SEQ ID NO: 2289 - DNA, 1038 bp, synthetic construct
  misc_feature 1..1038: note = variant of RNA ligase 2 from Klebsiella phage KP179
  source 1..1038: mol_type = other DNA
atgcatcaccatcaccatcacggtggcagcaacatgtttgcgtattattcaagtctggaaaaccataccaatgccaagttcattagcaagatccgtggtgcaggcttcctgatgcacaccgtggaatgggtagctcgcgagaagattcatggaacgaactttagcgttatcattactccgaccgaaatcgtgccagccaaacgcacagggccgatcttggaagatgagagcttctttggtcatgaaattatcatgaaaaaatatatggactccttcgtgaaggtgcagaacatgctgaatgcgatggatcttgttagcgtgcaaatctttggcgaatttgcgggtggtggcattcagaaaggcgtcgattacggagacaaagatttctatgtgtttgacatcctgtctgatagcgggaacgagaaagtttactgggatgactatcgcgtcgaatcgttttgcaccactgtgggtctgaaattagcgcctctgctgggacgtggtagtttcgctgaactgtcccagtacccaaacgatttcaaaagcctggtgaaccgttataatgaattggttgacacggtcggcctggagatggccaataaacacgtctttggtccgcaagcgtcttctgaaactggcctggcagaaggctacgttcttaaacccgtctatccgcgcttctttaatgtgggtacgcgcgtggcgattaaatgcaagaactccaaattttcggagaaagccaaactgatttcgccaattaaagcgaaggttgaactgacggagaacgattcgcgtctgctcggaatctttagcgaatatgttacctggaatcgcgtcagtaacgtactgtcacatattggctcagtgaccgccaaagattttgggcgtgtttcgggtctgacgatgaaagacatcattcgcgaagcagcacgcgaaggccatgatctgttgttcgctgataacccgtcggcggtgctgaaggagctgacaggcctcatccagaacacgattcgctccaaatggcacgaagttctggag

SEQ ID NO: 2290 - protein, 346 aa, synthetic construct
  REGION 1..346: note = variant of RNA ligase 2 from Klebsiella phage KP179
MHHHHHHGGSNMFAYYSSLENHTNAKFISKIRGAGFLMHTVEWVAREKIHGTNFSVIITPTEIVPAKRTGPILEDESFFGHEIIMKKYMDSFVKVQNMLNAMDLVSVQIFGEFAGGGIQKGVDYGDKDFYVFDILSDSGNEKVYWDDYRVESFCTTVGLKLAPLLGRGSFAELSQYPNDFKSLVNRYNELVDTVGLEMANKHVFGPQASSETGLAEGYVLKPVYPRFFNVGTRVAIKCKNSKFSEKAKLISPIKAKVELTENDSRLLGIFSEYVTWNRVSNVLSHIGSVTAKDFGRVSGLTMKDIIREAAREGHDLLFADNPSAVLKELTGLIQNTIRSKWHEVLE

SEQ ID NO: 2291 - DNA, 1038 bp, synthetic construct
  misc_feature 1..1038: note = variant of RNA ligase 2 from Klebsiella phage KP179
  source 1..1038: mol_type = other DNA
atgcatcaccatcaccatcacggtggcagcaacatgtttgcgtattattcaagtctggaaaaccataccaatgccaagttcattagcaagatccgtggtgcaggcttcctgatgcacaccgtggaatgggtagctcgcgagaagattcatggaacgaactttagcgttatcattactccgaccgaaatcgtgccagccaaacgcacagggccgatcttggaagatgagagcttctttggtcatgaaattatcatgaaaaaatatatggactccttcgtgaaggtgcagaacatgctgaatgcgatggatcttgttttggtgcaaatctttggcgaatttgcgggtggtggcattcagaaaggcgtcgattacggagacaaagatttctatgtgtttgacatcctgtctgatagcgggaacgagaaagtttactgggatgactatcgcgtcgaatcgttttgcaccactgtgggtctgaaattagcgcctctgctgggacgtggtagtttcgctgaactgtcccagtacccaaacgatttcaaaagcctggtgaaccgttataatgaattggttgacacggtcggcctggagatggccaataaacacgtctttggtccgcaagcgtcttctgaaactggcctggcagaaggctacgttcttaaacccgtctatccgcgcttctttaatgtgggtacgcgcgtggcgattaaatgcaagaactccaaattttcggagaaagccaaactgatttcgccaattaaagcgaaggttgaactgacggagaacgataaacgtctgctcggaatctttagcgaatatgttacctggaatcgcgtcagtaacgtactgtcacatattggctcagtgaccgccaaagattttgggcgtgtttcgggtctgacgatgaaagacatcattcgcgaagcagcacgcgaaggccatgatctgttgttcgctgataacccgtcggcggtgctgaaggagctgacaggcctcatccagaacacgattcgctccaaatggcacgaagttctggag

SEQ ID NO: 2292 - protein, 346 aa, synthetic construct
  REGION 1..346: note = variant of RNA ligase 2 from Klebsiella phage KP179
MHHHHHHGGSNMFAYYSSLENHTNAKFISKIRGAGFLMHTVEWVAREKIHGTNFSVIITPTEIVPAKRTGPILEDESFFGHEIIMKKYMDSFVKVQNMLNAMDLVLVQIFGEFAGGGIQKGVDYGDKDFYVFDILSDSGNEKVYWDDYRVESFCTTVGLKLAPLLGRGSFAELSQYPNDFKSLVNRYNELVDTVGLEMANKHVFGPQASSETGLAEGYVLKPVYPRFFNVGTRVAIKCKNSKFSEKAKLISPIKAKVELTENDKRLLGIFSEYVTWNRVSNVLSHIGSVTAKDFGRVSGLTMKDIIREAAREGHDLLFADNPSAVLKELTGLIQNTIRSKWHEVLE

SEQ ID NO: 2293 - DNA, 1038 bp, synthetic construct
  misc_feature 1..1038: note = variant of RNA ligase 2 from Klebsiella phage KP179
  source 1..1038: mol_type = other DNA
atgcatcaccatcaccatcacggtggcagcaacatgtttgcgtattattcaagtctggaaaaccataccaatgccaagttcattagcaagatccgtggtgcaggcttcctgatgcacaccgtggaatgggtagctcgcgagaagattcatggaacgaactttagcgttatcattactccgaccgaaatcgtgccagccaaacgcacagggccgatcttggaagatgagagcttctttggtcatgaaattatcatgaaaaaatatatggactccttcgtgaaggtgcagaacatgctgaatgcgatggatcttgttagcgtgcaaatctttggcgaatttgcgggtggtggcattcagaaaggcgtcgattacggagacaaagatttctatgtgtttgacatcctgtctgatagcgggaacgagaaagtttactgggatgactatcgcgtcgaatcgttttgcaccactgtgggtctgaaattagcgcctctgctgggacgtggtagtttcgctgaactgtcccagtacccaaacgatttcaaaagcctggtgaaccgttataatgaattggttgacacggtcggcctggagatggccaataaacacgtctttggtccgcaagcgtcttctgaaactggcctggcagaaggctacgttcttaaacccgtctatccgcgcttctttaatgtgggtacgcgcgtggcgattaaatgcaagaactccaaattttcggagaaagccaaactgatttcgccaattaaagcgaaggttgaactgacggagaacgataaacgtctgctcggaatctttagcgaatatgttacctggaatcgcgtcagtaacgtactgtcacatattggctcagtgaccgccaaagattttgggcgtgtttcgggtctgtttatgaaagacatcattcgcgaagcagcacgcgaaggccatgatctgttgttcgctgataacccgtcggcggtgctgaaggagctgacaggcctcatccagaacacgattcgctccaaatggcacgaagttctggag

SEQ ID NO: 2294 - protein, 346 aa, synthetic construct
  REGION 1..346: note = variant of RNA ligase 2 from Klebsiella phage KP179
MHHHHHHGGSNMFAYYSSLENHTNAKFISKIRGAGFLMHTVEWVAREKIHGTNFSVIITPTEIVPAKRTGPILEDESFFGHEIIMKKYMDSFVKVQNMLNAMDLVSVQIFGEFAGGGIQKGVDYGDKDFYVFDILSDSGNEKVYWDDYRVESFCTTVGLKLAPLLGRGSFAELSQYPNDFKSLVNRYNELVDTVGLEMANKHVFGPQASSETGLAEGYVLKPVYPRFFNVGTRVAIKCKNSKFSEKAKLISPIKAKVELTENDKRLLGIFSEYVTWNRVSNVLSHIGSVTAKDFGRVSGLFMKDIIREAAREGHDLLFADNPSAVLKELTGLIQNTIRSKWHEVLE

SEQ ID NO: 2295 - DNA, 1038 bp, synthetic construct
  misc_feature 1..1038: note = variant of RNA ligase 2 from Klebsiella phage KP179
  source 1..1038: mol_type = other DNA
atgcatcaccatcaccatcacggtggcagcaacatgtttgcgtattattcaagtctggaaaaccataccaatgccaagttcattagcaagatccgtggtgcaggcttcctgatgcacaccgtggaatgggtagctcgcgagaagattcatggaacgaactttagcgttatcattactccgaccgaaatcgtgccagccaaacgcacagggccgatcttggaagatgagagcttctttggtcatgaaattatcatgaaaaaatatatggactccttcgtgaaggtgcagaacatgctgaatgcgatggatcttgttagcgtgcaaatctttggcgaatttgcgggtggtggcattcagaaaggcgtcgattacggagacaaagatttctatgtgtttgacatcctgtctgatagcgggaacgagaaagtttactgggatgactatcgcgtcgaatcgttttgcaccactgtgggtctgaaattagcgcctctgctgggacgtggtagtttcgctgaactgtcccagtacccaaacgatttcaaaagcctggtgaaccgttataatgaattggttgacacggtcggcctggagatggccaataaacacgtctttggtccgcaagcgtcttctgaaactggcctggcagaaggctacgttcttaaacccgtctatccgcgcttctttaatgtgggtacgcgcgtggcgattaaatgcaagaactccaaattttcggagaaagccaaactgatttcgccaattaaagcgaaggttgaactgacggagaacgataaacgtctgctcggaatctttagcgaatatgttacctggaatcgcgtcagtaacgtactgtcacatattggctcagtgaccgccaaagattttttgcgtgtttcgggtctgacgatgaaagacatcattcgcgaagcagcacgcgaaggccatgatctgttgttcgctgataacccgtcggcggtgctgaaggagctgacaggcctcatccagaacacgattcgctccaaatggcacgaagttctggag

SEQ ID NO: 2296 - protein, 346 aa, synthetic construct
  REGION 1..346: note = variant of RNA ligase 2 from Klebsiella phage KP179
MHHHHHHGGSNMFAYYSSLENHTNAKFISKIRGAGFLMHTVEWVAREKIHGTNFSVIITPTEIVPAKRTGPILEDESFFGHEIIMKKYMDSFVKVQNMLNAMDLVSVQIFGEFAGGGIQKGVDYGDKDFYVFDILSDSGNEKVYWDDYRVESFCTTVGLKLAPLLGRGSFAELSQYPNDFKSLVNRYNELVDTVGLEMANKHVFGPQASSETGLAEGYVLKPVYPRFFNVGTRVAIKCKNSKFSEKAKLISPIKAKVELTENDKRLLGIFSEYVTWNRVSNVLSHIGSVTAKDFLRVSGLTMKDIIREAAREGHDLLFADNPSAVLKELTGLIQNTIRSKWHEVLE

SEQ ID NO: 2297 - DNA, 1038 bp, synthetic construct
  misc_feature 1..1038: note = variant of RNA ligase 2 from Klebsiella phage KP179
  source 1..1038: mol_type = other DNA
atgcatcaccatcaccatcacggtggcagcaacatgtttgcgtattattcaagtctggaaaaccataccaatgccaagttcattagcaagatccgtggtgcaggcttcctgatgcacaccgtggaatgggtagctcgcgagaagattcatggaacgaactttagcgttatcattactccgaccgaaatcgtgccagccaaacgcacagggccgatcttggaagatgagagcttctttggtcatgaaattatcatgaaaaaatatatggactccttcgtgaaggtgcagaacatgctgaatgcgatggatcttgttagcgtgcaaatctttggcgaatttgcgggtggtggcattcagaaaggcctggattacggagacaaagatttctatgtgtttgacatcctgtctgatagcgggaacgagaaagtttactgggatgactatcgcgtcgaatcgttttgcaccactgtgggtctgaaattagcgcctctgctgggacgtggtagtttcgctgaactgtcccagtacccaaacgatttcaaaagcctggtgaaccgttataatgaattggttgacacggtcggcctggagatggccaataaacacgtctttggtccgcaagcgtcttctgaaactggcctggcagaaggctacgttcttaaacccgtctatccgcgcttctttaatgtgggtacgcgcgtggcgattaaatgcaagaactccaaattttcggagaaagccaaactgatttcgccaattaaagcgaaggttgaactgacggagaacgataaacgtctgctcggaatctttagcgaatatgttacctggaatcgcgtcagtaacgtactgtcacatattggctcagtgaccgccaaagattttgggcgtgtttcgggtctgacgatgaaagacatcattcgcgaagcagcacgcgaaggccatgatctgttgttcgctgataacccgtcggcggtgctgaaggagctgacaggcctcatccagaacacgattcgctccaaatggcacgaagttctggag

SEQ ID NO: 2298 - protein, 346 aa, synthetic construct
  REGION 1..346: note = variant of RNA ligase 2 from Klebsiella phage KP179
MHHHHHHGGSNMFAYYSSLENHTNAKFISKIRGAGFLMHTVEWVAREKIHGTNFSVIITPTEIVPAKRTGPILEDESFFGHEIIMKKYMDSFVKVQNMLNAMDLVSVQIFGEFAGGGIQKGLDYGDKDFYVFDILSDSGNEKVYWDDYRVESFCTTVGLKLAPLLGRGSFAELSQYPNDFKSLVNRYNELVDTVGLEMANKHVFGPQASSETGLAEGYVLKPVYPRFFNVGTRVAIKCKNSKFSEKAKLISPIKAKVELTENDKRLLGIFSEYVTWNRVSNVLSHIGSVTAKDFGRVSGLTMKDIIREAAREGHDLLFADNPSAVLKELTGLIQNTIRSKWHEVLE

SEQ ID NO: 2299 - DNA, 1038 bp, synthetic construct
  misc_feature 1..1038: note = variant of RNA ligase 2 from Klebsiella phage KP179
  source 1..1038: mol_type = other DNA
atgcatcaccatcaccatcacggtggcagcaacatgtttgcgtattattcaagtctggaaaaccataccaatgccaagttcattagcaagatccgtggtgcaggcttcctgatgcacaccgtggaatgggtagctcgcgagaagattcatggaacgaactttagcgttatcattactccgaccgaaatcgtgccagccaaacgcacagggccgatcttggaagatgagagcttctttggtcatgaaattatcatgaaaaaatatatggactccttcgtgaaggtgcagaacatgctgaatgcgatggatcttgttagggtgcaaatctttggcgaatttgcgggtggtggcattcagaaaggcgtcgattacggagacaaagatttctatgtgtttgacatcctgtctgatagcgggaacgagaaagtttactgggatgactatcgcgtcgaatcgttttgcaccactgtgggtctgaaattagcgcctctgctgggacgtggtagtttcgctgaactgtcccagtacccaaacgatttcaaaagcctggtgaaccgttataatgaattggttgacacggtcggcctggagatggccaataaacacgtctttggtccgcaagcgtcttctgaaactggcctggcagaaggctacgttcttaaacccgtctatccgcgcttctttaatgtgggtacgcgcgtggcgattaaatgcaagaactccaaattttcggagaaagccaaactgatttcgccaattaaagcgaaggttgaactgacggagaacgataaacgtctgctcggaatctttagcgaatatgttacctggaatcgcgtcagtaacgtactgtcacatattggctcagtgaccgccaaagattttgggcgtgtttcgggtctgacgatgaaagacatcattcgcgaagcagcacgcgaaggccatgatctgttgttcgctgataacccgtcggcggtgctgaaggagctgacaggcctcatccagaacacgattcgctccaaatggcacgaagttctggag

SEQ ID NO: 2300 - protein, 346 aa, synthetic construct
  REGION 1..346: note = variant of RNA ligase 2 from Klebsiella phage KP179
MHHHHHHGGSNMFAYYSSLENHTNAKFISKIRGAGFLMHTVEWVAREKIHGTNFSVIITPTEIVPAKRTGPILEDESFFGHEIIMKKYMDSFVKVQNMLNAMDLVRVQIFGEFAGGGIQKGVDYGDKDFYVFDILSDSGNEKVYWDDYRVESFCTTVGLKLAPLLGRGSFAELSQYPNDFKSLVNRYNELVDTVGLEMANKHVFGPQASSETGLAEGYVLKPVYPRFFNVGTRVAIKCKNSKFSEKAKLISPIKAKVELTENDKRLLGIFSEYVTWNRVSNVLSHIGSVTAKDFGRVSGLTMKDIIREAAREGHDLLFADNPSAVLKELTGLIQNTIRSKWHEVLE

SEQ ID NO: 2301 - DNA, 1038 bp, synthetic construct
  misc_feature 1..1038: note = variant of RNA ligase 2 from Klebsiella phage KP179
  source 1..1038: mol_type = other DNA
atgcatcaccatcaccatcacggtggcagcaacatgtttgcgtattattcaagtctggaaaaccataccaatgccaagttcattagcaagatccgtggtgcaggcttcctgatgcacaccgtggaatgggtagctcgcgagaagattcatggaacgaactttagcgttatcattactccgaccgaaatcgtgccagccaaacgcacagggccgatcttggaagatgagagcttctttggtcatgaaattatcatgaaaaaatatatggactccttcgtgaaggtgcagaacatgctgaatgcgatggatcttgttagcgtgcaaatctttggcgaatttgcgggtggtggcattcagaaaggcgtcgattacggagacaaagatttctatgtgtttgacatcctgtctgatagcgggaacgagaaagtttactgggatgactatcgcgtcgaatcgttttgcaccactgtgggtctgaaattagcgcctctgctgggacgtggtagtttcgctgaactgtcccagtacccaaacgatttcaaaagcctggtgaaccgttataatgaattggttgacacggtcggcctggagatggccaataaacacgtctttggtccgcaagcgtcttctgaaactggcctggcagaaggctacgttcttaaacccgtctatccgcgcttctttaatgtgggtacgcgcgtggcgattaaatgcaagaactccaaattttcggagaaagccaaactgatttcgccaattaaagcgaaggttgaactgacggagaacgataaacgtctgctcggaatctttagcgaatatgttacctggaatcgcgtcaataacgtactgtcacatattggctcagtgaccgccaaagattttgggcgtgtttcgggtctgacgatgaaagacatcattcgcgaagcagcacgcgaaggccatgatctgttgttcgctgataacccgtcggcggtgctgaaggagctgacaggcctcatccagaacacgattcgctccaaatggcacgaagttctggag

SEQ ID NO: 2302 - protein, 346 aa, synthetic construct
  REGION 1..346: note = variant of RNA ligase 2 from Klebsiella phage KP179
MHHHHHHGGSNMFAYYSSLENHTNAKFISKIRGAGFLMHTVEWVAREKIHGTNFSVIITPTEIVPAKRTGPILEDESFFGHEIIMKKYMDSFVKVQNMLNAMDLVSVQIFGEFAGGGIQKGVDYGDKDFYVFDILSDSGNEKVYWDDYRVESFCTTVGLKLAPLLGRGSFAELSQYPNDFKSLVNRYNELVDTVGLEMANKHVFGPQASSETGLAEGYVLKPVYPRFFNVGTRVAIKCKNSKFSEKAKLISPIKAKVELTENDKRLLGIFSEYVTWNRVNNVLSHIGSVTAKDFGRVSGLTMKDIIREAAREGHDLLFADNPSAVLKELTGLIQNTIRSKWHEVLE

SEQ ID NO: 2303 - DNA, 1038 bp, synthetic construct
  misc_feature 1..1038: note = variant of RNA ligase 2 from Klebsiella phage KP179
  source 1..1038: mol_type = other DNA
atgcatcaccatcaccatcacggtggcagcaacatgtttgcgtattattcaagtctggaaaaccataccaatgccaagttcattagcaagatccgtggtgcaggcttcctgatgcacaccgtggaatgggtagctcgcgagaagattcatggaacgaactttagcgttatcattactccgaccgaaatcgtgccagccaaacgcacagggccgatcttggaagatgagagcttctttggtcatgaaattatcatgaaaaaatatatggactccttcgtgaaggtgcagaacatgctgaatgcgatggatcttgttagcgtgcaaatctttggcgaatttgcgggtggtggcattcagaaaggcgtcgattacggagacaaagatttctatgtgtttgacatcctgtctgatagcgggaacgagaaagtttactgggatgactatcgcgtcgaatcgttttgcaccactgtgggtctgaaattagcgcctctgctgggacgtggtagtttcgctgaactgtcccagtacccaaacgatttcaaaagcctggtgaaccgttataatgaattggttgacacggtcggcctggagatggccaataaacacgtctttggtccgcaagcgtcttctgaaactggcctggcagaaggctacgttcttaaacccgtctatccgcgcttctttaatgtgggtacgcgcgtggcgattaaatgcaagaactccaaattttcggagaaagccaaactgatttcgccaattaaagcgaaggttgaactgacggagaacgataaacgtctgctcggaatctttagcgaatatgttaccggtaatcgcgtcagtaacgtactgtcacatattggctcagtgaccgccaaagattttgggcgtgtttcgggtctgacgatgaaagacatcattcgcgaagcagcacgcgaaggccatgatctgttgttcgctgataacccgtcggcggtgctgaaggagctgacaggcctcatccagaacacgattcgctccaaatggcacgaagttctggag

SEQ ID NO: 2304 - protein, 346 aa, synthetic construct
  REGION 1..346: note = variant of RNA ligase 2 from Klebsiella phage KP179
MHHHHHHGGSNMFAYYSSLENHTNAKFISKIRGAGFLMHTVEWVAREKIHGTNFSVIITPTEIVPAKRTGPILEDESFFGHEIIMKKYMDSFVKVQNMLNAMDLVSVQIFGEFAGGGIQKGVDYGDKDFYVFDILSDSGNEKVYWDDYRVESFCTTVGLKLAPLLGRGSFAELSQYPNDFKSLVNRYNELVDTVGLEMANKHVFGPQASSETGLAEGYVLKPVYPRFFNVGTRVAIKCKNSKFSEKAKLISPIKAKVELTENDKRLLGIFSEYVTGNRVSNVLSHIGSVTAKDFGRVSGLTMKDIIREAAREGHDLLFADNPSAVLKELTGLIQNTIRSKWHEVLE

SEQ ID NO: 2305 - DNA, 1038 bp, synthetic construct
  misc_feature 1..1038: note = variant of RNA ligase 2 from Klebsiella phage KP179
  source 1..1038: mol_type = other DNA
atgcatcaccatcaccatcacggtggcagcaacatgtttgcgtattattcaagtctggaaaaccataccaatgccaagttcattagcaagatccgtggtgcaggcttcctgatgcacaccgtggaatgggtagctcgcgagaagattcatggaacgaactttagcgttatcattactccgaccgaaatcgtgccagccaaacgcacagggccgatcttggaagatgagagcttctttggtcatgaaattatcatgaaaaaatatatggactccttcgtgaaggtgcagaacatgctgaatgcgatggatcttgttagcgtgcaaatctttggcgaatttgcgggtggtggcattcagaaaggcgtcgattacggagacaaagatttctatgtgtttgacatcctgtctgatagcgggaacgagaaagtttactgggatgactatcgcgtcgaatcgttttgcaccactgtgggtctgaaattagcgcctctgctgggacgtggtagtttcgctgaactgtcccagtacccaaacgatttcaaaagcctggtgaaccgttataatgaattggttgacacggtcggcctggagatggccaataaacacgtctttggtccgcaagcgtcttctgaaactggcctggcagaaggctacgttcttaaacccgtctatccgcgcttctttaatgtgggtacgcgcgtggcgattaaatgcaagaactccaaattttcggagaaagccaaactgatttcgccaattaaagcgaaggttgaactgacggagaacgataaacgtctgctcggaatctttagcgaatatgttacctggaatcgcgtcagtaacgtactgtcacatattggctcagtgaccgccaaagattttgggcgtgtttcgggtctgacgatgaaagacatcattcgcgaagcacatcgcgaaggccatgatctgttgttcgctgataacccgtcggcggtgctgaaggagctgacaggcctcatccagaacacgattcgctccaaatggcacgaagttctggag

SEQ ID NO: 2306 - protein, 346 aa, synthetic construct
  REGION 1..346: note = variant of RNA ligase 2 from Klebsiella phage KP179
MHHHHHHGGSNMFAYYSSLENHTNAKFISKIRGAGFLMHTVEWVAREKIHGTNFSVIITPTEIVPAKRTGPILEDESFFGHEIIMKKYMDSFVKVQNMLNAMDLVSVQIFGEFAGGGIQKGVDYGDKDFYVFDILSDSGNEKVYWDDYRVESFCTTVGLKLAPLLGRGSFAELSQYPNDFKSLVNRYNELVDTVGLEMANKHVFGPQASSETGLAEGYVLKPVYPRFFNVGTRVAIKCKNSKFSEKAKLISPIKAKVELTENDKRLLGIFSEYVTWNRVSNVLSHIGSVTAKDFGRVSGLTMKDIIREAHREGHDLLFADNPSAVLKELTGLIQNTIRSKWHEVLE

SEQ ID NO: 2307 - DNA, 1038 bp, synthetic construct
  misc_feature 1..1038: note = variant of RNA ligase 2 from Klebsiella phage KP179
  source 1..1038: mol_type = other DNA
atgcatcaccatcaccatcacggtggcagcaacatgtttgcgtattattcaagtctggaaaaccataccaatgccaagttcattagcaagatccgtggtgcaggcttcctgatgcacaccgtggaatgggtagctcgcgagaagattcatggaacgaactttagcgttatcattactccgaccgaaatcgtgccagccaaacgcacagggccgatcttggaagatgagagcttctttggtcatgaaattatcatgaaaaaatatatggactccttcgtgaaggtgcagaacatgctgaatgcgatggatcttgttagcgtgcaaatctttggcgaatttgcgggtggtggcattcagaaaggcgtcgattacggagacaaagatttctatgtgtttgacatcctgtctgatagcgggaacgagaaagtttactgggatgactatcgcgtcgaatcgttttgcaccactgtgggtctgaaattagcgcctctgctgggacgtggtagtttcgctgaactgtcccagtacccaaacgatttcaaaagcctggtgaaccgttataatgaattggttgacacggtcggcctggagatggccaataaacacgtctttggtccgcaaaagtcttctgaaactggcctggcagaaggctacgttcttaaacccgtctatccgcgcttctttaatgtgggtacgcgcgtggcgattaaatgcaagaactccaaattttcggagaaagccaaactgatttcgccaattaaagcgaaggttgaactgacggagaacgataaacgtctgctcggaatctttagcgaatatgttacctggaatcgcgtcagtaacgtactgtcacatattggctcagtgaccgccaaagattttgggcgtgtttcgggtctgacgatgaaagacatcattcgcgaagcagcacgcgaaggccatgatctgttgttcgctgataacccgtcggcggtgctgaaggagctgacaggcctcatccagaacacgattcgctccaaatggcacgaagttctggag

SEQ ID NO: 2308 - protein, 346 aa, synthetic construct
  REGION 1..346: note = variant of RNA ligase 2 from Klebsiella phage KP179
MHHHHHHGGSNMFAYYSSLENHTNAKFISKIRGAGFLMHTVEWVAREKIHGTNFSVIITPTEIVPAKRTGPILEDESFFGHEIIMKKYMDSFVKVQNMLNAMDLVSVQIFGEFAGGGIQKGVDYGDKDFYVFDILSDSGNEKVYWDDYRVESFCTTVGLKLAPLLGRGSFAELSQYPNDFKSLVNRYNELVDTVGLEMANKHVFGPQKSSETGLAEGYVLKPVYPRFFNVGTRVAIKCKNSKFSEKAKLISPIKAKVELTENDKRLLGIFSEYVTWNRVSNVLSHIGSVTAKDFGRVSGLTMKDIIREAAREGHDLLFADNPSAVLKELTGLIQNTIRSKWHEVLE

SEQ ID NO: 2309 - DNA, 1038 bp, synthetic construct
  misc_feature 1..1038: note = variant of RNA ligase 2 from Klebsiella phage KP179
  source 1..1038: mol_type = other DNA
atgcatcaccatcaccatcacggtggcagcaacatgtttgcgtattattcaagtctggaaaaccataccaatgccaagttcattagcaagatccgtggtgcaggcttcctgatgcacaccgtggaatgggtagctcgcgagaagattcatggaacgaactttagcgttatcattactccgaccgaaatcgtgccagccaaacgcacagggccgatcttggaagatgagagcttctttggtcatgaaattatcatgaaaaaatatatggactccttcgtgaaggtgcagaacatgctgaatgcgatggatcttgttcaggtgcaaatctttggcgaatttgcgggtggtggcattcagaaaggcgtcgattacggagacaaagatttctatgtgtttgacatcctgtctgatagcgggaacgagaaagtttactgggatgactatcgcgtcgaatcgttttgcaccactgtgggtctgaaattagcgcctctgctgggacgtggtagtttcgctgaactgtcccagtacccaaacgatttcaaaagcctggtgaaccgttataatgaattggttgacacggtcggcctggagatggccaataaacacgtctttggtccgcaagcgtcttctgaaactggcctggcagaaggctacgttcttaaacccgtctatccgcgcttctttaatgtgggtacgcgcgtggcgattaaatgcaagaactccaaattttcggagaaagccaaactgatttcgccaattaaagcgaaggttgaactgacggagaacgataaacgtctgctcggaatctttagcgaatatgttacctggaatcgcgtcagtaacgtactgtcacatattggctcagtgaccgccaaagattttgggcgtgtttcgggtctgacgatgaaagacatcattcgcgaagcagcacgcgaaggccatgatctgttgttcgctgataacccgtcggcggtgctgaaggagctgacaggcctcatccagaacacgattcgctccaaatggcacgaagttctggag

SEQ ID NO: 2310 - protein, 346 aa, synthetic construct
  REGION 1..346: note = variant of RNA ligase 2 from Klebsiella phage KP179
MHHHHHHGGSNMFAYYSSLENHTNAKFISKIRGAGFLMHTVEWVAREKIHGTNFSVIITPTEIVPAKRTGPILEDESFFGHEIIMKKYMDSFVKVQNMLNAMDLVQVQIFGEFAGGGIQKGVDYGDKDFYVFDILSDSGNEKVYWDDYRVESFCTTVGLKLAPLLGRGSFAELSQYPNDFKSLVNRYNELVDTVGLEMANKHVFGPQASSETGLAEGYVLKPVYPRFFNVGTRVAIKCKNSKFSEKAKLISPIKAKVELTENDKRLLGIFSEYVTWNRVSNVLSHIGSVTAKDFGRVSGLTMKDIIREAAREGHDLLFADNPSAVLKELTGLIQNTIRSKWHEVLE

SEQ ID NO: 2311 - DNA, 1038 bp, synthetic construct
  misc_feature 1..1038: note = variant of RNA ligase 2 from Klebsiella phage KP179
  source 1..1038: mol_type = other DNA
atgcatcaccatcaccatcacggtggcagcaacatgtttgcgtattattcaagtctggaaaaccataccaatgccaagttcattagcaagatccgtggtgcaggcttcctgatgcacaccgtggaatgggtagctcgcgagaagattcatggaacgaactttagcgttatcatgactccgaccgaaatcgtgccagccaaacgcacagggccgatcttggaagatgagagcttctttggtcatgaaattatcatgaaaaaatatatggactccttcgtgaaggtgcagaacatgctgaatgcgatggatcttgttagcgtgcaaatctttggcgaatttgcgggtggtggcattcagaaaggcgtcgattacggagacaaagatttctatgtgtttgacatcctgtctgatagcgggaacgagaaagtttactgggatgactatcgcgtcgaatcgttttgcaccactgtgggtctgaaattagcgcctctgctgggacgtggtagtttcgctgaactgtcccagtacccaaacgatttcaaaagcctggtgaaccgttataatgaattggttgacacggtcggcctggagatggccaataaacacgtctttggtccgcaagcgtcttctgaaactggcctggcagaaggctacgttcttaaacccgtctatccgcgcttctttaatgtgggtacgcgcgtggcgattaaatgcaagaactccaaattttcggagaaagccaaactgatttcgccaattaaagcgaaggttgaactgacggagaacgataaacgtctgctcggaatctttagcgaatatgttacctggaatcgcgtcagtaacgtactgtcacatattggctcagtgaccgccaaagattttgggcgtgtttcgggtctgacgatgaaagacatcattcgcgaagcagcacgcgaaggccatgatctgttgttcgctgataacccgtcggcggtgctgaaggagctgacaggcctcatccagaacacgattcgctccaaatggcacgaagttctggag

SEQ ID NO: 2312 - protein, 346 aa, synthetic construct
  REGION 1..346: note = variant of RNA ligase 2 from Klebsiella phage KP179
MHHHHHHGGSNMFAYYSSLENHTNAKFISKIRGAGFLMHTVEWVAREKIHGTNFSVIMTPTEIVPAKRTGPILEDESFFGHEIIMKKYMDSFVKVQNMLNAMDLVSVQIFGEFAGGGIQKGVDYGDKDFYVFDILSDSGNEKVYWDDYRVESFCTTVGLKLAPLLGRGSFAELSQYPNDFKSLVNRYNELVDTVGLEMANKHVFGPQASSETGLAEGYVLKPVYPRFFNVGTRVAIKCKNSKFSEKAKLISPIKAKVELTENDKRLLGIFSEYVTWNRVSNVLSHIGSVTAKDFGRVSGLTMKDIIREAAREGHDLLFADNPSAVLKELTGLIQNTIRSKWHEVLE

SEQ ID NO: 2313 - DNA, 1038 bp, synthetic construct
  misc_feature 1..1038: note = variant of RNA ligase 2 from Klebsiella phage KP179
  source 1..1038: mol_type = other DNA
atgcatcaccatcaccatcacggtggcagcaacatgtttgcgtattattcaagtctggaaaaccataccaatgccaagttcattagcaagatccgtggtgcaggcttcctgatgcacaccgtggaatgggtagctcgcgagaagattcatggaacgaactttagcgttatcattactccgaccgaaatcgtgccagccaaacgcacagggccgatcttggaagatgagagcttctttggtcatgaaattatcatgaaaaaatatatggactccttcgtgaaggtgcagaacatgctgaatgcgatggatcttgttagcgtgcaaatctttggcgaatttgcgggtggtggcattcagaaaggcgtcgattacggagacaaagatttctatgtgtttgacatcctgtctgatagcgggaacgagaaagtttactgggatgactatcgcgtcgaatcgttttgcaccactgtgggtctgaaattagcgcctctgctgggacgtggtagtttcgctgaactgtcccagtacccaaacgatttcaaaagcctggtgaaccgttataatgaattggttgacacggtcggcctggagatggccaataaacacgtctttggtccgcaagcgtcttctgaaactggcctggcagaaggctacgttcttaaacccgtctatccgcgcttctttaatgtgggtacgcgcgtggcgattaaatgcaagaactccaaattttcggagaaagccaaactgatttcgccaattaaagcgaaggttgaactgacggagaacgataaacgtctgctcggaatctttagcgaatatgttacctggaatcgcgtcagtaacgtactgtcacatattggctcagtgaccgccaaagatttttatcgtgtttcgggtctgacgatgaaagacatcattcgcgaagcagcacgcgaaggccatgatctgttgttcgctgataacccgtcggcggtgctgaaggagctgacaggcctcatccagaacacgattcgctccaaatggcacgaagttctggag

SEQ ID NO: 2314 - protein, 346 aa, synthetic construct
  REGION 1..346: note = variant of RNA ligase 2 from Klebsiella phage KP179
MHHHHHHGGSNMFAYYSSLENHTNAKFISKIRGAGFLMHTVEWVAREKIHGTNFSVIITPTEIVPAKRTGPILEDESFFGHEIIMKKYMDSFVKVQNMLNAMDLVSVQIFGEFAGGGIQKGVDYGDKDFYVFDILSDSGNEKVYWDDYRVESFCTTVGLKLAPLLGRGSFAELSQYPNDFKSLVNRYNELVDTVGLEMANKHVFGPQASSETGLAEGYVLKPVYPRFFNVGTRVAIKCKNSKFSEKAKLISPIKAKVELTENDKRLLGIFSEYVTWNRVSNVLSHIGSVTAKDFYRVSGLTMKDIIREAAREGHDLLFADNPSAVLKELTGLIQNTIRSKWHEVLE

SEQ ID NO: 2315 - DNA, 1038 bp, synthetic construct
  misc_feature 1..1038: note = variant of RNA ligase 2 from Klebsiella phage KP179
  source 1..1038: mol_type = other DNA
atgcatcaccatcaccatcacggtggcagcaacatgtttgcgtattattcaagtctggaaaaccataccaatgccaagttcattagcaagatccgtggtgcaggcttcctgatgcacaccgtggaatgggtagctcgcgagaagattcatggaacgaactttagcgttatcattactccgaccgaaatcgtgccagccaaacgcacagggccgatcttggaagatgagagcttctttggtcatgaaattatcatgaaaaaatatatggactccttcgtgaaggtgcagaacatgctgaatgcgatggatcttgttagcgtgcaaatctttggcgaatttgcgggtggtggcattcagaaaggcgtcgattacggagacaaagatttctatgtgtttgacatcctgtctgatagcgggaacgagaaagtttactgggatgactatcgcgtcgaatcgttttgcaccactgtgggtctgaaattagcgcctctgctgggacgtggtagtttcgctgaactgtcccagtacccaaacgatttcaaaagcctggtgaaccgttataatgaattggttgacacggtcggcctggagatggccaataaacacgtctttggtccgcaagcgtcttctgaaactggcctggcagaaggctacgttcttaaacccgtctatccgcgcttctttaatgtgggtacgcgcgtggcgattaaatgcaagaactccaaattttcggagaaagccaaactgatttcgccaattaaagcgaaggttgaactgacggagaacgataaacgtctgctcggaatctttagcgaatatgttacctggaatcgcgtcagtaacgtactgtcacatattggctcagtgacctggaaagattttgggcgtgtttcgggtctgacgatgaaagacatcattcgcgaagcagcacgcgaaggccatgatctgttgttcgctgataacccgtcggcggtgctgaaggagctgacaggcctcatccagaacacgattcgctccaaatggcacgaagttctggag

SEQ ID NO: 2316 - protein, 346 aa, synthetic construct
  REGION 1..346: note = variant of RNA ligase 2 from Klebsiella phage KP179
MHHHHHHGGSNMFAYYSSLENHTNAKFISKIRGAGFLMHTVEWVAREKIHGTNFSVIITPTEIVPAKRTGPILEDESFFGHEIIMKKYMDSFVKVQNMLNAMDLVSVQIFGEFAGGGIQKGVDYGDKDFYVFDILSDSGNEKVYWDDYRVESFCTTVGLKLAPLLGRGSFAELSQYPNDFKSLVNRYNELVDTVGLEMANKHVFGPQASSETGLAEGYVLKPVYPRFFNVGTRVAIKCKNSKFSEKAKLISPIKAKVELTENDKRLLGIFSEYVTWNRVSNVLSHIGSVTWKDFGRVSGLTMKDIIREAAREGHDLLFADNPSAVLKELTGLIQNTIRSKWHEVLE

SEQ ID NO: 2317 - DNA, 1038 bp, synthetic construct
  misc_feature 1..1038: note = variant of RNA ligase 2 from Klebsiella phage KP179
  source 1..1038: mol_type = other DNA
atgcatcaccatcaccatcacggtggcagcaacatgtttgcgtattattcaagtctggaaaaccataccaatgccaagttcattagcaagatccgtggtgcaggcttcctgatgcacaccgtggaatgggtagctcgcgagaagattcatggaacgaactttagcgttatcattactccgaccgaaatcgtgccagccaaacgcacagggccgatcttggaagatgagagcttctttggtcatgaaattatcatgaaaaaatatatggactccttcgtgaaggtgcagaacatgctgaatgcgatggatcttgttagcgtgcaaatctttggcgaatttgcgggtggtggcattcagaaaggcgtcgattacggagacaaagatttctatgtgtttgacatcctgtctgatagcgggaacgagaaagtttactgggatgactatcgcgtcgaatcgttttgcaccactgtgggtctgaaattagcgcctctgctgggacgtggtagtttcgctgaactgtcccagtacccaaacgatttcaaaagcctggtgaaccgttataatgaattggttgacacggtcggcctggagatggccaataaacacgtctttggtccgcaaacgtcttctgaaactggcctggcagaaggctacgttcttaaacccgtctatccgcgcttctttaatgtgggtacgcgcgtggcgattaaatgcaagaactccaaattttcggagaaagccaaactgatttcgccaattaaagcgaaggttgaactgacggagaacgataaacgtctgctcggaatctttagcgaatatgttacctggaatcgcgtcagtaacgtactgtcacatattggctcagtgaccgccaaagattttgggcgtgtttcgggtctgacgatgaaagacatcattcgcgaagcagcacgcgaaggccatgatctgttgttcgctgataacccgtcggcggtgctgaaggagctgacaggcctcatccagaacacgattcgctccaaatggcacgaagttctggag

SEQ ID NO: 2318 - protein, 346 aa, synthetic construct
  REGION 1..346: note = variant of RNA ligase 2 from Klebsiella phage KP179
MHHHHHHGGSNMFAYYSSLENHTNAKFISKIRGAGFLMHTVEWVAREKIHGTNFSVIITPTEIVPAKRTGPILEDESFFGHEIIMKKYMDSFVKVQNMLNAMDLVSVQIFGEFAGGGIQKGVDYGDKDFYVFDILSDSGNEKVYWDDYRVESFCTTVGLKLAPLLGRGSFAELSQYPNDFKSLVNRYNELVDTVGLEMANKHVFGPQTSSETGLAEGYVLKPVYPRFFNVGTRVAIKCKNSKFSEKAKLISPIKAKVELTENDKRLLGIFSEYVTWNRVSNVLSHIGSVTAKDFGRVSGLTMKDIIREAAREGHDLLFADNPSAVLKELTGLIQNTIRSKWHEVLE

SEQ ID NO: 2319 - DNA, 1038 bp, synthetic construct
  misc_feature 1..1038: note = variant of RNA ligase 2 from Klebsiella phage KP179
  source 1..1038: mol_type = other DNA
atgcatcaccatcaccatcacggtggcagcaacatgtttgcgtattattcaagtctggaaaaccataccaatgccaagttcattagcaagatccgtggtgcaggcttcctgatgcacaccgtggaatgggtagctcgcgagaagattcatggaacgaactttagcgttatcattactccgaccgaaatcgtgccagccaaacgcacagggccgatcttggaagatgagagcttctttggtcatgaaattatcatgaaaaaatatatggactccttcgtgaaggtgcagaacatgctgaatgcgatggatcttgttagcgtgcaaatctttggcgaatttgcgggtggtggcattcagaaaggcgtcgattacggagacaaagatttctatgtgtttgacatcgtgtctgatagcgggaacgagaaagtttactgggatgactatcgcgtcgaatcgttttgcaccactgtgggtctgaaattagcgcctctgctgggacgtggtagtttcgctgaactgtcccagtacccaaacgatttcaaaagcctggtgaaccgttataatgaattggttgacacggtcggcctggagatggccaataaacacgtctttggtccgcaagcgtcttctgaaactggcctggcagaaggctacgttcttaaacccgtctatccgcgcttctttaatgtgggtacgcgcgtggcgattaaatgcaagaactccaaattttcggagaaagccaaactgatttcgccaattaaagcgaaggttgaactgacggagaacgataaacgtctgctcggaatctttagcgaatatgttacctggaatcgcgtcagtaacgtactgtcacatattggctcagtgaccgccaaagattttgggcgtgtttcgggtctgacgatgaaagacatcattcgcgaagcagcacgcgaaggccatgatctgttgttcgctgataacccgtcggcggtgctgaaggagctgacaggcctcatccagaacacgattcgctccaaatggcacgaagttctggag

SEQ ID NO: 2320 - protein, 346 aa, synthetic construct
  REGION 1..346: note = variant of RNA ligase 2 from Klebsiella phage KP179
MHHHHHHGGSNMFAYYSSLENHTNAKFISKIRGAGFLMHTVEWVAREKIHGTNFSVIITPTEIVPAKRTGPILEDESFFGHEIIMKKYMDSFVKVQNMLNAMDLVSVQIFGEFAGGGIQKGVDYGDKDFYVFDIVSDSGNEKVYWDDYRVESFCTTVGLKLAPLLGRGSFAELSQYPNDFKSLVNRYNELVDTVGLEMANKHVFGPQASSETGLAEGYVLKPVYPRFFNVGTRVAIKCKNSKFSEKAKLISPIKAKVELTENDKRLLGIFSEYVTWNRVSNVLSHIGSVTAKDFGRVSGLTMKDIIREAAREGHDLLFADNPSAVLKELTGLIQNTIRSKWHEVLE

SEQ ID NO: 2321 - DNA, 1038 bp, synthetic construct
  misc_feature 1..1038: note = variant of RNA ligase 2 from Klebsiella phage KP179
  source 1..1038: mol_type = other DNA
atgcatcaccatcaccatcacggtggcagcaacatgtttgcgtattattcaagtctggaaaaccataccaatgccaagttcattagcaagatccgtggtgcaggcttcctgatgcacaccgtggaatgggtaagtcgcgagaagattcatggaacgaactttagcgttatcattactccgaccgaaatcgtgccagccaaacgcacagggccgatcttggaagatgagagcttctttggtcatgaaattatcatgaaaaaatatatggactccttcgtgaaggtgcagaacatgctgaatgcgatggatcttgttagcgtgcaaatctttggcgaatttgcgggtggtggcattcagaaaggcgtcgattacggagacaaagatttctatgtgtttgacatcctgtctgatagcgggaacgagaaagtttactgggatgactatcgcgtcgaatcgttttgcaccactgtgggtctgaaattagcgcctctgctgggacgtggtagtttcgctgaactgtcccagtacccaaacgatttcaaaagcctggtgaaccgttataatgaattggttgacacggtcggcctggagatggccaataaacacgtctttggtccgcaagcgtcttctgaaactggcctggcagaaggctacgttcttaaacccgtctatccgcgcttctttaatgtgggtacgcgcgtggcgattaaatgcaagaactccaaattttcggagaaagccaaactgatttcgccaattaaagcgaaggttgaactgacggagaacgataaacgtctgctcggaatctttagcgaatatgttacctggaatcgcgtcagtaacgtactgtcacatattggctcagtgaccgccaaagattttgggcgtgtttcgggtctgacgatgaaagacatcattcgcgaagcagcacgcgaaggccatgatctgttgttcgctgataacccgtcggcggtgctgaaggagctgacaggcctcatccagaacacgattcgctccaaatggcacgaagttctggag

SEQ ID NO: 2322 - protein, 346 aa, synthetic construct
  REGION 1..346: note = variant of RNA ligase 2 from Klebsiella phage KP179
MHHHHHHGGSNMFAYYSSLENHTNAKFISKIRGAGFLMHTVEWVSREKIHGTNFSVIITPTEIVPAKRTGPILEDESFFGHEIIMKKYMDSFVKVQNMLNAMDLVSVQIFGEFAGGGIQKGVDYGDKDFYVFDILSDSGNEKVYWDDYRVESFCTTVGLKLAPLLGRGSFAELSQYPNDFKSLVNRYNELVDTVGLEMANKHVFGPQASSETGLAEGYVLKPVYPRFFNVGTRVAIKCKNSKFSEKAKLISPIKAKVELTENDKRLLGIFSEYVTWNRVSNVLSHIGSVTAKDFGRVSGLTMKDIIREAAREGHDLLFADNPSAVLKELTGLIQNTIRSKWHEVLE

SEQ ID NO: 2323 - DNA, 1038 bp, synthetic construct
  misc_feature 1..1038: note = variant of RNA ligase 2 from Klebsiella phage KP179
  source 1..1038: mol_type = other DNA
atgcatcaccatcaccatcacggtggcagcaacatgtttgcgtattattcaagtctggaaaaccataccaatgccaagttccttagcaagatccgtggtgcaggcttcctgatgcacaccgtggaatgggtagctcgcgagaagattcatggaacgaactttagcgttatcattactccgaccgaaatcgtgccagccaaacgcacagggccgatcttggaagatgagagcttctttggtcatgaaattatcatgaaaaaatatatggactccttcgtgaaggtgcagaacatgctgaatgcgatggatcttgttagcgtgcaaatctttggcgaatttgcgggtggtggcattcagaaaggcgtcgattacggagacaaagatttctatgtgtttgacatcctgtctgatagcgggaacgagaaagtttactgggatgactatcgcgtcgaatcgttttgcaccactgtgggtctgaaattagcgcctctgctgggacgtggtagtttcgctgaactgtcccagtacccaaacgatttcaaaagcctggtgaaccgttataatgaattggttgacacggtcggcctggagatggccaataaacacgtctttggtccgcaagcgtcttctgaaactggcctggcagaaggctacgttcttaaacccgtctatccgcgcttctttaatgtgggtacgcgcgtggcgattaaatgcaagaactccaaattttcggagaaagccaaactgatttcgccaattaaagcgaaggttgaactgacggagaacgataaacgtctgctcggaatctttagcgaatatgttacctggaatcgcgtcagtaacgtactgtcacatattggctcagtgaccgccaaagattttgggcgtgtttcgggtctgacgatgaaagacatcattcgcgaagcagcacgcgaaggccatgatctgttgttcgctgataacccgtcggcggtgctgaaggagctgacaggcctcatccagaacacgattcgctccaaatggcacgaagttctggag

SEQ ID NO: 2324 - protein, 346 aa, synthetic construct
  REGION 1..346: note = variant of RNA ligase 2 from Klebsiella phage KP179
MHHHHHHGGSNMFAYYSSLENHTNAKFLSKIRGAGFLMHTVEWVAREKIHGTNFSVIITPTEIVPAKRTGPILEDESFFGHEIIMKKYMDSFVKVQNMLNAMDLVSVQIFGEFAGGGIQKGVDYGDKDFYVFDILSDSGNEKVYWDDYRVESFCTTVGLKLAPLLGRGSFAELSQYPNDFKSLVNRYNELVDTVGLEMANKHVFGPQASSETGLAEGYVLKPVYPRFFNVGTRVAIKCKNSKFSEKAKLISPIKAKVELTENDKRLLGIFSEYVTWNRVSNVLSHIGSVTAKDFGRVSGLTMKDIIREAAREGHDLLFADNPSAVLKELTGLIQNTIRSKWHEVLE

SEQ ID NO: 2325 - DNA, 1038 bp, synthetic construct
  misc_feature 1..1038: note = variant of RNA ligase 2 from Klebsiella phage KP179
  source 1..1038: mol_type = other DNA
atgcatcaccatcaccatcacggtggcagcaacatgtttgcgtattattcaagtctggaaaaccataccaatgccaagttcattagcaagatccgtggtgcaggcttcctgatgcacaccgtggaatgggtagctcgcgagaagattcatggaacgaactttagcgttatcattactccgaccgaaatcgtgccagccaaacgcacagggccgatcttggaagatgagagcttctttggtcatgaaattatcatgaaaaaatatatggactccttcgtgaaggtgcagaacatgctgaatgcgatggatcttgttagcgtgcaaatctttggcgaatttgcgggtggtggcattcagaaaggcgtcgattacggagacaaagatttctatgtgtttgacatcctgtctgatagcgggaacgagaaagtttactgggatgactatcgcgtcgaatcgttttgcaccactgtgggtctgaaattagcgcctctgctgggacgtggtagtttcgctgaactgtcccagtacccaaacgatttcaaaagcctggtgaaccgttataatgaattggttgacacggtcggcctggagatggccaataaacacgtctttggtccgcaagcgtcttctgaaactggcctggcagaaggctacgttcttaaacccgtctatccgcgcttctttaatgtgggtacgcgcgtggcgattaaatgcaagaactccaaattttcggagaaagccaaactgatttcgccaattaaagcgaaggttgaactgacggagaacgataaacgtctgctcggaatctttagcgaatatgttacctggaatcgcgtcagtaacgtactgtcacatattggctcagtgaccgccaaagattttgggcgtgtttcggtgctgacgatgaaagacatcattcgcgaagcagcacgcgaaggccatgatctgttgttcgctgataacccgtcggcggtgctgaaggagctgacaggcctcatccagaacacgattcgctccaaatggcacgaagttctggag

SEQ ID NO: 2326 - protein, 346 aa, synthetic construct
  REGION 1..346: note = variant of RNA ligase 2 from Klebsiella phage KP179
MHHHHHHGGSNMFAYYSSLENHTNAKFISKIRGAGFLMHTVEWVAREKIHGTNFSVIITPTEIVPAKRTGPILEDESFFGHEIIMKKYMDSFVKVQNMLNAMDLVSVQIFGEFAGGGIQKGVDYGDKDFYVFDILSDSGNEKVYWDDYRVESFCTTVGLKLAPLLGRGSFAELSQYPNDFKSLVNRYNELVDTVGLEMANKHVFGPQASSETGLAEGYVLKPVYPRFFNVGTRVAIKCKNSKFSEKAKLISPIKAKVELTENDKRLLGIFSEYVTWNRVSNVLSHIGSVTAKDFGRVSVLTMKDIIREAAREGHDLLFADNPSAVLKELTGLIQNTIRSKWHEVLE

SEQ ID NO: 2327 - DNA, 1038 bp, synthetic construct
  misc_feature 1..1038: note = variant of RNA ligase 2 from Klebsiella phage KP179
  source 1..1038: mol_type = other DNA
atgcatcaccatcaccatcacggtggcagcaacatgtttgcgtattattcaagtctggaaaaccataccaatgccaagttcattagcaagatccgtggtgcaggcttcctgatgcacaccgtggaatgggtagctcgcgagaagattcatggaacgaactttagcgttatcattactccgaccgaaatcgtgccagccaaacgcacagggccgatcttggaagatgagagcttctttggtcatgaaattatcatgaaaaaatatatggactccttcgtgaaggtgcagaacatgctgaatgcgatggatcttgttagcgtgcaaatctttggcgaatttgcgggtggtggcattcagaaaggcgtcgattacggagacaaagatttctatgtgtttgacatcctgtctgatagcgggaacgagaaagtttactgggatgactatcgcgtcgaatcgttttgcaccactgtgggtctgaaattagcgcctctgctgggacgtggtagtttcgctgaactgtcccagtacccaaacgatttcaaaagcctggtgaaccgttataatgaattggttgacacggtcggcctggagatggccaataaacacgtctttggtccgcaagcgtcttctgaaactggctatgcagaaggctacgttcttaaacccgtctatccgcgcttctttaatgtgggtacgcgcgtggcgattaaatgcaagaactccaaattttcggagaaagccaaactgatttcgccaattaaagcgaaggttgaactgacggagaacgataaacgtctgctcggaatctttagcgaatatgttacctggaatcgcgtcagtaacgtactgtcacatattggctcagtgaccgccaaagattttgggcgtgtttcgggtctgacgatgaaagacatcattcgcgaagcagcacgcgaaggccatgatctgttgttcgctgataacccgtcggcggtgctgaaggagctgacaggcctcatccagaacacgattcgctccaaatggcacgaagttctggag

SEQ ID NO: 2328 - protein, 346 aa, synthetic construct
  REGION 1..346: note = variant of RNA ligase 2 from Klebsiella phage KP179
MHHHHHHGGSNMFAYYSSLENHTNAKFISKIRGAGFLMHTVEWVAREKIHGTNFSVIITPTEIVPAKRTGPILEDESFFGHEIIMKKYMDSFVKVQNMLNAMDLVSVQIFGEFAGGGIQKGVDYGDKDFYVFDILSDSGNEKVYWDDYRVESFCTTVGLKLAPLLGRGSFAELSQYPNDFKSLVNRYNELVDTVGLEMANKHVFGPQASSETGYAEGYVLKPVYPRFFNVGTRVAIKCKNSKFSEKAKLISPIKAKVELTENDKRLLGIFSEYVTWNRVSNVLSHIGSVTAKDFGRVSGLTMKDIIREAAREGHDLLFADNPSAVLKELTGLIQNTIRSKWHEVLE

SEQ ID NO: 2329 - DNA, 1038 bp, synthetic construct
  misc_feature 1..1038: note = variant of RNA ligase 2 from Klebsiella phage KP179
  source 1..1038: mol_type = other DNA
atgcatcaccatcaccatcacggtggcagcaacatgtttgcgtattattcaagtctggaaaaccataccaatgccaagttcattagcaagatccgtggtgcaggcttcctgatgcacaccgtggaatgggtagctcgcgagaagattcatggaacgaactttagcgttatcattactccgaccgaaatcgtgccagccaaacgcacagggccgatcttggaagatgagagcttctttggtcatgaaattatcatgaaaaaatatatggactccttcgtgaaggtgcagaacatgctgaatgcgatggatcttgttagcgtgcaaatctttggcgaatttgcgggtggtggcattcagaaaggcgtcgattacggagacaaagatttctatgtgtttgacatcctgtctgatagcgggaacgagaaagtttactgggatgactatcgcgtcgaatcgttttgcaccactgtgggtctgaaattagcgcctctgctgggacgtggtagtttcgctgaactgtcccagtacccaaacgatttcaaaagcctggtgaaccgttataatgaattggttgacacggtcggcctggagatggccaataaacacgtctttggtccgcaagcgtcttctgaaactggcctggcagaaggctacgttcttaaacccgtctatccgcgcttctttaatgtgggtacgcgcgtggcgattaaatgcaagaactccaaattttcggagaaagccaaactgatttcgccaattaaagcgaaggttgaactgacggagaacgataaacgtctgctcggaatctttagcgaatatgttacctggaatcgcgtcagtaacgtactgtcacatattggctcagtgaccgccaaagattttcagcgtgtttcgggtctgacgatgaaagacatcattcgcgaagcagcacgcgaaggccatgatctgttgttcgctgataacccgtcggcggtgctgaaggagctgacaggcctcatccagaacacgattcgctccaaatggcacgaagttctggag

SEQ ID NO: 2330 - protein, 346 aa, synthetic construct
  REGION 1..346: note = variant of RNA ligase 2 from Klebsiella phage KP179
MHHHHHHGGSNMFAYYSSLENHTNAKFISKIRGAGFLMHTVEWVAREKIHGTNFSVIITPTEIVPAKRTGPILEDESFFGHEIIMKKYMDSFVKVQNMLNAMDLVSVQIFGEFAGGGIQKGVDYGDKDFYVFDILSDSGNEKVYWDDYRVESFCTTVGLKLAPLLGRGSFAELSQYPNDFKSLVNRYNELVDTVGLEMANKHVFGPQASSETGLAEGYVLKPVYPRFFNVGTRVAIKCKNSKFSEKAKLISPIKAKVELTENDKRLLGIFSEYVTWNRVSNVLSHIGSVTAKDFQRVSGLTMKDIIREAAREGHDLLFADNPSAVLKELTGLIQNTIRSKWHEVLE

SEQ ID NO: 2331 - DNA, 1038 bp, synthetic construct
  misc_feature 1..1038: note = variant of RNA ligase 2 from Klebsiella phage KP179
  source 1..1038: mol_type = other DNA
atgcatcaccatcaccatcacggtggcagcaacatgtttgcgtattattcaagtctggaaaaccataccaatgccaagttcattagcaagatccgtggtgcaggcttcctgatgcacaccgtggaatgggtagctcgcgagaagattcatggaacgaactttagcgttatcattactccgaccgaaatcgtgccagccaaacgcacagggccgatcttggaagatgagagcttctttggtcatgaaattatcatgaaaaaatatatggactccttcgtgaaggtgcagaacatgctgaatgcgatggatcttgttagcgtgcaaatctttggcgaatttgcgggtggtggcattcagaaaggcgtcgattacggagacaaagatttctatgtgtttgacatcctgtctgatagcgggaacgagaaagtttactgggatgactatcgcgtcgaatcgttttgcaccactgtgggtctgaaattagcgcctctgctgggacgtggtagtttcgctgaactgtcccagtacccaaacgatttcaaaagcctggtgaaccgttataatgaattggttgacacggtcggcctggagatggccaataaacacgtctttggtccgcaagcgtcttctgaaactggcctggcagaaggctacgttcttaaacccgtctatccgcgcttctttaatgtgggtacgcgcgtggcgattaaatgcaagaactccaaattttcggagaaagccaaactgatttcgccaattaaagcgaaggttgaactgacggagaacgataaacgtctgctcggaatctttagcgaatatgttacctggaatcgcgtcagtaacgtactgtcacatattggctcagtgaatgccaaagattttgggcgtgtttcgggtctgacgatgaaagacatcattcgcgaagcagcacgcgaaggccatgatctgttgttcgctgataacccgtcggcggtgctgaaggagctgacaggcctcatccagaacacgattcgctccaaatggcacgaagttctggag

SEQ ID NO: 2332 - protein, 346 aa, synthetic construct
  REGION 1..346: note = variant of RNA ligase 2 from Klebsiella phage KP179
MHHHHHHGGSNMFAYYSSLENHTNAKFISKIRGAGFLMHTVEWVAREKIHGTNFSVIITPTEIVPAKRTGPILEDESFFGHEIIMKKYMDSFVKVQNMLNAMDLVSVQIFGEFAGGGIQKGVDYGDKDFYVFDILSDSGNEKVYWDDYRVESFCTTVGLKLAPLLGRGSFAELSQYPNDFKSLVNRYNELVDTVGLEMANKHVFGPQASSETGLAEGYVLKPVYPRFFNVGTRVAIKCKNSKFSEKAKLISPIKAKVELTENDKRLLGIFSEYVTWNRVSNVLSHIGSVNAKDFGRVSGLTMKDIIREAAREGHDLLFADNPSAVLKELTGLIQNTIRSKWHEVLE

SEQ ID NO: 2333 - DNA, 1038 bp, synthetic construct
  misc_feature 1..1038: note = variant of RNA ligase 2 from Klebsiella phage KP179
  source 1..1038: mol_type = other DNA
atgcatcaccatcaccatcacggtggcagcaacatgtttgcgtattattcaagtctggaaaaccataccaatgccaagttcattagcaagatccgtggtgcaggcttcctgatgcacaccgtggaatgggtagctcgcgagaagattcatggaacgaactttagcgttatcattactccgaccgaaatcgtgccagccaaacgcacagggccgatcttggaagatgagagcttctttggtcatgaaattatcatgaaaaaatatatggactccttcgtgaaggtgcagaacatgctgaatgcgatggatcttgttagcgtgcaaatctttggcgaatttgcgggtggtggcattcagaaaggcgtcgattacggagacaaagatttctatgtgtttgacatcctgtctgatagcgggaacgagaaagtttactgggatgactatcgcgtcgaatcgttttgcaccactgtgggtctgaaattagcgcctctgctgggacgtggtagtttcgctgaactgtcccagtacccaaacgatttcaaaagcctggtgaaccgttataatgaattggttgacacggtcggcctggagatggccaataaacacgtctttggtccgcaagcgtcttctgaaactggcctggcagaaggctacgttcttaaacccgtctatccgcgcttctttaatgtgggtacgcgcgtggcgattaaatgcaagaactccaaattttcggagaaagccaaactgatttcgccaattaaagcgaaggttgaactgacggagaacgataaacgtctgctcggaatctttagcgaatatgttacctggaatcgcgtcagtaacgtactgtcacatattggctcagtgaccgccaaagattttgggcgtgtttcgggtctgacgcttaaagacatcattcgcgaagcagcacgcgaaggccatgatctgttgttcgctgataacccgtcggcggtgctgaaggagctgacaggcctcatccagaacacgattcgctccaaatggcacgaagttctggag

SEQ ID NO: 2334 - protein, 346 aa, synthetic construct
  REGION 1..346: note = variant of RNA ligase 2 from Klebsiella phage KP179
MHHHHHHGGSNMFAYYSSLENHTNAKFISKIRGAGFLMHTVEWVAREKIHGTNFSVIITPTEIVPAKRTGPILEDESFFGHEIIMKKYMDSFVKVQNMLNAMDLVSVQIFGEFAGGGIQKGVDYGDKDFYVFDILSDSGNEKVYWDDYRVESFCTTVGLKLAPLLGRGSFAELSQYPNDFKSLVNRYNELVDTVGLEMANKHVFGPQASSETGLAEGYVLKPVYPRFFNVGTRVAIKCKNSKFSEKAKLISPIKAKVELTENDKRLLGIFSEYVTWNRVSNVLSHIGSVTAKDFGRVSGLTLKDIIREAAREGHDLLFADNPSAVLKELTGLIQNTIRSKWHEVLE

SEQ ID NO: 2335 - DNA, 1038 bp, synthetic construct
  misc_feature 1..1038: note = variant of RNA ligase 2 from Klebsiella phage KP179
  source 1..1038: mol_type = other DNA
atgcatcaccatcaccatcacggtggcagcaacatgtttgcgtattattcaagtctggaaaaccataccaatgccaagttcattagcaagatccgtggtgcaggcttcctgatgcacaccgtggaatgggtagctcgcgagaagattcatggaacgaactttagcgttatcattactccgaccgaaatcgtgccagccaaacgcacagggccgatcttggaagatgagagcttctttggtcatgaaattatcatgaaaaaatatatggactccttcgtgaaggtgcagaacatgctgaatgcgatggatcttgttagcgtgcaaatctttggcgaatttgcgggtggtggcattcagaaaggcgtcgattacggagacaaagatttctatgtgtttgacatcctgtctgatagcgggaacgagaaagtttactgggatgactatcgcgtcgaatcgttttgcaccactgtgggtctgaaattagcgcctctgctgggacgtggtagtttcgctgaactgtcccagtacccaaacgatttcaaaagcctggtgaaccgttataatgaattggttgacacggtcggcctggagatggccaataaacacgtctttggtccgcaagcgtcttctgaaactggcctggcagaaggctacgttcttaaacccgtctatccgcgcttctttaatgtgggtacgcgcgtggcgattaaatgcaagaactccaaattttcggagaaagccaaactgatttcgccaattaaagcgaaggttgaactgacggagaacgataaacgtctgctcggaatctttagcgaatatgttacctggaatcgcgtcagtaacgtactgtcacatattggctcagtgaccgccaaagattttgggcgtgtttcgggtctgacgatgaaagacatcattcgcgaagcagcacgcgaaggccatagtctgttgttcgctgataacccgtcggcggtgctgaaggagctgacaggcctcatccagaacacgattcgctccaaatggcacgaagttctggag

SEQ ID NO: 2336 - protein, 346 aa, synthetic construct
  REGION 1..346: note = variant of RNA ligase 2 from Klebsiella phage KP179
MHHHHHHGGSNMFAYYSSLENHTNAKFISKIRGAGFLMHTVEWVAREKIHGTNFSVIITPTEIVPAKRTGPILEDESFFGHEIIMKKYMDSFVKVQNMLNAMDLVSVQIFGEFAGGGIQKGVDYGDKDFYVFDILSDSGNEKVYWDDYRVESFCTTVGLKLAPLLGRGSFAELSQYPNDFKSLVNRYNELVDTVGLEMANKHVFGPQASSETGLAEGYVLKPVYPRFFNVGTRVAIKCKNSKFSEKAKLISPIKAKVELTENDKRLLGIFSEYVTWNRVSNVLSHIGSVTAKDFGRVSGLTMKDIIREAAREGHSLLFADNPSAVLKELTGLIQNTIRSKWHEVLE

SEQ ID NO: 2337 - DNA, 1038 bp, synthetic construct
  misc_feature 1..1038: note = variant of RNA ligase 2 from Klebsiella phage KP179
  source 1..1038: mol_type = other DNA
atgcatcaccatcaccatcacggtggcagcaacatgtttgcgtattattcaagtctggaaaaccataccaatgccaagttcattagcaagatccgtggtgcaggcttcctgatgcacaccgtggaatgggtagctcgcgagaagattcatggaacgaactttagcgttatcattactccgaccgaaatcgtgccagccaaacgcacagggccgatcttggaagatgagagcttctttggtcatgaaattatcatgaaaaaatatatggactccttcgtgaaggtgcagaacatgctgaatgcgatggatcttgttagcgtgcaaatctttggcgaatttgcgggtggtggcattcagaaaggcgtcgattacggagacaaagatttctatgtgtttgacatcctgtctgatagcgggaacgagaaatgttactgggatgactatcgcgtcgaatcgttttgcaccactgtgggtctgaaattagcgcctctgctgggacgtggtagtttcgctgaactgtcccagtacccaaacgatttcaaaagcctggtgaaccgttataatgaattggttgacacggtcggcctggagatggccaataaacacgtctttggtccgcaagcgtcttctgaaactggcctggcagaaggctacgttcttaaacccgtctatccgcgcttctttaatgtgggtacgcgcgtggcgattaaatgcaagaactccaaattttcggagaaagccaaactgatttcgccaattaaagcgaaggttgaactgacggagaacgataaacgtctgctcggaatctttagcgaatatgttacctggaatcgcgtcagtaacgtactgtcacatattggctcagtgaccgccaaagattttgggcgtgtttcgggtctgacgatgaaagacatcattcgcgaagcagcacgcgaaggccatgatctgttgttcgctgataacccgtcggcggtgctgaaggagctgacaggcctcatccagaacacgattcgctccaaatggcacgaagttctggag

SEQ ID NO: 2338 - protein, 346 aa, synthetic construct
  REGION 1..346: note = variant of RNA ligase 2 from Klebsiella phage KP179
MHHHHHHGGSNMFAYYSSLENHTNAKFISKIRGAGFLMHTVEWVAREKIHGTNFSVIITPTEIVPAKRTGPILEDESFFGHEIIMKKYMDSFVKVQNMLNAMDLVSVQIFGEFAGGGIQKGVDYGDKDFYVFDILSDSGNEKCYWDDYRVESFCTTVGLKLAPLLGRGSFAELSQYPNDFKSLVNRYNELVDTVGLEMANKHVFGPQASSETGLAEGYVLKPVYPRFFNVGTRVAIKCKNSKFSEKAKLISPIKAKVELTENDKRLLGIFSEYVTWNRVSNVLSHIGSVTAKDFGRVSGLTMKDIIREAAREGHDLLFADNPSAVLKELTGLIQNTIRSKWHEVLE

SEQ ID NO: 2339 - DNA, 1038 bp, synthetic construct
  misc_feature 1..1038: note = variant of RNA ligase 2 from Klebsiella phage KP179
  source 1..1038: mol_type = other DNA
atgcatcaccatcaccatcacggtggcagcaacatgtttgcgtattattcaagtctggaaaaccataccaatgccaagttcattagcaagatccgtggtgcaggcttcctgatgcacaccgtggaatgggtagctcgcgagaagattcatggaacgaactttagcgttatcattactccgaccgaaatcgtgccagccaaacgcacagggccgatcttggaagatgagagcttctttggtcatgaaattatcatgaaaaaatatagggactccttcgtgaaggtgcagaacatgctgaatgcgatggatcttgttagcgtgcaaatctttggcgaatttgcgggtggtggcattcagaaaggcgtcgattacggagacaaagatttctatgtgtttgacatcctgtctgatagcgggaacgagaaagtttactgggatgactatcgcgtcgaatcgttttgcaccactgtgggtctgaaattagcgcctctgctgggacgtggtagtttcgctgaactgtcccagtacccaaacgatttcaaaagcctggtgaaccgttataatgaattggttgacacggtcggcctggagatggccaataaacacgtctttggtccgcaagcgtcttctgaaactggcctggcagaaggctacgttcttaaacccgtctatccgcgcttctttaatgtgggtacgcgcgtggcgattaaatgcaagaactccaaattttcggagaaagccaaactgatttcgccaattaaagcgaaggttgaactgacggagaacgataaacgtctgctcggaatctttagcgaatatgttacctggaatcgcgtcagtaacgtactgtcacatattggctcagtgaccgccaaagattttgggcgtgtttcgggtctgacgatgaaagacatcattcgcgaagcagcacgcgaaggccatgatctgttgttcgctgataacccgtcggcggtgctgaaggagctgacaggcctcatccagaacacgattcgctccaaatggcacgaagttctggag

SEQ ID NO: 2340 - protein, 346 aa, synthetic construct
  REGION 1..346: note = variant of RNA ligase 2 from Klebsiella phage KP179
MHHHHHHGGSNMFAYYSSLENHTNAKFISKIRGAGFLMHTVEWVAREKIHGTNFSVIITPTEIVPAKRTGPILEDESFFGHEIIMKKYRDSFVKVQNMLNAMDLVSVQIFGEFAGGGIQKGVDYGDKDFYVFDILSDSGNEKVYWDDYRVESFCTTVGLKLAPLLGRGSFAELSQYPNDFKSLVNRYNELVDTVGLEMANKHVFGPQASSETGLAEGYVLKPVYPRFFNVGTRVAIKCKNSKFSEKAKLISPIKAKVELTENDKRLLGIFSEYVTWNRVSNVLSHIGSVTAKDFGRVSGLTMKDIIREAAREGHDLLFADNPSAVLKELTGLIQNTIRSKWHEVLE

SEQ ID NO: 2341 - DNA, 1038 bp, synthetic construct
  misc_feature 1..1038: note = variant of RNA ligase 2 from Klebsiella phage KP179
  source 1..1038: mol_type = other DNA
atgcatcaccatcaccatcacggtggcagcaacatgtttgcgtattattcaagtctggaaaaccataccaatgccaagttcattagcaagatccgtggtgcaggcttcctgatgcacaccgtggaatgggtagctcgcgagaagattcatggaacgaactttagcgttatcattactccgaccgaaatcgtgccagccaaacgcacagggccgatcttggaagatgagagcttctttggtcatgaaattatcatgaaaaaatatatggactccttcgtgaaggtgcagaacatgctgaatgcgatggatcttgttagcgtgcaaatctttggcgaatttgcgggtggtggcattcagaaaggcgtcgattacggagacaaagatttctatgtgtttgacatcctgtctgatagcgggaacgagaaagtttactgggatgactatcgcgtcgaatcgttttgcaccactgtgggtctgaaattagcgcctctgctgggacgtggtagtttcgctgaactgtcccagtacccaaacgatttcaaaagcctggtgaaccgttataatgaattggttgacacggtcggcctggagatggccaataaacacgtctggggtccgcaagcgtcttctgaaactggcctggcagaaggctacgttcttaaacccgtctatccgcgcttctttaatgtgggtacgcgcgtggcgattaaatgcaagaactccaaattttcggagaaagccaaactgatttcgccaattaaagcgaaggttgaactgacggagaacgataaacgtctgctcggaatctttagcgaatatgttacctggaatcgcgtcagtaacgtactgtcacatattggctcagtgaccgccaaagattttgggcgtgtttcgggtctgacgatgaaagacatcattcgcgaagcagcacgcgaaggccatgatctgttgttcgctgataacccgtcggcggtgctgaaggagctgacaggcctcatccagaacacgattcgctccaaatggcacgaagttctggag

SEQ ID NO: 2342 - protein, 346 aa, synthetic construct
  REGION 1..346: note = variant of RNA ligase 2 from Klebsiella phage KP179
MHHHHHHGGSNMFAYYSSLENHTNAKFISKIRGAGFLMHTVEWVAREKIHGTNFSVIITPTEIVPAKRTGPILEDESFFGHEIIMKKYMDSFVKVQNMLNAMDLVSVQIFGEFAGGGIQKGVDYGDKDFYVFDILSDSGNEKVYWDDYRVESFCTTVGLKLAPLLGRGSFAELSQYPNDFKSLVNRYNELVDTVGLEMANKHVWGPQASSETGLAEGYVLKPVYPRFFNVGTRVAIKCKNSKFSEKAKLISPIKAKVELTENDKRLLGIFSEYVTWNRVSNVLSHIGSVTAKDFGRVSGLTMKDIIREAAREGHDLLFADNPSAVLKELTGLIQNTIRSKWHEVLE

SEQ ID NO: 2343 - DNA, 1038 bp, synthetic construct
  misc_feature 1..1038: note = variant of RNA ligase 2 from Klebsiella phage KP179
  source 1..1038: mol_type = other DNA
atgcatcaccatcaccatcacggtggcagcaacatgtttgcgtattattcaagtctggaaaaccataccaatgccaagttcattagcaagatccgtggtgcaggcttcctgatgcacaccgtggaatgggtagctcgcgagaagattcatggaacgaactttagcgttatcattactccgaccgaaatcgtgccagccaaacgcacagggccgatcttggaagatgagagcttctttggtcatgaaattatcatgaaaaaatatatggactccttcgtgaaggtgcagaacatgctgaatgcgatggatcttgttagcgtgcaaatctttggcgaatttgcgggtggtggcattcagaaaggcgtcgattacggagacaaagatttctatgtgtttgacatcctgtctgatagcgggaacgagaaagtttactgggatgactatcgcgtcgaatcgttttgcaccactgtgggtctgaaattagcgcctctgctgggacgtggtagtttcgctgaactgtcccagtacccaaacgatttcaaaagcctggtgaaccgttataatgaattggttgacacggtcggcctggagatggccaataaacacgtctttggtccgcaagcgtcttctgaaactggcctggcagaaggctacgttcttaaacccgtctatccgcgcttctttaatgtgggtacgcgcgtggcgattaaatgcaagaactccaaattttcggagaaagccaaactgatttcgccaattaaagcgaaggttgaactgacggagaacgataaacgtctgctcggaatctttagcgaatatgttacctggaatcgcgtcagtaacgtactgtcacatattggctcagtgaccgccaaagattttgggcgtgtttcgggtctgacgatgaaagacatcattcgcgaagcagcacgcgaaggccatgatctgttgttcgctgataacccgtcggcggtgctgaaggagctgacaggctggatccagaacacgattcgctccaaatggcacgaagttctggag

SEQ ID NO: 2344 - protein, 346 aa, synthetic construct
  REGION 1..346: note = variant of RNA ligase 2 from Klebsiella phage KP179
MHHHHHHGGSNMFAYYSSLENHTNAKFISKIRGAGFLMHTVEWVAREKIHGTNFSVIITPTEIVPAKRTGPILEDESFFGHEIIMKKYMDSFVKVQNMLNAMDLVSVQIFGEFAGGGIQKGVDYGDKDFYVFDILSDSGNEKVYWDDYRVESFCTTVGLKLAPLLGRGSFAELSQYPNDFKSLVNRYNELVDTVGLEMANKHVFGPQASSETGLAEGYVLKPVYPRFFNVGTRVAIKCKNSKFSEKAKLISPIKAKVELTENDKRLLGIFSEYVTWNRVSNVLSHIGSVTAKDFGRVSGLTMKDIIREAAREGHDLLFADNPSAVLKELTGWIQNTIRSKWHEVLE

SEQ ID NO: 2345 - DNA, 1038 bp, synthetic construct
  misc_feature 1..1038: note = variant of RNA ligase 2 from Klebsiella phage KP179
  source 1..1038: mol_type = other DNA
atgcatcaccatcaccatcacggtggcagcaacatgtttgcgtattattcaagtctggaaaaccataccaatgccaagttcattagcaagatccgtggtgcaggcttcctgatgcacaccgtggaatgggtagctcgcgagaagattcatggaacgaactttagcgttatcattactccgaccgaaatcgtgccagccaaacgcacagggccgatcttggaagatgagagcttctttggtcatgaaattatcatgaaaaaatatatggactccttcgtgaaggtgcagaacatgctgaatgcgatggatcttgttagcgtgcaaatctttggcgaatttgcgggtggtggcattcagaaaggcgtcgattacggagacaaagatttctatgtgtttgacatcctgtctgatagcgggaacgagaaagtttactgggatgactatcgcgtcgaatcgttttgcaccactgtgggtctgaaattagcgcctctgctgggacgtggtgggttcgctgaactgtcccagtacccaaacgatttcaaaagcctggtgaaccgttataatgaattggttgacacggtcggcctggagatggccaataaacacgtctttggtccgcaagcgtcttctgaaactggcctggcagaaggctacgttcttaaacccgtctatccgcgcttctttaatgtgggtacgcgcgtggcgattaaatgcaagaactccaaattttcggagaaagccaaactgatttcgccaattaaagcgaaggttgaactgacggagaacgataaacgtctgctcggaatctttagcgaatatgttacctggaatcgcgtcagtaacgtactgtcacatattggctcagtgaccgccaaagattttgggcgtgtttcgggtctgacgatgaaagacatcattcgcgaagcagcacgcgaaggccatgatctgttgttcgctgataacccgtcggcggtgctgaaggagctgacaggcctcatccagaacacgattcgctccaaatggcacgaagttctggag

SEQ ID NO: 2346 - protein, 346 aa, synthetic construct
  REGION 1..346: note = variant of RNA ligase 2 from Klebsiella phage KP179
MHHHHHHGGSNMFAYYSSLENHTNAKFISKIRGAGFLMHTVEWVAREKIHGTNFSVIITPTEIVPAKRTGPILEDESFFGHEIIMKKYMDSFVKVQNMLNAMDLVSVQIFGEFAGGGIQKGVDYGDKDFYVFDILSDSGNEKVYWDDYRVESFCTTVGLKLAPLLGRGGFAELSQYPNDFKSLVNRYNELVDTVGLEMANKHVFGPQASSETGLAEGYVLKPVYPRFFNVGTRVAIKCKNSKFSEKAKLISPIKAKVELTENDKRLLGIFSEYVTWNRVSNVLSHIGSVTAKDFGRVSGLTMKDIIREAAREGHDLLFADNPSAVLKELTGLIQNTIRSKWHEVLE

SEQ ID NO: 2347 - DNA, 1038 bp, synthetic construct
  misc_feature 1..1038: note = variant of RNA ligase 2 from Klebsiella phage KP179
  source 1..1038: mol_type = other DNA
atgcatcaccatcaccatcacggtggcagcaacatgtttgcgtattattcaagtctggaaaaccataccaatgccaagttcattagcaagatccgtggtgcaggcttcctgatgcacaccgtggaatgggtagctcgcgagaagattcatggaacgaactttagcgttatcattactccgaccgaaatcgtgccagccaaacgcacagggccgatcttggaagatgagagcttctttggtcatgaaattatcatgaaaaaatatatggactccttcgtgaaggtgcagaacatgctgaatgcgatggatcttgttagcgtgcaaatctttggcgaatttgcgggtggtggcattcagaaaggcgtcgattacggagacaaagatttctatgtgtttgacatcctgtctgatagcgggaacgagaaagtttactgggatgactatcgcgtcgaatcgttttgcaccactgtgggtctgaaattagcgcctctgctgggacgtggtagtttcgctgaactgtcccagtacccaaacgatttcaaaagcctggtgaaccgttataatgaattggttgacacggtcggcctggagatggccaataaacacgtctttggtccgcaagcgtcttctgaaactggcctggcagaaggctacgttcttaaacccgtctatccgcgcttctttaatgtgggtacgcgcgtggcgattaaatgcaagaactccaaattttcggagaaagccaaactgatttcgccaattaaagcgaaggttgaactgacggagaacgataaacgtctgctcggaatctttagcgaatatgttacctggaatcgcgtcagtaacgtactgtcacatattggctcagtgaccgccaaagattttgggcgtgtttcgggtctgacgatgaaagacgttattcgcgaagcagcacgcgaaggccatgatctgttgttcgctgataacccgtcggcggtgctgaaggagctgacaggcctcatccagaacacgattcgctccaaatggcacgaagttctggag

SEQ ID NO: 2348 - protein, 346 aa, synthetic construct
  REGION 1..346: note = variant of RNA ligase 2 from Klebsiella phage KP179
MHHHHHHGGSNMFAYYSSLENHTNAKFISKIRGAGFLMHTVEWVAREKIHGTNFSVIITPTEIVPAKRTGPILEDESFFGHEIIMKKYMDSFVKVQNMLNAMDLVSVQIFGEFAGGGIQKGVDYGDKDFYVFDILSDSGNEKVYWDDYRVESFCTTVGLKLAPLLGRGSFAELSQYPNDFKSLVNRYNELVDTVGLEMANKHVFGPQASSETGLAEGYVLKPVYPRFFNVGTRVAIKCKNSKFSEKAKLISPIKAKVELTENDKRLLGIFSEYVTWNRVSNVLSHIGSVTAKDFGRVSGLTMKDVIREAAREGHDLLFADNPSAVLKELTGLIQNTIRSKWHEVLE

SEQ ID NO: 2349 - DNA, 1038 bp, synthetic construct
  misc_feature 1..1038: note = variant of RNA ligase 2 from Klebsiella phage KP179
  source 1..1038: mol_type = other DNA
atgcatcaccatcaccatcacggtggcagcaacatgtttgcgtattattcaagtctggaaaaccataccaatgccaagttcattagcaagatccgtggtgcaggcttcctgatgcacaccgtggaatgggtagctcgcgagaagattcatggaacgaactttagcgttatcattactccgaccgaaatcgtgccagccaaacgcacagggccgatcttggaagatgagagcttctttggtcatgaaattatcatgaaaaaatatttggactccttcgtgaaggtgcagaacatgctgaatgcgatggatcttgttagcgtgcaaatctttggcgaatttgcgggtggtggcattcagaaaggcgtcgattacggagacaaagatttctatgtgtttgacatcctgtctgatagcgggaacgagaaagtttactgggatgactatcgcgtcgaatcgttttgcaccactgtgggtctgaaattagcgcctctgctgggacgtggtagtttcgctgaactgtcccagtacccaaacgatttcaaaagcctggtgaaccgttataatgaattggttgacacggtcggcctggagatggccaataaacacgtctttggtccgcaagcgtcttctgaaactggcctggcagaaggctacgttcttaaacccgtctatccgcgcttctttaatgtgggtacgcgcgtggcgattaaatgcaagaactccaaattttcggagaaagccaaactgatttcgccaattaaagcgaaggttgaactgacggagaacgataaacgtctgctcggaatctttagcgaatatgttacctggaatcgcgtcagtaacgtactgtcacatattggctcagtgaccgccaaagattttgggcgtgtttcgggtctgacgatgaaagacatcattcgcgaagcagcacgcgaaggccatgatctgttgttcgctgataacccgtcggcggtgctgaaggagctgacaggcctcatccagaacacgattcgctccaaatggcacgaagttctggag

SEQ ID NO: 2350 - protein, 346 aa, synthetic construct
  REGION 1..346: note = variant of RNA ligase 2 from Klebsiella phage KP179
MHHHHHHGGSNMFAYYSSLENHTNAKFISKIRGAGFLMHTVEWVAREKIHGTNFSVIITPTEIVPAKRTGPILEDESFFGHEIIMKKYLDSFVKVQNMLNAMDLVSVQIFGEFAGGGIQKGVDYGDKDFYVFDILSDSGNEKVYWDDYRVESFCTTVGLKLAPLLGRGSFAELSQYPNDFKSLVNRYNELVDTVGLEMANKHVFGPQASSETGLAEGYVLKPVYPRFFNVGTRVAIKCKNSKFSEKAKLISPIKAKVELTENDKRLLGIFSEYVTWNRVSNVLSHIGSVTAKDFGRVSGLTMKDIIREAAREGHDLLFADNPSAVLKELTGLIQNTIRSKWHEVLE

SEQ ID NO: 2351 - DNA, 1038 bp, synthetic construct
  misc_feature 1..1038: note = variant of RNA ligase 2 from Klebsiella phage KP179
  source 1..1038: mol_type = other DNA
atgcatcaccatcaccatcacggtggcagcaacatgtttgcgtattattcaagtctggaaaaccataccaatgccaagttcattagcaagatccgtggtgcaggcttcctgatgcacaccgtggaatgggtagctcgcgagaagattcatggaacgaactttagcgttatcattactccgaccgaaatcgtgccagccaaacgcacagggccgatcttggaagatgagagcttctttggtcatgaaattatcatgaaaaaatatatggactccttcgtgaaggtgcagaacatgctgaatgcgatggatcttgttagcgtgcaaatctttggcgaatttgcgggtggtggcattcagaaaggcgtcgattacggagacaaagatttctatgtgtttgacatcctgtctgatagcgggaacgagaaagtttactgggatgactatcgcgtcgaatcgtttagtaccactgtgggtctgaaattagcgcctctgctgggacgtggtagtttcgctgaactgtcccagtacccaaacgatttcaaaagcctggtgaaccgttataatgaattggttgacacggtcggcctggagatggccaataaacacgtctttggtccgcaagcgtcttctgaaactggcctggcagaaggctacgttcttaaacccgtctatccgcgcttctttaatgtgggtacgcgcgtggcgattaaatgcaagaactccaaattttcggagaaagccaaactgatttcgccaattaaagcgaaggttgaactgacggagaacgataaacgtctgctcggaatctttagcgaatatgttacctggaatcgcgtcagtaacgtactgtcacatattggctcagtgaccgccaaagattttgggcgtgtttcgggtctgacgatgaaagacatcattcgcgaagcagcacgcgaaggccatgatctgttgttcgctgataacccgtcggcggtgctgaaggagctgacaggcctcatccagaacacgattcgctccaaatggcacgaagttctggag

SEQ ID NO: 2352 - protein, 346 aa, synthetic construct
  REGION 1..346: note = variant of RNA ligase 2 from Klebsiella phage KP179
MHHHHHHGGSNMFAYYSSLENHTNAKFISKIRGAGFLMHTVEWVAREKIHGTNFSVIITPTEIVPAKRTGPILEDESFFGHEIIMKKYMDSFVKVQNMLNAMDLVSVQIFGEFAGGGIQKGVDYGDKDFYVFDILSDSGNEKVYWDDYRVESFSTTVGLKLAPLLGRGSFAELSQYPNDFKSLVNRYNELVDTVGLEMANKHVFGPQASSETGLAEGYVLKPVYPRFFNVGTRVAIKCKNSKFSEKAKLISPIKAKVELTENDKRLLGIFSEYVTWNRVSNVLSHIGSVTAKDFGRVSGLTMKDIIREAAREGHDLLFADNPSAVLKELTGLIQNTIRSKWHEVLE

SEQ ID NO: 2353 - DNA, 1038 bp, synthetic construct
  misc_feature 1..1038: note = variant of RNA ligase 2 from Klebsiella phage KP179
  source 1..1038: mol_type = other DNA
atgcatcaccatcaccatcacggtggcagcaacatgtttgcgtattattcaagtctggaaaaccataccaatgccaagttcattagcaagatccgtggtgcaggcttcctgatgcacaccgtggaatgggtagctcgcgagaagattcatggaacgaactttagcgttatcattactccgaccgaaatcgtgccagccaaacgcacagggccgatcttggaagatgagagcttctttggtcatgaaattatcatgaaaaaatatatggactccttcgtgaaggtgcagaacatgctgaatgcgatggatcttgttagcgtgcaaatctttggcgaatttgcgggtggtggcattcagaaaggcgtcgattacggagacaaagatttctatgtgtttgacatcctgtctgatagcgggaacgagaaagtttactgggatgactatcgcgtcgaatcgttttgcaccactgtgggtctgaaattagcgcctctgctgggacgtggtagtttcgctgaactgtcccagtacccaaacgatttcaaaagcctggtgaaccgttataatgaattggttgacacggtcggcctggagatggccaataaacacgtctttggtccgcaagcgtcttctgaaactggcctggcagaaggctacgttcttaaacccgtctatccgcgcttctttaatgtgggtacgcgcgtggcgattaaatgcaagaactccaaattttcggagaaagccaaactgatttcgccaattaaagcgaaggttgaactgacggagaacgataaacgtctgctcggaatctttagcgaatatgttacctggaatcgcgtcagtaacgtactgtcacatattggctcagtgaccgccaaagattttaggcgtgtttcgggtctgacgatgaaagacatcattcgcgaagcagcacgcgaaggccatgatctgttgttcgctgataacccgtcggcggtgctgaaggagctgacaggcctcatccagaacacgattcgctccaaatggcacgaagttctggag

SEQ ID NO: 2354 - protein, 346 aa, synthetic construct
  REGION 1..346: note = variant of RNA ligase 2 from Klebsiella phage KP179
MHHHHHHGGSNMFAYYSSLENHTNAKFISKIRGAGFLMHTVEWVAREKIHGTNFSVIITPTEIVPAKRTGPILEDESFFGHEIIMKKYMDSFVKVQNMLNAMDLVSVQIFGEFAGGGIQKGVDYGDKDFYVFDILSDSGNEKVYWDDYRVESFCTTVGLKLAPLLGRGSFAELSQYPNDFKSLVNRYNELVDTVGLEMANKHVFGPQASSETGLAEGYVLKPVYPRFFNVGTRVAIKCKNSKFSEKAKLISPIKAKVELTENDKRLLGIFSEYVTWNRVSNVLSHIGSVTAKDFRRVSGLTMKDIIREAAREGHDLLFADNPSAVLKELTGLIQNTIRSKWHEVLE

SEQ ID NO: 2355 - DNA, 1038 bp, synthetic construct
  misc_feature 1..1038: note = variant of RNA ligase 2 from Klebsiella phage KP179
  source 1..1038: mol_type = other DNA
atgcatcaccatcaccatcacggtggcagcaacatgtttgcgtattattcaagtctggaaaaccataccaatgccaagttcattagcaagatccgtggtgcaggcttcctgatgcacaccgtggaatgggtagctcgcgagaagattcatggaacgaactttagcgttatcattactccgaccgaaatcgtgccagccaaacgcacagggccgatcttggaagatgagagcttctttggtcatgaaattatcatgaaaaaatatatggactccttcgtgaaggtgcagaacatgctgaatgcgatggatcttgttagcgtgcaaatctttggcgaatttgcgggtggtggcattcagaaaggcgtcgattacggagacaaagatttctatgtgtttgacatcctgtctgatagcgggaacgagaaagtttactgggatgactatcgcgtcgaatcgttttgcaccactgtgaggctgaaattagcgcctctgctgggacgtggtagtttcgctgaactgtcccagtacccaaacgatttcaaaagcctggtgaaccgttataatgaattggttgacacggtcggcctggagatggccaataaacacgtctttggtccgcaagcgtcttctgaaactggcctggcagaaggctacgttcttaaacccgtctatccgcgcttctttaatgtgggtacgcgcgtggcgattaaatgcaagaactccaaattttcggagaaagccaaactgatttcgccaattaaagcgaaggttgaactgacggagaacgataaacgtctgctcggaatctttagcgaatatgttacctggaatcgcgtcagtaacgtactgtcacatattggctcagtgaccgccaaagattttgggcgtgtttcgggtctgacgatgaaagacatcattcgcgaagcagcacgcgaaggccatgatctgttgttcgctgataacccgtcggcggtgctgaaggagctgacaggcctcatccagaacacgattcgctccaaatggcacgaagttctggag

SEQ ID NO: 2356 - protein, 346 aa, synthetic construct
  REGION 1..346: note = variant of RNA ligase 2 from Klebsiella phage KP179
MHHHHHHGGSNMFAYYSSLENHTNAKFISKIRGAGFLMHTVEWVAREKIHGTNFSVIITPTEIVPAKRTGPILEDESFFGHEIIMKKYMDSFVKVQNMLNAMDLVSVQIFGEFAGGGIQKGVDYGDKDFYVFDILSDSGNEKVYWDDYRVESFCTTVRLKLAPLLGRGSFAELSQYPNDFKSLVNRYNELVDTVGLEMANKHVFGPQASSETGLAEGYVLKPVYPRFFNVGTRVAIKCKNSKFSEKAKLISPIKAKVELTENDKRLLGIFSEYVTWNRVSNVLSHIGSVTAKDFGRVSGLTMKDIIREAAREGHDLLFADNPSAVLKELTGLIQNTIRSKWHEVLE

SEQ ID NO: 2357 - DNA, 1038 bp, synthetic construct
  misc_feature 1..1038: note = variant of RNA ligase 2 from Klebsiella phage KP179
  source 1..1038: mol_type = other DNA
atgcatcaccatcaccatcacggtggcagcaacatgtttgcgtattattcaagtctggaaaaccataccaatgccaagttcattagcaagatccgtggtgcaggcttcctgatgcacaccgtggaatgggtagctcgcgagaagattcatggaacgaactttagcgttatcattactccgaccgaaatcgtgccagccaaacgcacagggccgatcttggaagatgagagcttctttggtcatgaaattatcatgaaaaaatatatggactccttcgtgaaggtgcagaacatgctgaatgcgatggatcttgttagcgtgcaaatctttggcgaatttgcgggtggtggcattcagaaaggcgtcgattacggagacaaagatttctatgtgtttgacatcgcttctgatagcgggaacgagaaagtttactgggatgactatcgcgtcgaatcgttttgcaccactgtgggtctgaaattagcgcctctgctgggacgtggtagtttcgctgaactgtcccagtacccaaacgatttcaaaagcctggtgaaccgttataatgaattggttgacacggtcggcctggagatggccaataaacacgtctttggtccgcaagcgtcttctgaaactggcctggcagaaggctacgttcttaaacccgtctatccgcgcttctttaatgtgggtacgcgcgtggcgattaaatgcaagaactccaaattttcggagaaagccaaactgatttcgccaattaaagcgaaggttgaactgacggagaacgataaacgtctgctcggaatctttagcgaatatgttacctggaatcgcgtcagtaacgtactgtcacatattggctcagtgaccgccaaagattttgggcgtgtttcgggtctgacgatgaaagacatcattcgcgaagcagcacgcgaaggccatgatctgttgttcgctgataacccgtcggcggtgctgaaggagctgacaggcctcatccagaacacgattcgctccaaatggcacgaagttctggag

SEQ ID NO: 2358 - protein, 346 aa, synthetic construct
  REGION 1..346: note = variant of RNA ligase 2 from Klebsiella phage KP179
MHHHHHHGGSNMFAYYSSLENHTNAKFISKIRGAGFLMHTVEWVAREKIHGTNFSVIITPTEIVPAKRTGPILEDESFFGHEIIMKKYMDSFVKVQNMLNAMDLVSVQIFGEFAGGGIQKGVDYGDKDFYVFDIASDSGNEKVYWDDYRVESFCTTVGLKLAPLLGRGSFAELSQYPNDFKSLVNRYNELVDTVGLEMANKHVFGPQASSETGLAEGYVLKPVYPRFFNVGTRVAIKCKNSKFSEKAKLISPIKAKVELTENDKRLLGIFSEYVTWNRVSNVLSHIGSVTAKDFGRVSGLTMKDIIREAAREGHDLLFADNPSAVLKELTGLIQNTIRSKWHEVLE

SEQ ID NO: 2359 - DNA, 1038 bp, synthetic construct
  misc_feature 1..1038: note = variant of RNA ligase 2 from Klebsiella phage KP179
  source 1..1038: mol_type = other DNA
atgcatcaccatcaccatcacggtggcagcaacatgtttgcgtattattcaagtctggaaaaccataccaatgccaagttcattagcaagatccgtggtgcaggcttcctgatgcacaccgtggaatgggtagctcgcgagaagattcatggaacgaactttagcgttatcattactccgaccgaaatcgtgccagccaaacgcacagggccgatcttggaagatgagagcttctttggtcatgaaattatcatgaaaaaatatatggactccttcgtgaaggtgcagaacatgctgaatgcgatggatcttgttagcgtgcaaatctttggcgaatttgcgggtggtggcattcagaaaggcgtcgattacggagacaaagatttctatgtgtttgacatcctgtctgatagcgggaacgagaaagtttactgggatgactatcgcgtcgaatcgttttgcaccactgtgggtctgaaattagcgcctctgctgggacgtggtagtttcgctgaactgtcccagtacccaaacgatttcaaaagcctggtgaaccgttataatgaattggttgacacggtcggcctggagatggccaataaacacgtctttggtccgcaagcgtcttctgaaactggcctggcagaaggctacgttcttaaacccgtctatccgcgcttctttaatgtgggtacgcgcgtggcgattaaagtgaagaactccaaattttcggagaaagccaaactgatttcgccaattaaagcgaaggttgaactgacggagaacgataaacgtctgctcggaatctttagcgaatatgttacctggaatcgcgtcagtaacgtactgtcacatattggctcagtgaccgccaaagattttgggcgtgtttcgggtctgacgatgaaagacatcattcgcgaagcagcacgcgaaggccatgatctgttgttcgctgataacccgtcggcggtgctgaaggagctgacaggcctcatccagaacacgattcgctccaaatggcacgaagttctggag

SEQ ID NO: 2360 - protein, 346 aa, synthetic construct
  REGION 1..346: note = variant of RNA ligase 2 from Klebsiella phage KP179
MHHHHHHGGSNMFAYYSSLENHTNAKFISKIRGAGFLMHTVEWVAREKIHGTNFSVIITPTEIVPAKRTGPILEDESFFGHEIIMKKYMDSFVKVQNMLNAMDLVSVQIFGEFAGGGIQKGVDYGDKDFYVFDILSDSGNEKVYWDDYRVESFCTTVGLKLAPLLGRGSFAELSQYPNDFKSLVNRYNELVDTVGLEMANKHVFGPQASSETGLAEGYVLKPVYPRFFNVGTRVAIKVKNSKFSEKAKLISPIKAKVELTENDKRLLGIFSEYVTWNRVSNVLSHIGSVTAKDFGRVSGLTMKDIIREAAREGHDLLFADNPSAVLKELTGLIQNTIRSKWHEVLE

SEQ ID NO: 2361 - DNA, 1038 bp, synthetic construct
  misc_feature 1..1038: note = variant of RNA ligase 2 from Klebsiella phage KP179
  source 1..1038: mol_type = other DNA
atgcatcaccatcaccatcacggtggcagcaacatgtttgcgtattattcaagtctggaaaaccataccaatgccaagttcattagcaagatccgtggtgcaggcttcctgatgcacaccgtggaatgggtagctcgcgagaagattcatggaacgaactttagcgttatcattactccgaccgaaatcgtgccagccaaacgcacagggccgatcttggaagatgagagcttctttggtcatgaaattatcatgaaaaaatatatggactccttcgtgaaggtgcagaacatgctgaatgcgatggatcttgttagcgtgcaaatctttggcgaatttgcgggtggtggcattcagaaaggcgtcgattacggagacaaagatttctatgtgtttgacatcctgtctgatagcgggaacgagaaagtttactgggatgactatcgcgtcgaatcgttttgcaccactgtgggtctgaaattagcgcctctgctgggacgtggtagtttcgctgaactgtcccagtacccaaacgatttcaaaagcctggtgaaccgttataatgaattggttgacacggtcggcctggagatggccaataaacacgtctttggtccgcaagcgtcttctgaaactggcctggcagaaggctacgttcttaaacccgtctatccgcgcttctttaatgtgggtacgcgcgtggcgattaaatgcaagaactccaaattttcggagaaagccaaactgatttcgccaattaaagcgaaggttgaactgacggagaacgataaacgtctgctcggaatctttagcgaatatgttacctggaatcgcgtcagtaacgtactgtcacatattggctcagtgcatgccaaagattttgggcgtgtttcgggtctgacgatgaaagacatcattcgcgaagcagcacgcgaaggccatgatctgttgttcgctgataacccgtcggcggtgctgaaggagctgacaggcctcatccagaacacgattcgctccaaatggcacgaagttctggag

SEQ ID NO: 2362 - protein, 346 aa, synthetic construct
  REGION 1..346: note = variant of RNA ligase 2 from Klebsiella phage KP179
MHHHHHHGGSNMFAYYSSLENHTNAKFISKIRGAGFLMHTVEWVAREKIHGTNFSVIITPTEIVPAKRTGPILEDESFFGHEIIMKKYMDSFVKVQNMLNAMDLVSVQIFGEFAGGGIQKGVDYGDKDFYVFDILSDSGNEKVYWDDYRVESFCTTVGLKLAPLLGRGSFAELSQYPNDFKSLVNRYNELVDTVGLEMANKHVFGPQASSETGLAEGYVLKPVYPRFFNVGTRVAIKCKNSKFSEKAKLISPIKAKVELTENDKRLLGIFSEYVTWNRVSNVLSHIGSVHAKDFGRVSGLTMKDIIREAAREGHDLLFADNPSAVLKELTGLIQNTIRSKWHEVLE

SEQ ID NO: 2363 - DNA, 1038 bp, synthetic construct
  misc_feature 1..1038: note = variant of RNA ligase 2 from Klebsiella phage KP179
  source 1..1038: mol_type = other DNA
atgcatcaccatcaccatcacggtggcagcaacatgtttgcgtattattcaagtctggaaaaccataccaatgccaagttcattagcaagatccgtggtgcaggcttcctgatgcacaccgtggaatgggtagctcgcgagaagattcatggaacgaactttagcgttatcattactccgaccgaaatcgtgccagccaaacgcacagggccgatcttggaagatgagagcttctttggtcatgaaattatcatgaaaaaatatatggactccttcgtgaaggtgcagaacatgctgaatgcgatggatcttgttagcgtgcaaatctttggcgaatttgcgggtggtggcattcagaaaggcgtcgattacggagacaaagatttctatgtgtttgacatcctgtctgatagcgggaacgagaaagtttactgggatgactatcgcgtcgaatcgttttgcaccactgtgggtctgaaattagcgcctctgctgggacgtggtagtttcgctgaactgtcccagtacccaaacgatttcaaaagcctggtgaaccgttataatgaattggttgacacggtcggcctggagatggccaataaacacgtctttggtccgcaagcgtcttctgaaactggcctggcagaaggctacgttcttaaacccgtctatccgcgcttctttaatgtgggtacgcgcgtggcgattaaatgcaagaactccaaattttcggagaaagccaaactgatttcgccaattaaagcgaaggttgaactgacggagaacgataaacgtctgctcggaatctttagcgaatatgttacctggaatcgcgtcagtaacgtactgtcacatattggctcagtgaccgccaaagatgcggggcgtgtttcgggtctgacgatgaaagacatcattcgcgaagcagcacgcgaaggccatgatctgttgttcgctgataacccgtcggcggtgctgaaggagctgacaggcctcatccagaacacgattcgctccaaatggcacgaagttctggag

SEQ ID NO: 2364 - protein, 346 aa, synthetic construct
  REGION 1..346: note = variant of RNA ligase 2 from Klebsiella phage KP179
MHHHHHHGGSNMFAYYSSLENHTNAKFISKIRGAGFLMHTVEWVAREKIHGTNFSVIITPTEIVPAKRTGPILEDESFFGHEIIMKKYMDSFVKVQNMLNAMDLVSVQIFGEFAGGGIQKGVDYGDKDFYVFDILSDSGNEKVYWDDYRVESFCTTVGLKLAPLLGRGSFAELSQYPNDFKSLVNRYNELVDTVGLEMANKHVFGPQASSETGLAEGYVLKPVYPRFFNVGTRVAIKCKNSKFSEKAKLISPIKAKVELTENDKRLLGIFSEYVTWNRVSNVLSHIGSVTAKDAGRVSGLTMKDIIREAAREGHDLLFADNPSAVLKELTGLIQNTIRSKWHEVLE

SEQ ID NO: 2365 - DNA, 1038 bp, synthetic construct
  misc_feature 1..1038: note = variant of RNA ligase 2 from Klebsiella phage KP179
  source 1..1038: mol_type = other DNA
atgcatcaccatcaccatcacggtggcagcaacatgtttgcgtattattcaagtctggaaaaccataccaatgccaagttcattagcaagatccgtggtgcaggcttcctgatgcacaccgtggaatgggtagctcgcgagaagattcatggaacgaactttagcgttatcattactccgaccgaaatcgtgccagccaaacgcacagggccgatcttggaagatgagagcttctttggtcatgaaattatcatgaaaaaatatatggactccttcgtgaaggtgcagaacatgctgaatgcgatggatcttgttagcgtgcaaatctttggcgaatttgcgggtggtggcattcagaaaggcgtcgattacggagacaaagatttctatgtgtttgacatcctgtctgatagcgggaacgagaaagtttactgggatgactatcgcgtcgaatcgttttgcaccactgtgggtctgaaattagcgcctctgctgggacgtggtagtttcgctgaactgtcccagtacccaaacgatttcaaaagcctggtgaaccgttataatgaattggttgacacggtcggcctggagatggccaataaacacgtctttggtccgcaagcgtcttctgaaactggcctggcagaaggctacgttcttaaacccgtctatccgcgcttctttaatgtgggtacgcgcgtggcgattaaatgcaagaactccaaattttcggagaaagccaaactgatttcgccaattaaagcgaaggttgaactgacggagaacgataaacgtctgctcggaatctttagcgaatatgttacctggaatcgcgtcagtaacgtactgtcacatattggctcagtgaccgccaaagattttgggcgtgtttcgattctgacgatgaaagacatcattcgcgaagcagcacgcgaaggccatgatctgttgttcgctgataacccgtcggcggtgctgaaggagctgacaggcctcatccagaacacgattcgctccaaatggcacgaagttctggag

SEQ ID NO: 2366 - protein, 346 aa, synthetic construct
  REGION 1..346: note = variant of RNA ligase 2 from Klebsiella phage KP179
MHHHHHHGGSNMFAYYSSLENHTNAKFISKIRGAGFLMHTVEWVAREKIHGTNFSVIITPTEIVPAKRTGPILEDESFFGHEIIMKKYMDSFVKVQNMLNAMDLVSVQIFGEFAGGGIQKGVDYGDKDFYVFDILSDSGNEKVYWDDYRVESFCTTVGLKLAPLLGRGSFAELSQYPNDFKSLVNRYNELVDTVGLEMANKHVFGPQASSETGLAEGYVLKPVYPRFFNVGTRVAIKCKNSKFSEKAKLISPIKAKVELTENDKRLLGIFSEYVTWNRVSNVLSHIGSVTAKDFGRVSILTMKDIIREAAREGHDLLFADNPSAVLKELTGLIQNTIRSKWHEVLE

SEQ ID NO: 2367 - DNA, 1038 bp, synthetic construct
  misc_feature 1..1038: note = variant of RNA ligase 2 from Klebsiella phage KP179
  source 1..1038: mol_type = other DNA
atgcatcaccatcaccatcacggtggcagcaacatgtttgcgtattattcaagtctggaaaaccataccaatgccaagttcattagcaagatccgtggtgcaggcttcctgatgcacaccgtggaatgggtagctcgcgagaagattcatggaacgaactttagcgttatcattactccgaccgaaatcgtgccagccaaacgcacagggccgatcttggaagatgagagcttctttggtcatgaaattatcatgaaaaaatataatgactccttcgtgaaggtgcagaacatgctgaatgcgatggatcttgttagcgtgcaaatctttggcgaatttgcgggtggtggcattcagaaaggcgtcgattacggagacaaagatttctatgtgtttgacatcctgtctgatagcgggaacgagaaagtttactgggatgactatcgcgtcgaatcgttttgcaccactgtgggtctgaaattagcgcctctgctgggacgtggtagtttcgctgaactgtcccagtacccaaacgatttcaaaagcctggtgaaccgttataatgaattggttgacacggtcggcctggagatggccaataaacacgtctttggtccgcaagcgtcttctgaaactggcctggcagaaggctacgttcttaaacccgtctatccgcgcttctttaatgtgggtacgcgcgtggcgattaaatgcaagaactccaaattttcggagaaagccaaactgatttcgccaattaaagcgaaggttgaactgacggagaacgataaacgtctgctcggaatctttagcgaatatgttacctggaatcgcgtcagtaacgtactgtcacatattggctcagtgaccgccaaagattttgggcgtgtttcgggtctgacgatgaaagacatcattcgcgaagcagcacgcgaaggccatgatctgttgttcgctgataacccgtcggcggtgctgaaggagctgacaggcctcatccagaacacgattcgctccaaatggcacgaagttctggag

SEQ ID NO: 2368 - protein, 346 aa, synthetic construct
  REGION 1..346: note = variant of RNA ligase 2 from Klebsiella phage KP179
MHHHHHHGGSNMFAYYSSLENHTNAKFISKIRGAGFLMHTVEWVAREKIHGTNFSVIITPTEIVPAKRTGPILEDESFFGHEIIMKKYNDSFVKVQNMLNAMDLVSVQIFGEFAGGGIQKGVDYGDKDFYVFDILSDSGNEKVYWDDYRVESFCTTVGLKLAPLLGRGSFAELSQYPNDFKSLVNRYNELVDTVGLEMANKHVFGPQASSETGLAEGYVLKPVYPRFFNVGTRVAIKCKNSKFSEKAKLISPIKAKVELTENDKRLLGIFSEYVTWNRVSNVLSHIGSVTAKDFGRVSGLTMKDIIREAAREGHDLLFADNPSAVLKELTGLIQNTIRSKWHEVLE

SEQ ID NO: 2369 - DNA, 1038 bp, synthetic construct
  misc_feature 1..1038: note = variant of RNA ligase 2 from Klebsiella phage KP179
  source 1..1038: mol_type = other DNA
atgcatcaccatcaccatcacggtggcagcaacatgtttgcgtattattcaagtctggaaaaccataccaatgccaagttcattagcaagatccgtggtgcaggcttcctgatgcacaccgtggaatgggtagctcgcgagaagattcatggaacgaactttagcgttatcattactccgaccgaaatcgtgccagccaaacgcacagggccgatcttggaagatgagagcttctttggtcatgaaattatcatgaaaaaatatatggactccttcgtgaaggtgcagaacatgctgaatgcgatggatcttgttagcgtgcaaatctttggcgaatttgcgggtggtggcattcagaaaggcgtcgattacggagacaaagatttctatgtgtttgacatcctgtctgatagcgggaacgagaaagtttactgggatgactatcgcgtcgaatcgttttgcaccactgtgggtctgaaattagcgcctctgctgggacgtggtagtttcgctgaactgtcccagtacccaaacgatttcaaaagcctggtgaaccgttataatgaattggttgacacggtcggcctggagatggccaataaacacgtctttggtccgcaagcgtcttctgaaactggcctggcagaaggctacgttcttaaacccgtctatccgcgcttctttaatgtgggtacgcgcgtggcgattaaatgcaagaactccaaattttcggagaaagccaaactgatttcgccaattaaagcgaaggttgaactgacggagaacgataaacgtctgctcggaatctttagcgaatatgttacctggaatcgcgtcagtaacgtactgtcacatattggccttgtgaccgccaaagattttgggcgtgtttcgggtctgacgatgaaagacatcattcgcgaagcagcacgcgaaggccatgatctgttgttcgctgataacccgtcggcggtgctgaaggagctgacaggcctcatccagaacacgattcgctccaaatggcacgaagttctggag

SEQ ID NO: 2370 - protein, 346 aa, synthetic construct
  REGION 1..346: note = variant of RNA ligase 2 from Klebsiella phage KP179
MHHHHHHGGSNMFAYYSSLENHTNAKFISKIRGAGFLMHTVEWVAREKIHGTNFSVIITPTEIVPAKRTGPILEDESFFGHEIIMKKYMDSFVKVQNMLNAMDLVSVQIFGEFAGGGIQKGVDYGDKDFYVFDILSDSGNEKVYWDDYRVESFCTTVGLKLAPLLGRGSFAELSQYPNDFKSLVNRYNELVDTVGLEMANKHVFGPQASSETGLAEGYVLKPVYPRFFNVGTRVAIKCKNSKFSEKAKLISPIKAKVELTENDKRLLGIFSEYVTWNRVSNVLSHIGLVTAKDFGRVSGLTMKDIIREAAREGHDLLFADNPSAVLKELTGLIQNTIRSKWHEVLE

SEQ ID NO: 2371 - DNA, 1038 bp, synthetic construct
  misc_feature 1..1038: note = variant of RNA ligase 2 from Klebsiella phage KP179
  source 1..1038: mol_type = other DNA
atgcatcaccatcaccatcacggtggcagcaacatgtttgcgtattattcaagtctggaaaaccataccaatgccaagttcattagcaagatccgtggtgcaggcttcctgatgcacaccgtggaatgggtagctcgcgagaagattcatggaacgaactttagcgttatcattactccgaccgaaatcgtgccagccaaacgcacagggccgatcttggaagatgagagcttctttggtcatgaaattatcatgaaaaaatatatggactccttcgtgaaggtgcagaacatgctgaatgcgatggatcttgttagcgtgcaaatctttggcgaatttgcgggtggtggcattcagaaaggcgtcgattacggagacaaagatttctatgtgtttgacatcctgtctgatagcgggaacgagaaagtttactgggatgactatcgcgtcgaatcgttttgcaccactgtgggtctgaaattagcgcctctgctgggacgtggtagtttcgctgaactgtcccagtacccaaacgatttcaaaagcctggtgaaccgttataatgaattggttgacacggtcggcctggagatggccaataaacacgtctttggtccgcaagcgtcttctgaaactggcctggcagaaggctacgttcttaaacccgtctatccgcgcttctttaatgtgggtacgcgcgtggcgattaaatgcaagaactccaaattttcggagaaagccaaactgatttcgccaattaaagcgaaggttgaactgacggagaacgataaacgtctgctcggaatctttagcgaatatgttacctggaatcgcgtcagtaacgtactgtcacatattggctcagtgaccgccaaagatttttttcgtgtttcgggtctgacgatgaaagacatcattcgcgaagcagcacgcgaaggccatgatctgttgttcgctgataacccgtcggcggtgctgaaggagctgacaggcctcatccagaacacgattcgctccaaatggcacgaagttctggag

SEQ ID NO: 2372 - protein, 346 aa, synthetic construct
  REGION 1..346: note = variant of RNA ligase 2 from Klebsiella phage KP179
MHHHHHHGGSNMFAYYSSLENHTNAKFISKIRGAGFLMHTVEWVAREKIHGTNFSVIITPTEIVPAKRTGPILEDESFFGHEIIMKKYMDSFVKVQNMLNAMDLVSVQIFGEFAGGGIQKGVDYGDKDFYVFDILSDSGNEKVYWDDYRVESFCTTVGLKLAPLLGRGSFAELSQYPNDFKSLVNRYNELVDTVGLEMANKHVFGPQASSETGLAEGYVLKPVYPRFFNVGTRVAIKCKNSKFSEKAKLISPIKAKVELTENDKRLLGIFSEYVTWNRVSNVLSHIGSVTAKDFFRVSGLTMKDIIREAAREGHDLLFADNPSAVLKELTGLIQNTIRSKWHEVLE

SEQ ID NO: 2373 - DNA, 1038 bp, synthetic construct
  misc_feature 1..1038: note = variant of RNA ligase 2 from Klebsiella phage KP179
  source 1..1038: mol_type = other DNA
atgcatcaccatcaccatcacggtggcagcaacatgtttgcgtattattcaagtctggaaaaccataccaatgccaagttcattagcaagatccgtggtgcaggcttcctgatgcacaccgtggaatgggtagctcgcgagaagattcatggaacgaactttagcgttatcattactccgaccgaaatcgtgccagccaaacgcacagggccgatcttggaagatgagagcttctttggtcatgaaattatcatgaaaaaatatatggactccttcgtgaaggtgcagaacatgctgaatgcgatggatcttgttagcgtgcaaatctttggcgaatttgcgggtggtggcattcagaaaggcgtcgattacggagacaaagatttctatgtgtttgacatcctgtctgatagcgggaacgagaaagtttactgggatgactatcgcgtcgaatcgttttgcaccactgtgggtctgaaattagcgcctctgctgggacgtggtagtttcgctgaactgtcccagtacccaaacgatttcaaaagcctggtgaaccgttataatgaattggttgacacggtcggcctggagatggccaataaacacgtctttggtccgcaagcgtcttctgaaactggcctggcagaaggctacgttcttaaacccgtctatccgcgcttctttaatgtgggtacgcgcgtggcgattaaatgcaagaactccaaattttcggagaaagccaaactgatttcgccaattaaagcgaaggttgaactgacggagaacgataaacgtctgctcggaatctttagcgaatatgttacctggaatcgcgtcagtaacgtactgtcacatattggctcagtgaccgccaaagattttgggcgtatttcgggtctgacgatgaaagacatcattcgcgaagcagcacgcgaaggccatgatctgttgttcgctgataacccgtcggcggtgctgaaggagctgacaggcctcatccagaacacgattcgctccaaatggcacgaagttctggag

SEQ ID NO: 2374 - protein, 346 aa, synthetic construct
  REGION 1..346: note = variant of RNA ligase 2 from Klebsiella phage KP179
MHHHHHHGGSNMFAYYSSLENHTNAKFISKIRGAGFLMHTVEWVAREKIHGTNFSVIITPTEIVPAKRTGPILEDESFFGHEIIMKKYMDSFVKVQNMLNAMDLVSVQIFGEFAGGGIQKGVDYGDKDFYVFDILSDSGNEKVYWDDYRVESFCTTVGLKLAPLLGRGSFAELSQYPNDFKSLVNRYNELVDTVGLEMANKHVFGPQASSETGLAEGYVLKPVYPRFFNVGTRVAIKCKNSKFSEKAKLISPIKAKVELTENDKRLLGIFSEYVTWNRVSNVLSHIGSVTAKDFGRISGLTMKDIIREAAREGHDLLFADNPSAVLKELTGLIQNTIRSKWHEVLE

SEQ ID NO: 2375 - DNA, 1038 bp, synthetic construct
  misc_feature 1..1038: note = variant of RNA ligase 2 from Klebsiella phage KP179
  source 1..1038: mol_type = other DNA
atgcatcaccatcaccatcacggtggcagcaacatgtttgcgtattattcaagtctggaaaaccataccaatgccaagttcattagcaagatccgtggtgcaggcttcctgatgcacaccgtggaatgggtagctcgcgagaagattcatggaacgaactttagcgttatcattactccgaccgaaatcgtgccagccaaacgcacagggccgatcttggaagatgagagcttctttggtcatgaaattatcatgaaaaaatatatggactccttcgtgaaggtgcagaacatgctgaatgcgatggatcttgttagcgtgcaaatctttggcgaatttgcgggtggtggcattcagaaaggcgtcgattacacggacaaagatttctatgtgtttgacatcctgtctgatagcgggaacgagaaagtttactgggatgactatcgcgtcgaatcgttttgcaccactgtgggtctgaaattagcgcctctgctgggacgtggtagtttcgctgaactgtcccagtacccaaacgatttcaaaagcctggtgaaccgttataatgaattggttgacacggtcggcctggagatggccaataaacacgtctttggtccgcaagcgtcttctgaaactggcctggcagaaggctacgttcttaaacccgtctatccgcgcttctttaatgtgggtacgcgcgtggcgattaaatgcaagaactccaaattttcggagaaagccaaactgatttcgccaattaaagcgaaggttgaactgacggagaacgataaacgtctgctcggaatctttagcgaatatgttacctggaatcgcgtcagtaacgtactgtcacatattggctcagtgaccgccaaagattttgggcgtgtttcgggtctgacgatgaaagacatcattcgcgaagcagcacgcgaaggccatgatctgttgttcgctgataacccgtcggcggtgctgaaggagctgacaggcctcatccagaacacgattcgctccaaatggcacgaagttctggag

SEQ ID NO: 2376 - protein, 346 aa, synthetic construct
  REGION 1..346: note = variant of RNA ligase 2 from Klebsiella phage KP179
MHHHHHHGGSNMFAYYSSLENHTNAKFISKIRGAGFLMHTVEWVAREKIHGTNFSVIITPTEIVPAKRTGPILEDESFFGHEIIMKKYMDSFVKVQNMLNAMDLVSVQIFGEFAGGGIQKGVDYTDKDFYVFDILSDSGNEKVYWDDYRVESFCTTVGLKLAPLLGRGSFAELSQYPNDFKSLVNRYNELVDTVGLEMANKHVFGPQASSETGLAEGYVLKPVYPRFFNVGTRVAIKCKNSKFSEKAKLISPIKAKVELTENDKRLLGIFSEYVTWNRVSNVLSHIGSVTAKDFGRVSGLTMKDIIREAAREGHDLLFADNPSAVLKELTGLIQNTIRSKWHEVLE

SEQ ID NO: 2377 - DNA, 1038 bp, synthetic construct
  misc_feature 1..1038: note = variant of RNA ligase 2 from Klebsiella phage KP179
  source 1..1038: mol_type = other DNA
atgcatcaccatcaccatcacggtggcagcaacatgtttgcgtattattcaagtctggaaaaccataccaatgccaagttcattagcaagatccgtggtgcaggcttcctgatgcacaccgtggaatgggtagctcgcgagaagattcatggaacgaactttagcgttatcattactccgaccgaaatcgtgccagccaaacgcacagggccgatcttggaagatgagagcttctttggtcatgaaattatcatgaaaaaatatatggactccttcgtgaaggtgcagaacatgctgaatgcgatggatcttgttagcgtgcaaatctttggcgaatttgcgggtggtggcattcagaaaggcgtcgattacggagacaaagatttctatgtgtttgacatcctgtctgatagcgggaacgagaaagtttactgggatgactatcgcgtcgaatcgttttgcaccactgtgggtctgaaattagcgcctctgctgggacgtggtagtttcgctgaactgtcccagtacccaaacgatttcaaaagcctggtgaaccgttataatgaattggttgacacggtcggcctggagatggccaataaacacgtctttggtccgcaagcgtcttctgaaactggcctggcagaaggctacgttcttaaacccgtctatccgcgcttctttaatgtgggtacgcgcgtggcgattaaatgcaagaactccaaattttcggagaaagccaaactgatttcgccaattaaagcgaaggttgaactgacggagaacgataaacgtctgctcggaatctttagcgaatatgttacctggaatcgcgtcagtaacgtactgtcacatattggctcagtgaccgccaaagattttgggcgtgtttcgggtctgacgatgaaagacatcattcgcgaagcagcacgcgaaggccatgagctgttgttcgctgataacccgtcggcggtgctgaaggagctgacaggcctcatccagaacacgattcgctccaaatggcacgaagttctggag

SEQ ID NO: 2378 - protein, 346 aa, synthetic construct
  REGION 1..346: note = variant of RNA ligase 2 from Klebsiella phage KP179
MHHHHHHGGSNMFAYYSSLENHTNAKFISKIRGAGFLMHTVEWVAREKIHGTNFSVIITPTEIVPAKRTGPILEDESFFGHEIIMKKYMDSFVKVQNMLNAMDLVSVQIFGEFAGGGIQKGVDYGDKDFYVFDILSDSGNEKVYWDDYRVESFCTTVGLKLAPLLGRGSFAELSQYPNDFKSLVNRYNELVDTVGLEMANKHVFGPQASSETGLAEGYVLKPVYPRFFNVGTRVAIKCKNSKFSEKAKLISPIKAKVELTENDKRLLGIFSEYVTWNRVSNVLSHIGSVTAKDFGRVSGLTMKDIIREAAREGHELLFADNPSAVLKELTGLIQNTIRSKWHEVLE

SEQ ID NO: 2379 - DNA, 1038 bp, synthetic construct
  misc_feature 1..1038: note = variant of RNA ligase 2 from Klebsiella phage KP179
  source 1..1038: mol_type = other DNA
atgcatcaccatcaccatcacggtggcagcaacatgtttgcgtattattcaagtctggaaaaccataccaatgccaagttcattagcaagatccgtggtgcaggcttcctgatgcacaccgtggaatgggtagctcgcgagaagattcatggaacgaactttagcgttatcattactccgaccgaaatcgtgccagccaaacgcacagggccgatcttggaagatgagagcttctttggtcatgaaattatcatgaaaaaatatatggactccttcgtgaagtgtcagaacatgctgaatgcgatggatcttgttagcgtgcaaatctttggcgaatttgcgggtggtggcattcagaaaggcgtcgattacggagacaaagatttctatgtgtttgacatcctgtctgatagcgggaacgagaaagtttactgggatgactatcgcgtcgaatcgttttgcaccactgtgggtctgaaattagcgcctctgctgggacgtggtagtttcgctgaactgtcccagtacccaaacgatttcaaaagcctggtgaaccgttataatgaattggttgacacggtcggcctggagatggccaataaacacgtctttggtccgcaagcgtcttctgaaactggcctggcagaaggctacgttcttaaacccgtctatccgcgcttctttaatgtgggtacgcgcgtggcgattaaatgcaagaactccaaattttcggagaaagccaaactgatttcgccaattaaagcgaaggttgaactgacggagaacgataaacgtctgctcggaatctttagcgaatatgttacctggaatcgcgtcagtaacgtactgtcacatattggctcagtgaccgccaaagattttgggcgtgtttcgggtctgacgatgaaagacatcattcgcgaagcagcacgcgaaggccatgatctgttgttcgctgataacccgtcggcggtgctgaaggagctgacaggcctcatccagaacacgattcgctccaaatggcacgaagttctggag

SEQ ID NO: 2380 - protein, 346 aa, synthetic construct
  REGION 1..346: note = variant of RNA ligase 2 from Klebsiella phage KP179
MHHHHHHGGSNMFAYYSSLENHTNAKFISKIRGAGFLMHTVEWVAREKIHGTNFSVIITPTEIVPAKRTGPILEDESFFGHEIIMKKYMDSFVKCQNMLNAMDLVSVQIFGEFAGGGIQKGVDYGDKDFYVFDILSDSGNEKVYWDDYRVESFCTTVGLKLAPLLGRGSFAELSQYPNDFKSLVNRYNELVDTVGLEMANKHVFGPQASSETGLAEGYVLKPVYPRFFNVGTRVAIKCKNSKFSEKAKLISPIKAKVELTENDKRLLGIFSEYVTWNRVSNVLSHIGSVTAKDFGRVSGLTMKDIIREAAREGHDLLFADNPSAVLKELTGLIQNTIRSKWHEVLE

SEQ ID NO: 2381 - DNA, 1038 bp, synthetic construct
  misc_feature 1..1038: note = variant of RNA ligase 2 from Klebsiella phage KP179
  source 1..1038: mol_type = other DNA
atgcatcaccatcaccatcacggtggcagcaacatgtttgcgtattattcaagtctggaaaaccataccaatgccaagttcattagcaagatccgtggtgcaggcttcctgatgcacaccgtggaatgggtagctcgcgagaagattcatggaacgaactttagcgttatcattactccgaccgaaatcgtgccagccaaacgcacagggccgatcttggaagatgagagcttctttggtcatgaaattatcatgaaaaaatatatggactccttcgtgaaggtgcagaacatgctgaatgcgatggatcttgttagcgtgcaaatctttggcgaatttgcgggtggtggcattcagaaaggcgtcgattacggagacaaagatttctatgtgtttgacatcctgtctgatagcgggaacgagaaagtttactgggatgactatcgcgtcgaatcgttttgcaccactgtgggtctgaaattagcgcctctgctgggacgtggtagtttcgctgaactgtcccagtacccaaacgatttcaaaagcctggtgaaccgttataatgaattggttgacacggtcggcctggagatggccaataaacacgtctttggtccgcaagcgtcttctgaaactggcctggcagaaggctacgttcttaaacccgtctatccgcgcttctttaatgtgggtacgcgcgtggcgattaaatgcaagaactccaaattttcggagaaagccaaactgatttcgccaattaaagcgaaggttgaactgacggagaacgataaacgtctgctcggaatctttagcgaatatgttacctggaatcgcgtcagtaacgtactgtcacatattggctcagtgaccgccaaagattttgggcgtgtttcgggtctgacgatgaaagacatcattcgcgaagcagcacgcgaaggccatgatctgttgttcgctgataacccgtcggcggtgctgaaggagctgacaggcctcatccagaacacggtgcgctccaaatggcacgaagttctggag

SEQ ID NO: 2382 - protein, 346 aa, synthetic construct
  REGION 1..346: note = variant of RNA ligase 2 from Klebsiella phage KP179
MHHHHHHGGSNMFAYYSSLENHTNAKFISKIRGAGFLMHTVEWVAREKIHGTNFSVIITPTEIVPAKRTGPILEDESFFGHEIIMKKYMDSFVKVQNMLNAMDLVSVQIFGEFAGGGIQKGVDYGDKDFYVFDILSDSGNEKVYWDDYRVESFCTTVGLKLAPLLGRGSFAELSQYPNDFKSLVNRYNELVDTVGLEMANKHVFGPQASSETGLAEGYVLKPVYPRFFNVGTRVAIKCKNSKFSEKAKLISPIKAKVELTENDKRLLGIFSEYVTWNRVSNVLSHIGSVTAKDFGRVSGLTMKDIIREAAREGHDLLFADNPSAVLKELTGLIQNTVRSKWHEVLE

SEQ ID NO: 2383 - DNA, 1038 bp, synthetic construct
  misc_feature 1..1038: note = variant of RNA ligase 2 from Klebsiella phage KP179
  source 1..1038: mol_type = other DNA
atgcatcaccatcaccatcacggtggcagcaacatgtttgcgtattattcaagtctggaaaaccataccaatgccaagttcattagcaagatccgtggtgcaggcttcctgatgcacaccgtggaatgggtagctcgcgagaagattcatggaacgaactttagcgttatcattactccgaccgaaatcgtgccagccaaacgcacagggccgatcttggaagatgagagcttctttggtcatgaaattatcatgaaaaaatatatggactccttcgtgaaggtgcagaacatgctgaatgcgatggatcttgttagcgtgcaaatctttggcgaatttgcgggtggtggcattcagaaaggcgtcgattacggagacaaagatttctatgtgtttgacatcctgtctgatagcgggaacgagaaagtttactgggatgactatcgcgtcgaatcgttttgcaccactgtgggtctgaaattagcgcctctgctgggacgtggtagtttcgctgaactgtcccagtacccaaacgatttcaaaagcctggtgaaccgttataatgaattggttgacacggtcggcctggagatggccaataaacacgtctttggtccgcaagcgtcttctgaaactggcctggcagaaggctacgttcttaaacccgtctatccgcgcttctttaatgtgggtacgcgcgtggcgattaaatgcaagaactccaaattttcggagaaagccaaactgatttcgccaattaaagcgaaggttgaactgacggagaacgatgggcgtctgctcggaatctttagcgaatatgttacctggaatcgcgtcagtaacgtactgtcacatattggctcagtgaccgccaaagattttgggcgtgtttcgggtctgacgatgaaagacatcattcgcgaagcagcacgcgaaggccatgatctgttgttcgctgataacccgtcggcggtgctgaaggagctgacaggcctcatccagaacacgattcgctccaaatggcacgaagttctggag

SEQ ID NO: 2384 - protein, 346 aa, synthetic construct
  REGION 1..346: note = variant of RNA ligase 2 from Klebsiella phage KP179
MHHHHHHGGSNMFAYYSSLENHTNAKFISKIRGAGFLMHTVEWVAREKIHGTNFSVIITPTEIVPAKRTGPILEDESFFGHEIIMKKYMDSFVKVQNMLNAMDLVSVQIFGEFAGGGIQKGVDYGDKDFYVFDILSDSGNEKVYWDDYRVESFCTTVGLKLAPLLGRGSFAELSQYPNDFKSLVNRYNELVDTVGLEMANKHVFGPQASSETGLAEGYVLKPVYPRFFNVGTRVAIKCKNSKFSEKAKLISPIKAKVELTENDGRLLGIFSEYVTWNRVSNVLSHIGSVTAKDFGRVSGLTMKDIIREAAREGHDLLFADNPSAVLKELTGLIQNTIRSKWHEVLE

SEQ ID NO: 2385 - DNA, 1038 bp, synthetic construct
  misc_feature 1..1038: note = variant of RNA ligase 2 from Klebsiella phage KP179
  source 1..1038: mol_type = other DNA
atgcatcaccatcaccatcacggtggcagcaacatgtttgcgtattattcaagtctggaaaaccataccaatgccaagttcattagcaagatccgtggtgcaggcttcctgatgcacaccgtggaatgggtagctcgcgagaagattcatggaacgaactttagcgttatcattactccgaccgaaatcgtgccagccaaacgcacagggccgatcttggaagatgagagcttctttggtcatgaaattatcatgaaaaaatatatggactccttcgtgaaggtgcagaacatgctgaatgcgatggatcttgttagcgtgcaaatctttggcgaatttgcgggtggtggcattcagaaaggcgtcgattacggagacaaagatttctatgtgtttgacatcctgtctgatagcgggaacgagaaagtttactgggatgactatcgcgtcgaatcgttttgcaccactgtgggtctgaaattagcgcctctgctgggacgtggtagtttcgctgaactgtcccagtacccaaacgatttcaaaagcctggtgaaccgttataatgaattggttgacacggtcggcctggagatggccaataaacacgtctttggtccgcaagcgtcttctgaaactggcctggcagaaggctacgttcttaaacccgtctatccgcgcttctttaatgtgggtacgcgcgtggcgattaaatgcaagaactccaaattttcggagaaagccaaactgatttcgccaattaaagcgaaggttgaactgacggagaacgataaacgtctgctcggaatctttagcgaatatgttacctggaatcgcgtcagtaacgtactgtcacatattggctcagtgaccgccaaagatttttcgcgtgtttcgggtctgacgatgaaagacatcattcgcgaagcagcacgcgaaggccatgatctgttgttcgctgataacccgtcggcggtgctgaaggagctgacaggcctcatccagaacacgattcgctccaaatggcacgaagttctggag

SEQ ID NO: 2386 - protein, 346 aa, synthetic construct
  REGION 1..346: note = variant of RNA ligase 2 from Klebsiella phage KP179
MHHHHHHGGSNMFAYYSSLENHTNAKFISKIRGAGFLMHTVEWVAREKIHGTNFSVIITPTEIVPAKRTGPILEDESFFGHEIIMKKYMDSFVKVQNMLNAMDLVSVQIFGEFAGGGIQKGVDYGDKDFYVFDILSDSGNEKVYWDDYRVESFCTTVGLKLAPLLGRGSFAELSQYPNDFKSLVNRYNELVDTVGLEMANKHVFGPQASSETGLAEGYVLKPVYPRFFNVGTRVAIKCKNSKFSEKAKLISPIKAKVELTENDKRLLGIFSEYVTWNRVSNVLSHIGSVTAKDFSRVSGLTMKDIIREAAREGHDLLFADNPSAVLKELTGLIQNTIRSKWHEVLE

SEQ ID NO: 2387 - DNA, 1038 bp, synthetic construct
  misc_feature 1..1038: note = variant of RNA ligase 2 from Klebsiella phage KP179
  source 1..1038: mol_type = other DNA
atgcatcaccatcaccatcacggtggcagcaacatgtttgcgtattattcaagtctggaaaaccataccaatgccaagttcattagcaagatccgtggtgcaggcttcctgatgcacaccgtggaatgggtagctcgcgagaagattcatggaacgaactttagcgttatcattactccgaccgaaatcgtgccagccaaacgcacagggccgatcttggaagatgagagcttctttggtcatgaaattatcatgaaaaaatatatggactccttcgtgaaggtgcagaacatgctgaatgcgatggatcttgttagcgtgcaaatctttggcgaatttgcgggtggtggcattcagaaaggcgtcgattacggagacaaagatttctatgtgtttgacatcctgtctgatagcgggaacgagaaagtttactgggatgactatcgcgtcgaatcgttttgcaccactgtgggtctgaaattagcgcctctgctgggacgtggtagtttcgctgaactgtcccagtacccaaacgatttcaaaagcctggtgaaccgttataatgaattggttgacacggtcggcctggagatggccaataaacacgtctttggtccgcaagcgtcttctgaaactggcctggcagaaggctacgttcttaaacccgtctatccgcgcttctttaatgtgggtacgcgcgtggcgattaaatgcaagaactccaaattttcggagaaagccaaactgatttcgccaattaaagcgaaggttgaactgacggagaacgataaacgtctgctcggaatctttagcgaatatgttacctggaatcgcgtcagtaacgtactgtcacatattggctcacctaccgccaaagattttgggcgtgtttcgggtctgacgatgaaagacatcattcgcgaagcagcacgcgaaggccatgatctgttgttcgctgataacccgtcggcggtgctgaaggagctgacaggcctcatccagaacacgattcgctccaaatggcacgaagttctggag

SEQ ID NO: 2388 - protein, 346 aa, synthetic construct
  REGION 1..346: note = variant of RNA ligase 2 from Klebsiella phage KP179
MHHHHHHGGSNMFAYYSSLENHTNAKFISKIRGAGFLMHTVEWVAREKIHGTNFSVIITPTEIVPAKRTGPILEDESFFGHEIIMKKYMDSFVKVQNMLNAMDLVSVQIFGEFAGGGIQKGVDYGDKDFYVFDILSDSGNEKVYWDDYRVESFCTTVGLKLAPLLGRGSFAELSQYPNDFKSLVNRYNELVDTVGLEMANKHVFGPQASSETGLAEGYVLKPVYPRFFNVGTRVAIKCKNSKFSEKAKLISPIKAKVELTENDKRLLGIFSEYVTWNRVSNVLSHIGSPTAKDFGRVSGLTMKDIIREAAREGHDLLFADNPSAVLKELTGLIQNTIRSKWHEVLE

SEQ ID NO: 2389 - DNA, 1038 bp, synthetic construct
  misc_feature 1..1038: note = variant of RNA ligase 2 from Klebsiella phage KP179
  source 1..1038: mol_type = other DNA
atgcatcaccatcaccatcacggtggcagcaacatgtttgcgtattattcaagtctggaaaaccataccaatgccaagttcattagcaagatccgtggtgcaggcttcctgatgcacaccgtggaatgggtagctcgcgagaagattcatggaacgaactttagcgttatcattactccgaccgaaatcgtgccagccaaacgcacagggccgatcttggaagatgagagcttctttggtcatgaaattatcatgaaaaaatatatggactccttcgtgaaggtgcagaacatgctgaatgcgatggatcttgttagcgtgcaaatctttggcgaatttgcgggtggtggcattcagaaaggcgtcgattacggagacaaagatttctatgtgtttgacatcctgtctgatagcgggaacgagaaagtttactgggatgactatcgcgtcgaatcgttttgcaccactgtgggtctgaaattagcgcctctgctgggacgtggtagtttcgctgaactgtcccagtacccaaacgatttcaaaagcctggtgaaccgttataatgaattggttgacacggtcggcctggagatggccaataaacacgtctttggtccgcaagcgtcttctgaaattggcctggcagaaggctacgttcttaaacccgtctatccgcgcttctttaatgtgggtacgcgcgtggcgattaaatgcaagaactccaaattttcggagaaagccaaactgatttcgccaattaaagcgaaggttgaactgacggagaacgataaacgtctgctcggaatctttagcgaatatgttacctggaatcgcgtcagtaacgtactgtcacatattggctcagtgaccgccaaagattttgggcgtgtttcgggtctgacgatgaaagacatcattcgcgaagcagcacgcgaaggccatgatctgttgttcgctgataacccgtcggcggtgctgaaggagctgacaggcctcatccagaacacgattcgctccaaatggcacgaagttctggag

SEQ ID NO: 2390 - protein, 346 aa, synthetic construct
  REGION 1..346: note = variant of RNA ligase 2 from Klebsiella phage KP179
MHHHHHHGGSNMFAYYSSLENHTNAKFISKIRGAGFLMHTVEWVAREKIHGTNFSVIITPTEIVPAKRTGPILEDESFFGHEIIMKKYMDSFVKVQNMLNAMDLVSVQIFGEFAGGGIQKGVDYGDKDFYVFDILSDSGNEKVYWDDYRVESFCTTVGLKLAPLLGRGSFAELSQYPNDFKSLVNRYNELVDTVGLEMANKHVFGPQASSEIGLAEGYVLKPVYPRFFNVGTRVAIKCKNSKFSEKAKLISPIKAKVELTENDKRLLGIFSEYVTWNRVSNVLSHIGSVTAKDFGRVSGLTMKDIIREAAREGHDLLFADNPSAVLKELTGLIQNTIRSKWHEVLE

SEQ ID NO: 2391 - DNA, 1038 bp, synthetic construct
  misc_feature 1..1038: note = variant of RNA ligase 2 from Klebsiella phage KP179
  source 1..1038: mol_type = other DNA
atgcatcaccatcaccatcacggtggcagcaacatgtttgcgtattattcaagtctggaaaaccataccaatgccaagttcattagcaagatccgtggtgcaggcttcctgatgcacaccgtggaatgggtagctcgcgagaagattcatggaacgaactttagcgttatcattactccgaccgaaatcgtgccagccaaacgcacagggccgatcttggaagatgagagcttctttggtcatgaaattatcatgaaaaaatatatggactccttcgtgaaggtgcagaacatgctgaatgcgatggatcttgttagcgtgcaaatctttggcgaatttgcgggtggtggcattcagaaaggcgtcgattacggagacaaagatttctatgtgtttgacatcctgtctgatagcgggaacgagaaagtttactgggatgactatcgcgtcgaatcgttttgcaccactgtgggtctgaaattagcgcctctgctgggacgtggtagtttcgctgaactgtcccagtacccaaacgatttcaaaagcctggtgaaccgttataatgaattggttgacacggtcggcctggagatggccaataaacacgtctttggtccgcaagcgtcttctgaaactggcctggcagaaggctacgttcttaaacccgtctatccgcgcttctttaatgtgggtacgcgcgtggcgattaaatgcaagaactccaaattttcggagaaagccaaactgatttcgccaattaaagcgaaggttgaactgacggagaacgataaacgtctgctcggaatctttagcgaatatgttaccgctaatcgcgtcagtaacgtactgtcacatattggctcagtgaccgccaaagattttgggcgtgtttcgggtctgacgatgaaagacatcattcgcgaagcagcacgcgaaggccatgatctgttgttcgctgataacccgtcggcggtgctgaaggagctgacaggcctcatccagaacacgattcgctccaaatggcacgaagttctggag

SEQ ID NO: 2392 - protein, 346 aa, synthetic construct
  REGION 1..346: note = variant of RNA ligase 2 from Klebsiella phage KP179
MHHHHHHGGSNMFAYYSSLENHTNAKFISKIRGAGFLMHTVEWVAREKIHGTNFSVIITPTEIVPAKRTGPILEDESFFGHEIIMKKYMDSFVKVQNMLNAMDLVSVQIFGEFAGGGIQKGVDYGDKDFYVFDILSDSGNEKVYWDDYRVESFCTTVGLKLAPLLGRGSFAELSQYPNDFKSLVNRYNELVDTVGLEMANKHVFGPQASSETGLAEGYVLKPVYPRFFNVGTRVAIKCKNSKFSEKAKLISPIKAKVELTENDKRLLGIFSEYVTANRVSNVLSHIGSVTAKDFGRVSGLTMKDIIREAAREGHDLLFADNPSAVLKELTGLIQNTIRSKWHEVLE

SEQ ID NO: 2393 - DNA, 1038 bp, synthetic construct
  misc_feature 1..1038: note = variant of RNA ligase 2 from Klebsiella phage KP179
  source 1..1038: mol_type = other DNA
atgcatcaccatcaccatcacggtggcagcaacatgtttgcgtattattcaagtctggaaaaccataccaatgccaagttcattagcaagatccgtggtgcaggcttcctgatgcacaccgtggaatgggtagctcgcgagaagattcatggaacgaactttagcgttatcattacttgtaccgaaatcgtgccagccaaacgcacagggccgatcttggaagatgagagcttctttggtcatgaaattatcatgaaaaaatatatggactccttcgtgaaggtgcagaacatgctgaatgcgatggatcttgttagcgtgcaaatctttggcgaatttgcgggtggtggcattcagaaaggcgtcgattacggagacaaagatttctatgtgtttgacatcctgtctgatagcgggaacgagaaagtttactgggatgactatcgcgtcgaatcgttttgcaccactgtgggtctgaaattagcgcctctgctgggacgtggtagtttcgctgaactgtcccagtacccaaacgatttcaaaagcctggtgaaccgttataatgaattggttgacacggtcggcctggagatggccaataaacacgtctttggtccgcaagcgtcttctgaaactggcctggcagaaggctacgttcttaaacccgtctatccgcgcttctttaatgtgggtacgcgcgtggcgattaaatgcaagaactccaaattttcggagaaagccaaactgatttcgccaattaaagcgaaggttgaactgacggagaacgataaacgtctgctcggaatctttagcgaatatgttacctggaatcgcgtcagtaacgtactgtcacatattggctcagtgaccgccaaagattttgggcgtgtttcgggtctgacgatgaaagacatcattcgcgaagcagcacgcgaaggccatgatctgttgttcgctgataacccgtcggcggtgctgaaggagctgacaggcctcatccagaacacgattcgctccaaatggcacgaagttctggag

SEQ ID NO: 2394 - protein, 346 aa, synthetic construct
  REGION 1..346: note = variant of RNA ligase 2 from Klebsiella phage KP179
MHHHHHHGGSNMFAYYSSLENHTNAKFISKIRGAGFLMHTVEWVAREKIHGTNFSVIITCTEIVPAKRTGPILEDESFFGHEIIMKKYMDSFVKVQNMLNAMDLVSVQIFGEFAGGGIQKGVDYGDKDFYVFDILSDSGNEKVYWDDYRVESFCTTVGLKLAPLLGRGSFAELSQYPNDFKSLVNRYNELVDTVGLEMANKHVFGPQASSETGLAEGYVLKPVYPRFFNVGTRVAIKCKNSKFSEKAKLISPIKAKVELTENDKRLLGIFSEYVTWNRVSNVLSHIGSVTAKDFGRVSGLTMKDIIREAAREGHDLLFADNPSAVLKELTGLIQNTIRSKWHEVLE

SEQ ID NO: 2395 - DNA, 1038 bp, synthetic construct
  misc_feature 1..1038: note = variant of RNA ligase 2 from Klebsiella phage KP179
  source 1..1038: mol_type = other DNA
atgcatcaccatcaccatcacggtggcagcaacatgtttgcgtattattcaagtctggaaaaccataccaatgccaagttcattagcaagatccgtggtgcaggcttcctgatgcacaccgtggaatgggtagctcgcgagaagattcatggaacgaactttagcgttatcattactccgaccgaaatcgtgccagccaaacgcacagggccgatcttggaagatgagagcttctttggtcatgaaattatcatgaaaaaatatatggactccttcgtgaaggtgcagaacatgctgaatgcgatggatcttgttagcgtgcaaatctttggcgaatttgcgggtggtggcattcagaaaggcgtcgattacggagacaaagatttctatgtgtttgacatcctgtctgatagcgggaacgagaaagtttactgggatgactatcgcgtcgaatcgttttgcaccactgtgggtctgaaattagcgcctctgctgggacgtggtagtttcgctgaactgtcccagtacccaaacgatttcaaaagcctggtgaaccgttataatgaattggttgacacggtcggcctggagatggccaataaacacgtctttggtccgcaagcgtcttctgaaactggcgcggcagaaggctacgttcttaaacccgtctatccgcgcttctttaatgtgggtacgcgcgtggcgattaaatgcaagaactccaaattttcggagaaagccaaactgatttcgccaattaaagcgaaggttgaactgacggagaacgataaacgtctgctcggaatctttagcgaatatgttacctggaatcgcgtcagtaacgtactgtcacatattggctcagtgaccgccaaagattttgggcgtgtttcgggtctgacgatgaaagacatcattcgcgaagcagcacgcgaaggccatgatctgttgttcgctgataacccgtcggcggtgctgaaggagctgacaggcctcatccagaacacgattcgctccaaatggcacgaagttctggag

SEQ ID NO: 2396 - protein, 346 aa, synthetic construct
  REGION 1..346: note = variant of RNA ligase 2 from Klebsiella phage KP179
MHHHHHHGGSNMFAYYSSLENHTNAKFISKIRGAGFLMHTVEWVAREKIHGTNFSVIITPTEIVPAKRTGPILEDESFFGHEIIMKKYMDSFVKVQNMLNAMDLVSVQIFGEFAGGGIQKGVDYGDKDFYVFDILSDSGNEKVYWDDYRVESFCTTVGLKLAPLLGRGSFAELSQYPNDFKSLVNRYNELVDTVGLEMANKHVFGPQASSETGAAEGYVLKPVYPRFFNVGTRVAIKCKNSKFSEKAKLISPIKAKVELTENDKRLLGIFSEYVTWNRVSNVLSHIGSVTAKDFGRVSGLTMKDIIREAAREGHDLLFADNPSAVLKELTGLIQNTIRSKWHEVLE

SEQ ID NO: 2397 - DNA, 1038 bp, synthetic construct
  misc_feature 1..1038: note = variant of RNA ligase 2 from Klebsiella phage KP179
  source 1..1038: mol_type = other DNA
atgcatcaccatcaccatcacggtggcagcaacatgtttgcgtattattcaagtctggaaaaccataccaatgccaagttcattagcaagatccgtggtgcaggcttcctgatgcacaccgtggaatgggtagctcgcgagaagattcatggaacgaactttagcgttatcattactccgaccgaaatcgtgccagccaaacgcacagggccgatcttggaagatgagagcttctttggtcatgaaattatcatgaaaaaatatatggactccttcgtgaaggtgcagaacatgctgaatgcgatggatcttgttagcgtgcaaatctttggcgaatttgcgggtggtggcattcagaaaggcgtcgattacggagacaaagatttctatgtgtttgacatcctgtctgatagcgggaacgagaaagtttactgggatgactatcgcgtcgaatcgttttgcaccactgtgggtctgaaattagcgcctctgctgggacgtggtagtttcgctgaactgtcccagtacccaaacgatttcaaaagcctggtgaaccgttataatgaattggttgacacggtcggcctggagatggccaataaacacgtctttggtccgcaagcgtcttctgaaactggcctggcagaaggctacgttcttaaacccgtctatccgcgcttctttaatgtgggtacgcgcgtggcgattaaatgcaagaactccaaattttcggagaaagccaaactgatttcgccaattaaagcgaaggttgaactgacggagaacgataaacgtctgctcggaatctttagcgaatatgttacctggaatcgcgtcagtaacgtactgtcacatattggctcagtgaccgccaaagattttgggcgtgtttcgggtctgacgatgaaagacatcattcgcgaagcagcacgcgaaggccatgatctgttgttcgctgataacccgtcggatgtgctgaaggagctgacaggcctcatccagaacacgattcgctccaaatggcacgaagttctggag

SEQ ID NO: 2398 - protein, 346 aa, synthetic construct
  REGION 1..346: note = variant of RNA ligase 2 from Klebsiella phage KP179
MHHHHHHGGSNMFAYYSSLENHTNAKFISKIRGAGFLMHTVEWVAREKIHGTNFSVIITPTEIVPAKRTGPILEDESFFGHEIIMKKYMDSFVKVQNMLNAMDLVSVQIFGEFAGGGIQKGVDYGDKDFYVFDILSDSGNEKVYWDDYRVESFCTTVGLKLAPLLGRGSFAELSQYPNDFKSLVNRYNELVDTVGLEMANKHVFGPQASSETGLAEGYVLKPVYPRFFNVGTRVAIKCKNSKFSEKAKLISPIKAKVELTENDKRLLGIFSEYVTWNRVSNVLSHIGSVTAKDFGRVSGLTMKDIIREAAREGHDLLFADNPSDVLKELTGLIQNTIRSKWHEVLE

SEQ ID NO: 2399 - DNA, 1038 bp, synthetic construct
  misc_feature 1..1038: note = variant of RNA ligase 2 from Klebsiella phage KP179
  source 1..1038: mol_type = other DNA
atgcatcaccatcaccatcacggtggcagcaacatgtttgcgtattattcaagtctggaaaaccataccaatgccaagttcattagcaagatccgtggtgcaggcttcctgatgcacaccgtggaatgggtagctcgcgagaagattcatggaacgaactttagcgttatcattactccgaccgaaatcgtgccagccaaacgcacagggccgatcttggaagatgagagcttctttggtcatgaaattatcatgaaaaaatatatggactccttcgtgaaggtgcagaacatgctgaatgcgatggatcttgttagcgtgcaaatctttggcgaatttgcgggtggtggcattcagaaaggcgtcgattacggagacaaagatttctatgtgtttgacatcctgtctgatagcgggaacgagaaagtttactgggatgactatcgcgtcgaatcgttttgcaccactgtgggtctgaaattagcgcctctgctgggacgtggtagtttcgctgaactgtcccagtacccaaacgatttcaaaagcctggtgtgtcgttataatgaattggttgacacggtcggcctggagatggccaataaacacgtctttggtccgcaagcgtcttctgaaactggcctggcagaaggctacgttcttaaacccgtctatccgcgcttctttaatgtgggtacgcgcgtggcgattaaatgcaagaactccaaattttcggagaaagccaaactgatttcgccaattaaagcgaaggttgaactgacggagaacgataaacgtctgctcggaatctttagcgaatatgttacctggaatcgcgtcagtaacgtactgtcacatattggctcagtgaccgccaaagattttgggcgtgtttcgggtctgacgatgaaagacatcattcgcgaagcagcacgcgaaggccatgatctgttgttcgctgataacccgtcggcggtgctgaaggagctgacaggcctcatccagaacacgattcgctccaaatggcacgaagttctggag

SEQ ID NO: 2400 - protein, 346 aa, synthetic construct
  REGION 1..346: note = variant of RNA ligase 2 from Klebsiella phage KP179
MHHHHHHGGSNMFAYYSSLENHTNAKFISKIRGAGFLMHTVEWVAREKIHGTNFSVIITPTEIVPAKRTGPILEDESFFGHEIIMKKYMDSFVKVQNMLNAMDLVSVQIFGEFAGGGIQKGVDYGDKDFYVFDILSDSGNEKVYWDDYRVESFCTTVGLKLAPLLGRGSFAELSQYPNDFKSLVCRYNELVDTVGLEMANKHVFGPQASSETGLAEGYVLKPVYPRFFNVGTRVAIKCKNSKFSEKAKLISPIKAKVELTENDKRLLGIFSEYVTWNRVSNVLSHIGSVTAKDFGRVSGLTMKDIIREAAREGHDLLFADNPSAVLKELTGLIQNTIRSKWHEVLE

SEQ ID NO: 2401 - DNA, 1038 bp, synthetic construct
  misc_feature 1..1038: note = variant of RNA ligase 2 from Klebsiella phage KP179
  source 1..1038: mol_type = other DNA
atgcatcaccatcaccatcacggtggcagcaacatgtttgcgtattattcaagtctggaaaaccataccaatgccaagttcattagcaagatccgtggtgcaggcttcctgatgcacaccgtggaatgggtagctcgcgagaagattcatggaacgaactttagcgttatcattactccgaccgaaatcgtgccagccaaacgcacagggccgatcttggaagatgagagcttctttggtcatgaaattatcatgaaaaaatatatggactccttcgtgaaggtgcagaacatgctgaatgcgatggatcttgttagcgtgcaaatctttggcgaatttgcgggtggtggcattcagaaaggcgtcgattacggagacaaagatttctatgtgtttgacatcctgtctgatagcgggaacgagaaagtttactgggatgactatcgcgtcgaatcgttttgcaccactgtgggtctgaaattagcgcctctgctgggacgtggtagtttcgctgaactgtcccagtacccaaacgatttcaaaagcctggtgaaccgttataatgaattggttgacacggtcggcctggagatggccaataaacacgtctttggtccgcaagcgtcttctgaaactggcctggcagaaggctacgttcttaaacccgtctatccgcgcttctttaatgtgggtacgcgcgtggcgattaaatgcaagaactccaaattttcggagaaagccaaactgatttcgccaattaaagcgaaggttgaactgacggagaacgataaacgtctgctcggaatctttagcgaatatgttacctggaatcgcgtcagtaacgtactgtcacatattggctcagtgaccgccaaagattttgggcgtgtttcgggtctgacgtgtaaagacatcattcgcgaagcagcacgcgaaggccatgatctgttgttcgctgataacccgtcggcggtgctgaaggagctgacaggcctcatccagaacacgattcgctccaaatggcacgaagttctggag

SEQ ID NO: 2402 - protein, 346 aa, synthetic construct
  REGION 1..346: note = variant of RNA ligase 2 from Klebsiella phage KP179
MHHHHHHGGSNMFAYYSSLENHTNAKFISKIRGAGFLMHTVEWVAREKIHGTNFSVIITPTEIVPAKRTGPILEDESFFGHEIIMKKYMDSFVKVQNMLNAMDLVSVQIFGEFAGGGIQKGVDYGDKDFYVFDILSDSGNEKVYWDDYRVESFCTTVGLKLAPLLGRGSFAELSQYPNDFKSLVNRYNELVDTVGLEMANKHVFGPQASSETGLAEGYVLKPVYPRFFNVGTRVAIKCKNSKFSEKAKLISPIKAKVELTENDKRLLGIFSEYVTWNRVSNVLSHIGSVTAKDFGRVSGLTCKDIIREAAREGHDLLFADNPSAVLKELTGLIQNTIRSKWHEVLE

SEQ ID NO: 2403 - DNA, 1038 bp, synthetic construct
  misc_feature 1..1038: note = variant of RNA ligase 2 from Klebsiella phage KP179
  source 1..1038: mol_type = other DNA
atgcatcaccatcaccatcacggtggcagcaacatgtttgcgtattattcaagtctggaaaaccataccaatgccaagttcattagcaagatccgtggtgcaggcttcctgatgcacaccgtggaatgggtagctcgcgagaagattcatggaacgaactttagcgttatcattactccgaccgaaatcgtgccagccaaacgcacagggccgatcttggaagatgagagcttctttggtcatgaaattatcatgaaaaaatatatggactccttcgtgaaggtgcagaacatgctgaatgcgatggatcttgttagcgtgcaaatctttggcgaatttgcgggtggtggcattcagaaaggcgtcgattacggagacaaagatttctatgtgtttgacatcctgtctgatagcgggaacgagaaagtttactgggatgactatcgcgtcgaatcgttttgcaccactgtgggtctgaaattagcgcctctgctgggacgtggtagtttcgctgaactgtcccagtacccaaacgatttcaaaagcctggtgaaccgttataatgaattggttgacacggtcggcctggagatggccaataaacacgtctttggtccgcaagcgtcttctgaaactggcctggcagaaggctacgttcttaaacccgtctatccgcgcttctttaatgtgggtacgcgcgtggcgattaaatgcaagaactccaaattttcggagaaagccaaactgatttcgccaattaaagcgaaggttgaactgacggagaacgataaacgtctgctcggaatctttagcgaatatgttacctggaatcgcgtcagtaacgtactgtcacatattggctcagtgaccgccaaagattttgggcgtgtttcgggtctgacgatgaaagacatcattcgcgaagcagcacgcgaaggccatgatctgttgttcgctgataacccgtcgatggtgctgaaggagctgacaggcctcatccagaacacgattcgctccaaatggcacgaagttctggag

SEQ ID NO: 2404 - protein, 346 aa, synthetic construct
  REGION 1..346: note = variant of RNA ligase 2 from Klebsiella phage KP179
MHHHHHHGGSNMFAYYSSLENHTNAKFISKIRGAGFLMHTVEWVAREKIHGTNFSVIITPTEIVPAKRTGPILEDESFFGHEIIMKKYMDSFVKVQNMLNAMDLVSVQIFGEFAGGGIQKGVDYGDKDFYVFDILSDSGNEKVYWDDYRVESFCTTVGLKLAPLLGRGSFAELSQYPNDFKSLVNRYNELVDTVGLEMANKHVFGPQASSETGLAEGYVLKPVYPRFFNVGTRVAIKCKNSKFSEKAKLISPIKAKVELTENDKRLLGIFSEYVTWNRVSNVLSHIGSVTAKDFGRVSGLTMKDIIREAAREGHDLLFADNPSMVLKELTGLIQNTIRSKWHEVLE

SEQ ID NO: 2405 - DNA, 1038 bp, synthetic construct
  misc_feature 1..1038: note = variant of RNA ligase 2 from Klebsiella phage KP179
  source 1..1038: mol_type = other DNA
atgcatcaccatcaccatcacggtggcagcaacatgtttgcgtattattcaagtctggaaaaccataccaatgccaagttcattagcaagatccgtggtgcaggcttcctgatgcacaccgtggaatgggtagctcgcgagaagattcatggaacgaactttagcgttatcattactccgaccgaaatcgtgccagccaaacgcacagggccgatcttggaagatgagagcttctttggtcatgaaattatcatgaaaaaatatatggactccttcgtgaaggtgcagaacatgctgaatgcgatggatcttgttagcgtgcaaatctttggcgaatttgcgggtggtggcattcagaaaggcgtcgattacggagacaaagatttctatgtgtttgacatcctgtctgatagcgggaacgagaaagtttactgggatgactatcgcgtcgaatcgttttgcaccactgtgggtctgaaattagcgcctctgctgggacgtggtagtttcgctgaactgtcccagtacccaaacgatttcaaaagcctggtgaaccgttataatgaattggttgacacggtcggcctggagatggccaataaacacgtctttggtccgcaagcgtcttctgaaactggcctggcagaaggctacgttcttaaacccgtctatccgcgcttctttaatgtgggtacgcgcgtggcgattaaatgcaagaactccaaattttcggagaaagccaaactgatttcgccaattaaagcgaaggttgaactgacggagaacgataaacgtctgctcggaatctttagcgaatatgttacctggaatcgcgtcagtaacgtactgtcacatattggctcagtgaccgccaaagattttgggcgtgtttcgggtctgctgatgaaagacatcattcgcgaagcagcacgcgaaggccatgatctgttgttcgctgataacccgtcggcggtgctgaaggagctgacaggcctcatccagaacacgattcgctccaaatggcacgaagttctggag

SEQ ID NO: 2406 - protein, 346 aa, synthetic construct
  REGION 1..346: note = variant of RNA ligase 2 from Klebsiella phage KP179
MHHHHHHGGSNMFAYYSSLENHTNAKFISKIRGAGFLMHTVEWVAREKIHGTNFSVIITPTEIVPAKRTGPILEDESFFGHEIIMKKYMDSFVKVQNMLNAMDLVSVQIFGEFAGGGIQKGVDYGDKDFYVFDILSDSGNEKVYWDDYRVESFCTTVGLKLAPLLGRGSFAELSQYPNDFKSLVNRYNELVDTVGLEMANKHVFGPQASSETGLAEGYVLKPVYPRFFNVGTRVAIKCKNSKFSEKAKLISPIKAKVELTENDKRLLGIFSEYVTWNRVSNVLSHIGSVTAKDFGRVSGLLMKDIIREAAREGHDLLFADNPSAVLKELTGLIQNTIRSKWHEVLE

SEQ ID NO: 2407 - DNA, 1038 bp, synthetic construct
  misc_feature 1..1038: note = variant of RNA ligase 2 from Klebsiella phage KP179
  source 1..1038: mol_type = other DNA
atgcatcaccatcaccatcacggtggcagcaacatgtttgcgtattattcaagtctggaaaaccataccaatgccaagttcattagcaagatccgtggtgcaggcttcctgatgcacaccgtggaatgggtagctcgcgagaagattcatggaacgaactttagcgttatcattactccgaccgaaatcgtgccagccaaacgcacagggccgatcttggaagatgagagcttctttggtcatgaaattatcatgaaaaaatatatggactccttcgtgaaggtgcagaacatgctgaatgcgatggatcttgttagcgtgcaaatctttggcgaatttgcgggtggtggcattcagaaaggcgtcgattacggagacaaagatttctatgtgtttgacatcctgtctgatagcgggaacgagaaagtttactgggatgactatcgcgtcgaatcgttttgcaccactgtgggtctgaaattagcgcctctgctgggacgtggtagtttcgctgaactgtcccagtacccaaacgatttcaaaagcctggtgaaccgttataatgaattggttgacacggtcggcctggagatggccaataaacacgtctttggtccgcaagcgtcttctgaaactggcctggcagaaggctacgttcttaaacccgtctatccgcgcttctttaatgtgggtacgcgcgtggcgattaaatgcaagaactccaaattttcggagaaagccaaactgatttcgccaattaaagcgaaggttgaactgacggagaacgataaacgtctgctcggaatctttagcgaatatgttacctggaatcgcgtcagtaacgtactgtcacatattggctcagtgaccgccaaagattttgggcgtgtttcgggtctgacgatgaaagacatcattcgcgaagcaaatcgcgaaggccatgatctgttgttcgctgataacccgtcggcggtgctgaaggagctgacaggcctcatccagaacacgattcgctccaaatggcacgaagttctggag

SEQ ID NO: 2408 - protein, 346 aa, synthetic construct
  REGION 1..346: note = variant of RNA ligase 2 from Klebsiella phage KP179
MHHHHHHGGSNMFAYYSSLENHTNAKFISKIRGAGFLMHTVEWVAREKIHGTNFSVIITPTEIVPAKRTGPILEDESFFGHEIIMKKYMDSFVKVQNMLNAMDLVSVQIFGEFAGGGIQKGVDYGDKDFYVFDILSDSGNEKVYWDDYRVESFCTTVGLKLAPLLGRGSFAELSQYPNDFKSLVNRYNELVDTVGLEMANKHVFGPQASSETGLAEGYVLKPVYPRFFNVGTRVAIKCKNSKFSEKAKLISPIKAKVELTENDKRLLGIFSEYVTWNRVSNVLSHIGSVTAKDFGRVSGLTMKDIIREANREGHDLLFADNPSAVLKELTGLIQNTIRSKWHEVLE

SEQ ID NO: 2409 - DNA, 1038 bp, synthetic construct
  misc_feature 1..1038: note = variant of RNA ligase 2 from Klebsiella phage KP179
  source 1..1038: mol_type = other DNA
atgcatcaccatcaccatcacggtggcagcaacatgtttgcgtattattcaagtctggaaaaccataccaatgccaagttcattagcaagatccgtggtgcaggcttcctgatgcacaccgtggaatgggtagctcgcgagaagattcatggaacgaactttagcgttatcattactccgaccgaaatcgtgccagccaaacgcacagggccgatcttggaagatgagagcttctttggtcatgaaattatcatgaaaaaatatatggactccttcgtgaaggtgcagaacatgctgaatgcgatggatcttgttagcgtgcaaatctttggcgaatttgcgggtggtggcattcagaaaggcgtcgattacggagacaaagatttctatgtgtttgacatcctgtctgatagcgggaacgagaaagtttactgggatgactatcgcgtcgaatcgttttgcaccactgtgggtctgaaattagcgcctctgctgggacgtggtagtttcgctgaactgtcccagtacccaaacgatttcaaaagcctggtgaaccgttataatgaattggttgacacggtcggcctggagatggccaataaacacgtctttggtccgcaagcgtcttctgaaactggcctggcagaaggctacgttcttaaacccgtctatccgcgcttctttaatgtgggtacgcgcgtggcgattaaatgcaagaactccaaattttcggagaaagccaaactgatttcgccaattaaagcgaaggttgaactgacggagaacgataaacgtctgctcggaatctttagcgaatatgttacctggaatcgcgtcagtaacgtactgtcacatattggctcagtgaccgccaaagattttgggcgtgtttgtggtctgacgatgaaagacatcattcgcgaagcagcacgcgaaggccatgatctgttgttcgctgataacccgtcggcggtgctgaaggagctgacaggcctcatccagaacacgattcgctccaaatggcacgaagttctggag

SEQ ID NO: 2410 - protein, 346 aa, synthetic construct
  REGION 1..346: note = variant of RNA ligase 2 from Klebsiella phage KP179
MHHHHHHGGSNMFAYYSSLENHTNAKFISKIRGAGFLMHTVEWVAREKIHGTNFSVIITPTEIVPAKRTGPILEDESFFGHEIIMKKYMDSFVKVQNMLNAMDLVSVQIFGEFAGGGIQKGVDYGDKDFYVFDILSDSGNEKVYWDDYRVESFCTTVGLKLAPLLGRGSFAELSQYPNDFKSLVNRYNELVDTVGLEMANKHVFGPQASSETGLAEGYVLKPVYPRFFNVGTRVAIKCKNSKFSEKAKLISPIKAKVELTENDKRLLGIFSEYVTWNRVSNVLSHIGSVTAKDFGRVCGLTMKDIIREAAREGHDLLFADNPSAVLKELTGLIQNTIRSKWHEVLE

SEQ ID NO: 2411 - DNA, 1038 bp, synthetic construct
  misc_feature 1..1038: note = variant of RNA ligase 2 from Klebsiella phage KP179
  source 1..1038: mol_type = other DNA
atgcatcaccatcaccatcacggtggcagcaacatgtttgcgtattattcaagtctggaaaaccataccaatgccaagttcattagcaagatccgtggtgcaggcttcctgatgcacaccgtggaatgggtagctcgcgagaagattcatggaacgaactttagcgttatcattactccgaccgaaatcgtgccagccaaacgcacagggccgatcttggaagatgagagcttctttggtcatgaaattatcatgaaaaaatatatggactccttcgtgaaggtgcagaacatgctgaatgcgatggatcttgttagcgtgcaaatctttggcgaatttgcgggtggtggcattcagaaaggcgtcgattacggagacaaagatttctatgtgtttgacatcctgtctgatagcgggaacgagaaagtttactgggatgactatcgcgtcgaatcgttttgcaccactgtgggtctgaaattagcgcctctgctgggacgtggtagtttcgctgaactgtcccagtacccaaacgatttcaaaagcctggtgaaccgttataatgaattggttgacacggtcggcctggagatggccaataaacacgtctttggtccgcaagcgtcttctgaaactggcctggcagaaggctacgttcttaaacccgtctatccgcgcttctttaatgtgggtacgcgcgtggcgattaaatgcaagaactccaaattttcggagaaagccaaactgatttcgccaattaaagcgaaggttgaactgacggagaacgataaacgtctgctcggaatctttagcgaatatgttacctggaatcgcgtcagtaacgtactgtcacatattggctcagtgaccgccaaagattttatgcgtgtttcgggtctgacgatgaaagacatcattcgcgaagcagcacgcgaaggccatgatctgttgttcgctgataacccgtcggcggtgctgaaggagctgacaggcctcatccagaacacgattcgctccaaatggcacgaagttctggag

SEQ ID NO: 2412 - protein, 346 aa, synthetic construct
  REGION 1..346: note = variant of RNA ligase 2 from Klebsiella phage KP179
MHHHHHHGGSNMFAYYSSLENHTNAKFISKIRGAGFLMHTVEWVAREKIHGTNFSVIITPTEIVPAKRTGPILEDESFFGHEIIMKKYMDSFVKVQNMLNAMDLVSVQIFGEFAGGGIQKGVDYGDKDFYVFDILSDSGNEKVYWDDYRVESFCTTVGLKLAPLLGRGSFAELSQYPNDFKSLVNRYNELVDTVGLEMANKHVFGPQASSETGLAEGYVLKPVYPRFFNVGTRVAIKCKNSKFSEKAKLISPIKAKVELTENDKRLLGIFSEYVTWNRVSNVLSHIGSVTAKDFMRVSGLTMKDIIREAAREGHDLLFADNPSAVLKELTGLIQNTIRSKWHEVLE

SEQ ID NO: 2413 - DNA, 1038 bp, synthetic construct
  misc_feature 1..1038: note = variant of RNA ligase 2 from Klebsiella phage KP179
  source 1..1038: mol_type = other DNA
atgcatcaccatcaccatcacggtggcagcaacatgtttgcgtattattcaagtctggaaaaccataccaatgccaagttcattagcaagatccgtggtgcaggcttcctgatgcacaccgtggaatgggtagctcgcgagaagattcatggaacgaactttagcgttatcattactccgaccgaaatcgtgccagccaaacgcacagggccgatcttggaagatgagagcttctttggtcatgaaattatcatgaaaaaatatatggactccttcgtgaaggtgcagaacatgctgaatgcgatggatcttgttagcgtgcaaatctttggcgaatttgcgggtggtggcattcagaaaggcgtcgattacggagacaaagatttctatgtgtttgacatcctgtctgatagcgggaacgagaaagtttactgggatgactatcgcgtcgaatcgttttgcaccactgtgggtctgaaattagcgcctctgctgggacgtggtagtttcgctgaactgtcccagtacccaaacgatttcaaaagcctggtgaaccgttataatgaattggttgacacggtcggcctggagatggccaataaacacgtctttggtccgcaagcgtcttctgaaactggcctggcagaaggctacgttcttaaacccgtctatccgcgcttctttaatgtgggtacgcgcgtggcgattaaatgcaagaactccaaattttcggagaaagccaaactgatttcgccaattaaagcgaaggttgaactgacggagaacgataaacgtctgctcggaatctttagcgaatatgttacctggaatcgcgtcagtaacgtactgtcacatattggctcagtgaccgccaaagattttgggcgtgtttcgacgctgacgatgaaagacatcattcgcgaagcagcacgcgaaggccatgatctgttgttcgctgataacccgtcggcggtgctgaaggagctgacaggcctcatccagaacacgattcgctccaaatggcacgaagttctggag

SEQ ID NO: 2414 - protein, 346 aa, synthetic construct
  REGION 1..346: note = variant of RNA ligase 2 from Klebsiella phage KP179
MHHHHHHGGSNMFAYYSSLENHTNAKFISKIRGAGFLMHTVEWVAREKIHGTNFSVIITPTEIVPAKRTGPILEDESFFGHEIIMKKYMDSFVKVQNMLNAMDLVSVQIFGEFAGGGIQKGVDYGDKDFYVFDILSDSGNEKVYWDDYRVESFCTTVGLKLAPLLGRGSFAELSQYPNDFKSLVNRYNELVDTVGLEMANKHVFGPQASSETGLAEGYVLKPVYPRFFNVGTRVAIKCKNSKFSEKAKLISPIKAKVELTENDKRLLGIFSEYVTWNRVSNVLSHIGSVTAKDFGRVSTLTMKDIIREAAREGHDLLFADNPSAVLKELTGLIQNTIRSKWHEVLE

SEQ ID NO: 2415 - DNA, 1038 bp, synthetic construct
  misc_feature 1..1038: note = variant of RNA ligase 2 from Klebsiella phage KP179
  source 1..1038: mol_type = other DNA
atgcatcaccatcaccatcacggtggcagcaacatgtttgcgtattattcaagtctggaaaaccataccaatgccaagttcattagcaagatccgtggtgcaggcttcctgatgcacaccgtggaatgggtagctcgcgagaagattcatggaacgaactttagcgttatcattactccgaccgaaatcgtgccagccaaacgcacagggccgatcttggaagatgagagcttctttggtcatgaaattatcatgaaaaaatatatggactccttcgtgaaggtgcagaacatgctgaatgcgatggatcttgttagcgtgcaaatctttggcgaatttgcgggtggtggcattcagaaaggcgtcgattacggagacaaagatttctatgtgtttgacatcctgtctgatagcgggaacgagaaagtttactgggatgactatcgccttgaatcgttttgcaccactgtgggtctgaaattagcgcctctgctgggacgtggtagtttcgctgaactgtcccagtacccaaacgatttcaaaagcctggtgaaccgttataatgaattggttgacacggtcggcctggagatggccaataaacacgtctttggtccgcaagcgtcttctgaaactggcctggcagaaggctacgttcttaaacccgtctatccgcgcttctttaatgtgggtacgcgcgtggcgattaaatgcaagaactccaaattttcggagaaagccaaactgatttcgccaattaaagcgaaggttgaactgacggagaacgataaacgtctgctcggaatctttagcgaatatgttacctggaatcgcgtcagtaacgtactgtcacatattggctcagtgaccgccaaagattttgggcgtgtttcgggtctgacgatgaaagacatcattcgcgaagcagcacgcgaaggccatgatctgttgttcgctgataacccgtcggcggtgctgaaggagctgacaggcctcatccagaacacgattcgctccaaatggcacgaagttctggag

SEQ ID NO: 2416 - protein, 346 aa, synthetic construct
  REGION 1..346: note = variant of RNA ligase 2 from Klebsiella phage KP179
MHHHHHHGGSNMFAYYSSLENHTNAKFISKIRGAGFLMHTVEWVAREKIHGTNFSVIITPTEIVPAKRTGPILEDESFFGHEIIMKKYMDSFVKVQNMLNAMDLVSVQIFGEFAGGGIQKGVDYGDKDFYVFDILSDSGNEKVYWDDYRLESFCTTVGLKLAPLLGRGSFAELSQYPNDFKSLVNRYNELVDTVGLEMANKHVFGPQASSETGLAEGYVLKPVYPRFFNVGTRVAIKCKNSKFSEKAKLISPIKAKVELTENDKRLLGIFSEYVTWNRVSNVLSHIGSVTAKDFGRVSGLTMKDIIREAAREGHDLLFADNPSAVLKELTGLIQNTIRSKWHEVLE

SEQ ID NO: 2417 - DNA, 1038 bp, synthetic construct
  misc_feature 1..1038: note = variant of RNA ligase 2 from Klebsiella phage KP179
  source 1..1038: mol_type = other DNA
atgcatcaccatcaccatcacggtggcagcaacatgtttgcgtattattcaagtctggaaaaccataccaatgccaagttcattagcaagatccgtggtgcaggcttcctgatgcacaccgtggaatgggtagctcgcgagaagattcatggaacgaactttagcgttatcattactccgaccgaaatcgtgccagccaaacgcacagggccgatcttggaagatgagagcttctttggtcatgaaattatcatgaaaaaatatatggactccttcgtgaaggtgcagaacatgctgaatgcgatggatcttgttagcgtgcaaatctttggcgaatttgcgggtggtggcattcagaaaggcgtcgattacggagacaaagatttctatgtgtttgacatcctgtctgatagcgggaacgagaaagtttactgggatgactatcgcgtcgaatcgttttgcaccactgtgggtctgaaattagcgcctctgctgggacgtggtagtttcgctgaactgtcccagtacccaaacgatttcaaaagcctggtgaaccgttataatgaattggttgacacggtcggcctggagatggccaataaacacgtctttggtccgcaagcgtcttctgaaactggcctggcagaaggctacgttcttaaacccgtctatccgcgcttctttaatgtgggtacgcgcgtggcgattaaatctaagaactccaaattttcggagaaagccaaactgatttcgccaattaaagcgaaggttgaactgacggagaacgataaacgtctgctcggaatctttagcgaatatgttacctggaatcgcgtcagtaacgtactgtcacatattggctcagtgaccgccaaagattttgggcgtgtttcgggtctgacgatgaaagacatcattcgcgaagcagcacgcgaaggccatgatctgttgttcgctgataacccgtcggcggtgctgaaggagctgacaggcctcatccagaacacgattcgctccaaatggcacgaagttctggag

SEQ ID NO: 2418 - protein, 346 aa, synthetic construct
  REGION 1..346: note = variant of RNA ligase 2 from Klebsiella phage KP179
MHHHHHHGGSNMFAYYSSLENHTNAKFISKIRGAGFLMHTVEWVAREKIHGTNFSVIITPTEIVPAKRTGPILEDESFFGHEIIMKKYMDSFVKVQNMLNAMDLVSVQIFGEFAGGGIQKGVDYGDKDFYVFDILSDSGNEKVYWDDYRVESFCTTVGLKLAPLLGRGSFAELSQYPNDFKSLVNRYNELVDTVGLEMANKHVFGPQASSETGLAEGYVLKPVYPRFFNVGTRVAIKSKNSKFSEKAKLISPIKAKVELTENDKRLLGIFSEYVTWNRVSNVLSHIGSVTAKDFGRVSGLTMKDIIREAAREGHDLLFADNPSAVLKELTGLIQNTIRSKWHEVLE

SEQ ID NO: 2419 - DNA, 1038 bp, synthetic construct
  misc_feature 1..1038: note = variant of RNA ligase 2 from Klebsiella phage KP179
  source 1..1038: mol_type = other DNA
atgcatcaccatcaccatcacggtggcagcaacatgtttgcgtattattcaagtctggaaaaccataccaatgccaagttcattagcaagatccgtggtgcaggcttcctgatgcacaccgtggaatgggtagctcgcgagaagattcatggaacgaactttagcgttatcattactccgaccgaaatcgtgccagccaaacgcacagggccgatcttggaagatgagagcttctttggtcatgaaattatcatgaaaaaatatatggactccttcgtgaaggtgcagaacatgctgaatgcgatggatcttgttagcgtgcaaatctttggcgaatttgcgggtggtggcattcagaaaggcgtcgattacggagacaaagatttctatgtgtttgacatcctgtctgatagcgggaacgagaaagtttactgggatgactatcgcgtcgaatcgttttgcaccactgtgggtctgaaattagcgcctctgctgggacgtggtagtttcgctgaactgtcccagtacccaaacgatttcaaaagcctggtgaaccgttataatgaattggttgacacggtcggcctggagatggccaataaacacgtctttggtccgcaagcgtcttctgaaactggcctggcagaaggctacgttcttaaacccgtctatccgcgcttctttaatgtgggtacgcgcgtggcgattaaatgcaagaactccaaattttcggagaaagccaaactgatttcgccaattaaagcgaaggttgaactgacggagaacgataaacgtctgctcggaatctttagcgaatatgttacctggaatcgcgtcagtaacgtactgtcacatattggctcagtgaccacgaaagattttgggcgtgtttcgggtctgacgatgaaagacatcattcgcgaagcagcacgcgaaggccatgatctgttgttcgctgataacccgtcggcggtgctgaaggagctgacaggcctcatccagaacacgattcgctccaaatggcacgaagttctggag

SEQ ID NO: 2420 - protein, 346 aa, synthetic construct
  REGION 1..346: note = variant of RNA ligase 2 from Klebsiella phage KP179
MHHHHHHGGSNMFAYYSSLENHTNAKFISKIRGAGFLMHTVEWVAREKIHGTNFSVIITPTEIVPAKRTGPILEDESFFGHEIIMKKYMDSFVKVQNMLNAMDLVSVQIFGEFAGGGIQKGVDYGDKDFYVFDILSDSGNEKVYWDDYRVESFCTTVGLKLAPLLGRGSFAELSQYPNDFKSLVNRYNELVDTVGLEMANKHVFGPQASSETGLAEGYVLKPVYPRFFNVGTRVAIKCKNSKFSEKAKLISPIKAKVELTENDKRLLGIFSEYVTWNRVSNVLSHIGSVTTKDFGRVSGLTMKDIIREAAREGHDLLFADNPSAVLKELTGLIQNTIRSKWHEVLE

SEQ ID NO: 2421 - DNA, 1038 bp, synthetic construct
  misc_feature 1..1038: note = variant of RNA ligase 2 from Klebsiella phage KP179
  source 1..1038: mol_type = other DNA
atgcatcaccatcaccatcacggtggcagcaacatgtttgcgtattattcaagtctggaaaaccataccaatgccaagttcattagcaagatccgtggtgcaggcttcctgatgcacaccgtggaatgggtagctcgcgagaagattcatggaacgaactttagcgttatcattactccgaccgaaatcgtgccagccaaacgcacagggccgatcttggaagatgagagcttctttggtcatgaaattatcatgaaaaaatatatggactccttcgtgaaggtgcagaacatgctgaatgcgatggatcttgttagcgtgcaaatctttggcgaatttgcgggtggtggcattcagaaaggcgtcgattacggagacaaagatttctatgtgtttgacatcatgtctgatagcgggaacgagaaagtttactgggatgactatcgcgtcgaatcgttttgcaccactgtgggtctgaaattagcgcctctgctgggacgtggtagtttcgctgaactgtcccagtacccaaacgatttcaaaagcctggtgaaccgttataatgaattggttgacacggtcggcctggagatggccaataaacacgtctttggtccgcaagcgtcttctgaaactggcctggcagaaggctacgttcttaaacccgtctatccgcgcttctttaatgtgggtacgcgcgtggcgattaaatgcaagaactccaaattttcggagaaagccaaactgatttcgccaattaaagcgaaggttgaactgacggagaacgataaacgtctgctcggaatctttagcgaatatgttacctggaatcgcgtcagtaacgtactgtcacatattggctcagtgaccgccaaagattttgggcgtgtttcgggtctgacgatgaaagacatcattcgcgaagcagcacgcgaaggccatgatctgttgttcgctgataacccgtcggcggtgctgaaggagctgacaggcctcatccagaacacgattcgctccaaatggcacgaagttctggag

SEQ ID NO: 2422 - protein, 346 aa, synthetic construct
  REGION 1..346: note = variant of RNA ligase 2 from Klebsiella phage KP179
MHHHHHHGGSNMFAYYSSLENHTNAKFISKIRGAGFLMHTVEWVAREKIHGTNFSVIITPTEIVPAKRTGPILEDESFFGHEIIMKKYMDSFVKVQNMLNAMDLVSVQIFGEFAGGGIQKGVDYGDKDFYVFDIMSDSGNEKVYWDDYRVESFCTTVGLKLAPLLGRGSFAELSQYPNDFKSLVNRYNELVDTVGLEMANKHVFGPQASSETGLAEGYVLKPVYPRFFNVGTRVAIKCKNSKFSEKAKLISPIKAKVELTENDKRLLGIFSEYVTWNRVSNVLSHIGSVTAKDFGRVSGLTMKDIIREAAREGHDLLFADNPSAVLKELTGLIQNTIRSKWHEVLE

SEQ ID NO: 2423 - DNA, 1038 bp, synthetic construct
  misc_feature 1..1038: note = variant of RNA ligase 2 from Klebsiella phage KP179
  source 1..1038: mol_type = other DNA
atgcatcaccatcaccatcacggtggcagcaacatgtttgcgtattattcaagtctggaaaaccataccaatgccaagttcattagcaagatccgtggtgcaggcttcctgatgcacaccgtggaatgggtagctcgcgagaagattcatggaacgaactttagcgttatcattactccgaccgaaatcgtgccagccaaacgcacagggccgatcttggaagatgagagcttctttggtcatgaaattatcatgaaaaaatatatggactccttcgtgaaggtgcagaacatgctgaatgcgatggatcttgttagcgtgcaaatctttggcgaatttgcgggtggtggcattcagaaaggcgtcgattacggagacaaagatttctatgtgtttgacatcctgtctgatagcgggaacgagaaagtttactgggatgactatcgcgtcgaatcgttttgcaccactgtgggtctgaaattagcgcctctgctgggacgtggtagtttcgctgaactgtcccagtacccaaacgagttcaaaagcctggtgaaccgttataatgaattggttgacacggtcggcctggagatggccaataaacacgtctttggtccgcaagcgtcttctgaaactggcctggcagaaggctacgttcttaaacccgtctatccgcgcttctttaatgtgggtacgcgcgtggcgattaaatgcaagaactccaaattttcggagaaagccaaactgatttcgccaattaaagcgaaggttgaactgacggagaacgataaacgtctgctcggaatctttagcgaatatgttacctggaatcgcgtcagtaacgtactgtcacatattggctcagtgaccgccaaagattttgggcgtgtttcgggtctgacgatgaaagacatcattcgcgaagcagcacgcgaaggccatgatctgttgttcgctgataacccgtcggcggtgctgaaggagctgacaggcctcatccagaacacgattcgctccaaatggcacgaagttctggag

SEQ ID NO: 2424 - protein, 346 aa, synthetic construct
  REGION 1..346: note = variant of RNA ligase 2 from Klebsiella phage KP179
MHHHHHHGGSNMFAYYSSLENHTNAKFISKIRGAGFLMHTVEWVAREKIHGTNFSVIITPTEIVPAKRTGPILEDESFFGHEIIMKKYMDSFVKVQNMLNAMDLVSVQIFGEFAGGGIQKGVDYGDKDFYVFDILSDSGNEKVYWDDYRVESFCTTVGLKLAPLLGRGSFAELSQYPNEFKSLVNRYNELVDTVGLEMANKHVFGPQASSETGLAEGYVLKPVYPRFFNVGTRVAIKCKNSKFSEKAKLISPIKAKVELTENDKRLLGIFSEYVTWNRVSNVLSHIGSVTAKDFGRVSGLTMKDIIREAAREGHDLLFADNPSAVLKELTGLIQNTIRSKWHEVLE

SEQ ID NO: 2425 - DNA, 1038 bp, synthetic construct
  misc_feature 1..1038: note = variant of RNA ligase 2 from Klebsiella phage KP179
  source 1..1038: mol_type = other DNA
atgcatcaccatcaccatcacggtggcagcaacatgtttgcgtattattcaagtctggaaaaccataccaatgccaagttcattagcaagatccgtggtgcaggcttcctgatgcacaccgtggaatgggtagctcgcgagaagattcatggaacgaactttagcgttatcattactccgaccgaaatcgtgccagccaaacgcacagggccgatcttggaagatgagagcttctttggtcatgaaattatcatgaaaaaatatatggactccttcgtgaaggtgcagaacatgctgaatgcgatggatcttgttagcgtgcaaatctttggcgaatttgcgggtggtggcattcagaaaggcgtcgattacggagacaaagatttctatgtgtttgacatcctgtctgatagcgggaacgagaaagtttactgggatgactatcgcgtcgaatcgttttgcaccactgtgggtctgaaattagcgcctctgctgggacgtggtagtttcgctgaactgtcccagtacccaaacgatttcaaaagcctggtgaaccgttataatgaattggttgacacggtcggcctggagatggccaataaacacgtctttggtccgcaagcgtcttctgaaactggcctggcagaaggctacgttcttaaacccgtctatccgcgcttctttaatgtgggtacgcgcgtggcgattaaatgcaagaactccaaattttcggagaaagccaaactgatttcgccaattaaagcgaaggttgaactgacggagaacgataaacgtctgctcggaatctttagcgaatatgttacctggaatcgcgtcagtaacgtatgttcacatattggctcagtgaccgccaaagattttgggcgtgtttcgggtctgacgatgaaagacatcattcgcgaagcagcacgcgaaggccatgatctgttgttcgctgataacccgtcggcggtgctgaaggagctgacaggcctcatccagaacacgattcgctccaaatggcacgaagttctggag

SEQ ID NO: 2426 - protein, 346 aa, synthetic construct
  REGION 1..346: note = variant of RNA ligase 2 from Klebsiella phage KP179
MHHHHHHGGSNMFAYYSSLENHTNAKFISKIRGAGFLMHTVEWVAREKIHGTNFSVIITPTEIVPAKRTGPILEDESFFGHEIIMKKYMDSFVKVQNMLNAMDLVSVQIFGEFAGGGIQKGVDYGDKDFYVFDILSDSGNEKVYWDDYRVESFCTTVGLKLAPLLGRGSFAELSQYPNDFKSLVNRYNELVDTVGLEMANKHVFGPQASSETGLAEGYVLKPVYPRFFNVGTRVAIKCKNSKFSEKAKLISPIKAKVELTENDKRLLGIFSEYVTWNRVSNVCSHIGSVTAKDFGRVSGLTMKDIIREAAREGHDLLFADNPSAVLKELTGLIQNTIRSKWHEVLE

SEQ ID NO: 2427 - DNA, 1038 bp, synthetic construct
  misc_feature 1..1038: note = variant of RNA ligase 2 from Klebsiella phage KP179
  source 1..1038: mol_type = other DNA
atgcatcaccatcaccatcacggtggcagcaacatgtttgcgtattattcaagtctggaaaaccataccaatgccaagttcattagcaagatccgtggtgcaggcttcctgatgcacaccgtggaatgggtagctcgcgagaagattcatggaacgaactttagcgttatcattactccgaccgaaatcgtgccagccaaacgcacagggccgatcttggaagatgagagcttctttggtcatgaaattatcatgaaaaaatatatggactccttcgtgaaggtgcagaacatgctgaatgcgatggatcttgttagcgtgcaaatctttggcgaatttgcgggtggtggcattcagaaaggcgtcgattacggagacaaagatttctatgtgtttgacatcctgtctgatagcgggaacgagaaagtttactgggatgactatcgcgtcgaatcgttttgcaccactgtgggtctgaaattagcgcctctgctgggacgtggtagtttcgctgaactgtcccagtacccaaacgatttcaaaagcctggtgaaccgttataatgaattggttgacacggtcggcctggagatggccaataaacacgtctttggtccgcaagcgtcttctgaaactggcctggcagaaggctacgttcttaaacccgtctatccgcgcttctttaatgtgggtacgcgcgtggcgattaaatgcaagaactccaaattttcggagaaagccaaactgatttcgccaattaaagcgaaggttgaactgacggagaacgataaacgtctgctcggaatctttagcgaatatgttacctggaatcgcgtcagtaacgtactgtcacatattggctcagtgaccgccaaagattttgggcgtgtttcgggtctgacgatgaaagacatcattcgcgaagcatcgcgcgaaggccatgatctgttgttcgctgataacccgtcggcggtgctgaaggagctgacaggcctcatccagaacacgattcgctccaaatggcacgaagttctggag

SEQ ID NO: 2428 - protein, 346 aa, synthetic construct
  REGION 1..346: note = variant of RNA ligase 2 from Klebsiella phage KP179
MHHHHHHGGSNMFAYYSSLENHTNAKFISKIRGAGFLMHTVEWVAREKIHGTNFSVIITPTEIVPAKRTGPILEDESFFGHEIIMKKYMDSFVKVQNMLNAMDLVSVQIFGEFAGGGIQKGVDYGDKDFYVFDILSDSGNEKVYWDDYRVESFCTTVGLKLAPLLGRGSFAELSQYPNDFKSLVNRYNELVDTVGLEMANKHVFGPQASSETGLAEGYVLKPVYPRFFNVGTRVAIKCKNSKFSEKAKLISPIKAKVELTENDKRLLGIFSEYVTWNRVSNVLSHIGSVTAKDFGRVSGLTMKDIIREASREGHDLLFADNPSAVLKELTGLIQNTIRSKWHEVLE

SEQ ID NO: 2429 - DNA, 1038 bp, synthetic construct
  misc_feature 1..1038: note = variant of RNA ligase 2 from Klebsiella phage KP179
  source 1..1038: mol_type = other DNA
atgcatcaccatcaccatcacggtggcagcaacatgtttgcgtattattcaagtctggaaaaccataccaatgccaagttcattagcaagatccgtggtgcaggcttcctgatgcacaccgtggaatgggtagctcgcgagaagattcatggaacgaactttagcgttatcattactccgaccgaaatcgtgccagccaaacgcacagggccgatcttggaagatgagagcttctttggtcatgaaattatcatgaaaaaatatatggactccttcgtgaaggtgcagaacatgctgaatgcgatggatcttgttagcgtgcaaatctttggcgaatttgcgggtggtggcattcagaaaggcgtcgattacggagacaaagatttctatgtgtttgacatcctgtctgatagcgggaacgagaaagtttactgggatgactatcgcgtcgaatcgttttgcaccactgtgggtctgaaattagcgcctctgctgggacgtggtagtttcgctgaactgtcccagtacccaaacgatttcaaaagcctggtgaaccgttataatgaattggttgacacggtcggcctggagatggccaataaacacgtctttggtcttcaagcgtcttctgaaactggcctggcagaaggctacgttcttaaacccgtctatccgcgcttctttaatgtgggtacgcgcgtggcgattaaatgcaagaactccaaattttcggagaaagccaaactgatttcgccaattaaagcgaaggttgaactgacggagaacgataaacgtctgctcggaatctttagcgaatatgttacctggaatcgcgtcagtaacgtactgtcacatattggctcagtgaccgccaaagattttgggcgtgtttcgggtctgacgatgaaagacatcattcgcgaagcagcacgcgaaggccatgatctgttgttcgctgataacccgtcggcggtgctgaaggagctgacaggcctcatccagaacacgattcgctccaaatggcacgaagttctggag

SEQ ID NO: 2430 - protein, 346 aa, synthetic construct
  REGION 1..346: note = variant of RNA ligase 2 from Klebsiella phage KP179
MHHHHHHGGSNMFAYYSSLENHTNAKFISKIRGAGFLMHTVEWVAREKIHGTNFSVIITPTEIVPAKRTGPILEDESFFGHEIIMKKYMDSFVKVQNMLNAMDLVSVQIFGEFAGGGIQKGVDYGDKDFYVFDILSDSGNEKVYWDDYRVESFCTTVGLKLAPLLGRGSFAELSQYPNDFKSLVNRYNELVDTVGLEMANKHVFGLQASSETGLAEGYVLKPVYPRFFNVGTRVAIKCKNSKFSEKAKLISPIKAKVELTENDKRLLGIFSEYVTWNRVSNVLSHIGSVTAKDFGRVSGLTMKDIIREAAREGHDLLFADNPSAVLKELTGLIQNTIRSKWHEVLE

SEQ ID NO: 2431 - DNA, 1038 bp, synthetic construct
  misc_feature 1..1038: note = variant of RNA ligase 2 from Klebsiella phage KP179
  source 1..1038: mol_type = other DNA
atgcatcaccatcaccatcacggtggcagcaacatgtttgcgtattattcaagtctggaaaaccataccaatgccaagttcattagcaagatccgtggtgcaggcttcctgatgcacaccgtggaatgggtagctcgcgagaagattcatggaacgaactttagcgttatcattactccgaccgaaatcgtgccagccaaacgcacagggccgatcttggaagatgagagcttctttggtcatgaaattatcatgaaaaaatatatggactccttcgtgaaggtgcagaacatgctgaatgcgatggatcttgttagcgtgcaaatctttggcgaatttgcgggtggtggcattcagaaaggcgtcgattacggagacaaagatttctatgtgtttgacatcctgtctgatagcgggaacgagaaagtttactgggatgactatcgcgtcgaatcgttttgcaccactgtgggtctgaaattagcgcctctgctgggacgtggtagtttcgctgaactgtcccagtacccaaacgatttcaaaagcctggtgaaccgttataatgaattggttgacacggtcggcctggagatggccaataaacacgtctttggtccgcaagcgtcttctgaaactggcctggcagaaggctacgttcttaaacccgtctatccgcgcttctttaatgtgggtacgcgcgtggcgattaaatgcaagaactccaaattttcggagaaagccaaactgatttcgccaattaaagcgaaggttgaactgacggagaacgataaacgtctgctcggaatctttagcgaatatgttacctggaatcgcgtcagtaacgtactgtcacatattggctcagtgaccgccaaagattttgggcgtgtttcgggtctgacgatgaaagacatcattcgcgaagcacagcgcgaaggccatgatctgttgttcgctgataacccgtcggcggtgctgaaggagctgacaggcctcatccagaacacgattcgctccaaatggcacgaagttctggag

SEQ ID NO: 2432 - protein, 346 aa, synthetic construct
  REGION 1..346: note = variant of RNA ligase 2 from Klebsiella phage KP179
MHHHHHHGGSNMFAYYSSLENHTNAKFISKIRGAGFLMHTVEWVAREKIHGTNFSVIITPTEIVPAKRTGPILEDESFFGHEIIMKKYMDSFVKVQNMLNAMDLVSVQIFGEFAGGGIQKGVDYGDKDFYVFDILSDSGNEKVYWDDYRVESFCTTVGLKLAPLLGRGSFAELSQYPNDFKSLVNRYNELVDTVGLEMANKHVFGPQASSETGLAEGYVLKPVYPRFFNVGTRVAIKCKNSKFSEKAKLISPIKAKVELTENDKRLLGIFSEYVTWNRVSNVLSHIGSVTAKDFGRVSGLTMKDIIREAQREGHDLLFADNPSAVLKELTGLIQNTIRSKWHEVLE

SEQ ID NO: 2433 - DNA, 1038 bp, synthetic construct
  misc_feature 1..1038: note = variant of RNA ligase 2 from Klebsiella phage KP179
  source 1..1038: mol_type = other DNA
atgcatcaccatcaccatcacggtggcagcaacatgtttgcgtattattcaagtctggaaaaccataccaatgccaagttcattagcaagatccgtggtgcaggcttcctgatgcacaccgtggaatgggtagctcgcgagaagattcatggaacgaactttagcgttatcattactccgaccgaaatcgtgccagccaaacgcacagggccgatcttggaagatgagagcttctttggtcatgaaattatcatgaaaaaatatatggactccttcgtgaaggtgcagaacatgctgaatgcgatggatcttgttgtggtgcaaatctttggcgaatttgcgggtggtggcattcagaaaggcgtcgattacggagacaaagatttctatgtgtttgacatcctgtctgatagcgggaacgagaaagtttactgggatgactatcgcgtcgaatcgttttgcaccactgtgggtctgaaattagcgcctctgctgggacgtggtagtttcgctgaactgtcccagtacccaaacgatttcaaaagcctggtgaaccgttataatgaattggttgacacggtcggcctggagatggccaataaacacgtctttggtccgcaagcgtcttctgaaactggcctggcagaaggctacgttcttaaacccgtctatccgcgcttctttaatgtgggtacgcgcgtggcgattaaatgcaagaactccaaattttcggagaaagccaaactgatttcgccaattaaagcgaaggttgaactgacggagaacgataaacgtctgctcggaatctttagcgaatatgttacctggaatcgcgtcagtaacgtactgtcacatattggctcagtgaccgccaaagattttgggcgtgtttcgggtctgacgatgaaagacatcattcgcgaagcagcacgcgaaggccatgatctgttgttcgctgataacccgtcggcggtgctgaaggagctgacaggcctcatccagaacacgattcgctccaaatggcacgaagttctggag

SEQ ID NO: 2434 - protein, 346 aa, synthetic construct
  REGION 1..346: note = variant of RNA ligase 2 from Klebsiella phage KP179
MHHHHHHGGSNMFAYYSSLENHTNAKFISKIRGAGFLMHTVEWVAREKIHGTNFSVIITPTEIVPAKRTGPILEDESFFGHEIIMKKYMDSFVKVQNMLNAMDLVVVQIFGEFAGGGIQKGVDYGDKDFYVFDILSDSGNEKVYWDDYRVESFCTTVGLKLAPLLGRGSFAELSQYPNDFKSLVNRYNELVDTVGLEMANKHVFGPQASSETGLAEGYVLKPVYPRFFNVGTRVAIKCKNSKFSEKAKLISPIKAKVELTENDKRLLGIFSEYVTWNRVSNVLSHIGSVTAKDFGRVSGLTMKDIIREAAREGHDLLFADNPSAVLKELTGLIQNTIRSKWHEVLE

SEQ ID NO: 2435 - DNA, 1038 bp, synthetic construct
  misc_feature 1..1038: note = variant of RNA ligase 2 from Klebsiella phage KP179
  source 1..1038: mol_type = other DNA
atgcatcaccatcaccatcacggtggcagcaacatgtttgcgtattattcaagtctggaaaaccataccaatgccaagttcattagcaagatccgtggtgcaggcttcctgatgcacaccgtggaatgggtagctcgcgagaagattcatggaacgaactttagcgttatcattactccgaccgaaatcgtgccagccaaacgcacagggccgatcttggaagatgagagcttctttggtcatgaaattatcatgaaaaaatatatggactccttcgtgaaggtgcagaacatgctgaatgcgatggatcttgttagcgtgcaaatctttggcgaatttgcgggtggtggcattcagaaaggcgtcgattacggagacaaagatttctatgtgtttgacatcctgtctgatagcgggaacgagaaagtttactgggatgactatcgcgtcgaatcgttttgcaccactgtgggtctgaaattagcgcctctgctgggacgtggtagtttcgctgaactgtcccagtacccaaacgatttctcgagcctggtgaaccgttataatgaattggttgacacggtcggcctggagatggccaataaacacgtctttggtccgcaagcgtcttctgaaactggcctggcagaaggctacgttcttaaacccgtctatccgcgcttctttaatgtgggtacgcgcgtggcgattaaatgcaagaactccaaattttcggagaaagccaaactgatttcgccaattaaagcgaaggttgaactgacggagaacgataaacgtctgctcggaatctttagcgaatatgttacctggaatcgcgtcagtaacgtactgtcacatattggctcagtgaccgccaaagattttgggcgtgtttcgggtctgacgatgaaagacatcattcgcgaagcagcacgcgaaggccatgatctgttgttcgctgataacccgtcggcggtgctgaaggagctgacaggcctcatccagaacacgattcgctccaaatggcacgaagttctggag

SEQ ID NO: 2436 - protein, 346 aa, synthetic construct
  REGION 1..346: note = variant of RNA ligase 2 from Klebsiella phage KP179
MHHHHHHGGSNMFAYYSSLENHTNAKFISKIRGAGFLMHTVEWVAREKIHGTNFSVIITPTEIVPAKRTGPILEDESFFGHEIIMKKYMDSFVKVQNMLNAMDLVSVQIFGEFAGGGIQKGVDYGDKDFYVFDILSDSGNEKVYWDDYRVESFCTTVGLKLAPLLGRGSFAELSQYPNDFSSLVNRYNELVDTVGLEMANKHVFGPQASSETGLAEGYVLKPVYPRFFNVGTRVAIKCKNSKFSEKAKLISPIKAKVELTENDKRLLGIFSEYVTWNRVSNVLSHIGSVTAKDFGRVSGLTMKDIIREAAREGHDLLFADNPSAVLKELTGLIQNTIRSKWHEVLE

SEQ ID NO: 2437 - DNA, 1038 bp, synthetic construct
  misc_feature 1..1038: note = variant of RNA ligase 2 from Klebsiella phage KP179
  source 1..1038: mol_type = other DNA
atgcatcaccatcaccatcacggtggcagcaacatgtttgcgtattattcaagtctggaaaaccataccaatgccaagttcattagcaagatccgtggtgcaggcttcctgatgcacaccgtggaatgggtagctcgcgagaagattcatggaacgaactttagcgttatcattactccgaccgaaatcgtgccagccaaacgcacagggccgatcttggaagatgagagcttctttggtcatgaaattatcatgaaaaaatatatggactccttcgtgaaggtgcagaacatgctgaatgcgatggatcttgttagcgtgcaaatctttggcgaatttgcgggtggtggcattcagaaaggcgtcgattacggagacaaagatttctatgtgtttgacatcctgtctgatagcgggaacgagaaagtttactgggatgactatcgcgtcgaatcgttttgcaccactgtgggtctgaaattagcgcctctgctgggacgtggtagtttcgctgaactgtcccagtacccaaacgatttcaaaagcctggtgaaccgttataatgaattggttgacacggtcggcctggagatggccaataaacacgtctttggtccgcaagcgtcttctgaaactggcctggcagaaggctacgttcttaaacccgtctatccgcgcttctttaatgtgggtacgcgcgtggcgattaaatgcaagaactccaaattttcggagaaagccaaactgatttcgccaattaaagcgaaggttgaactgacggagaacgataaacgtctgctcggaatctttagcgaatatgttacctggaatcgcgtcagtaacgtactgtcacatattggctcagtgaccgccaaagattttgggcgtgttaagggtctgacgatgaaagacatcattcgcgaagcagcacgcgaaggccatgatctgttgttcgctgataacccgtcggcggtgctgaaggagctgacaggcctcatccagaacacgattcgctccaaatggcacgaagttctggag

SEQ ID NO: 2438 - protein, 346 aa, synthetic construct
  REGION 1..346: note = variant of RNA ligase 2 from Klebsiella phage KP179
MHHHHHHGGSNMFAYYSSLENHTNAKFISKIRGAGFLMHTVEWVAREKIHGTNFSVIITPTEIVPAKRTGPILEDESFFGHEIIMKKYMDSFVKVQNMLNAMDLVSVQIFGEFAGGGIQKGVDYGDKDFYVFDILSDSGNEKVYWDDYRVESFCTTVGLKLAPLLGRGSFAELSQYPNDFKSLVNRYNELVDTVGLEMANKHVFGPQASSETGLAEGYVLKPVYPRFFNVGTRVAIKCKNSKFSEKAKLISPIKAKVELTENDKRLLGIFSEYVTWNRVSNVLSHIGSVTAKDFGRVKGLTMKDIIREAAREGHDLLFADNPSAVLKELTGLIQNTIRSKWHEVLE

SEQ ID NO: 2439 - DNA, 1038 bp, synthetic construct
  misc_feature 1..1038: note = variant of RNA ligase 2 from Klebsiella phage KP179
  source 1..1038: mol_type = other DNA
atgcatcaccatcaccatcacggtggcagcaacatgtttgcgtattattcaagtctggaaaaccataccaatgccaagttcattagcaagatccgtggtgcaggcttcctgatgcacaccgtggaatgggtagctcgcgagaagattcatggaacgaactttagcgttatcattactccgaccgaaatcgtgccagccaaacgcacagggccgatcttggaagatgagagcttctttggtcatgaaattatcatgaaaaaatatatggactccttcgtgaaggtgcagaacatgctgaatgcgatggatcttgttagcgtgcaaatctttggcgaatttgcgggtggtggcattcagaaaggcgtcgattacggagacaaagatttctatgtgtttgacatcctgtctgatagcgggaacgagaaagtttactgggatgactatcgcgtcgaatcgttttgcaccactgtgggtctgaaattagcgcctctgctgggacgtggtagtttcgctgaactgtcccagtacccaaacgatttcaaaagcctggtgaaccgttataatgaattggttgacacggtcggcctggagatggccaataaacacgtctttggtccgcaagcgtcttctgaaactggcctggcagaaggctacgttcttaaacccgtctatccgcgcttctttaatgtgggtacgcgcgtggcgattaaatgcaagaactccaaattttcggagaaagccaaactgatttcgccaattaaagcgaaggttgaactgacggagaacgataaacgtctgctcggaatctttagcgaatatgttacctggaatcgcgtcagtaacgtactgtcacatattggctcagtgaccgccaaagattttgggcgtgtttcgcagctgacgatgaaagacatcattcgcgaagcagcacgcgaaggccatgatctgttgttcgctgataacccgtcggcggtgctgaaggagctgacaggcctcatccagaacacgattcgctccaaatggcacgaagttctggag

SEQ ID NO: 2440 - protein, 346 aa, synthetic construct
  REGION 1..346: note = variant of RNA ligase 2 from Klebsiella phage KP179
MHHHHHHGGSNMFAYYSSLENHTNAKFISKIRGAGFLMHTVEWVAREKIHGTNFSVIITPTEIVPAKRTGPILEDESFFGHEIIMKKYMDSFVKVQNMLNAMDLVSVQIFGEFAGGGIQKGVDYGDKDFYVFDILSDSGNEKVYWDDYRVESFCTTVGLKLAPLLGRGSFAELSQYPNDFKSLVNRYNELVDTVGLEMANKHVFGPQASSETGLAEGYVLKPVYPRFFNVGTRVAIKCKNSKFSEKAKLISPIKAKVELTENDKRLLGIFSEYVTWNRVSNVLSHIGSVTAKDFGRVSQLTMKDIIREAAREGHDLLFADNPSAVLKELTGLIQNTIRSKWHEVLE

SEQ ID NO: 2441 - DNA, 1038 bp, synthetic construct
  misc_feature 1..1038: note = variant of RNA ligase 2 from Klebsiella phage KP179
  source 1..1038: mol_type = other DNA
atgcatcaccatcaccatcacggtggcagcaacatgtttgcgtattattcaagtctggaaaaccataccaatgccaagttcattagcaagatccgtggtgcaggcttcctgatgcacaccgtggaatgggtagctcgcgagaagattcatggaacgaactttagcgttatcattactccgaccgaaatcgtgccagccaaacgcacagggccgatcttggaagatgagagcttctttggtcatgaaattatcatgaaaaaatatatggactccttcgtgaaggtgcagaacatgctgaatgcgatggatcttgttagcgtgcaaatctttggcgaatttgcgggtggtggcattcagaaaggcgtcgattacggagacaaagatttctatgtgtttgacatcctgtctgatagcgggaacgagaaagtttactgggatgactatcgcgtcgaatcgttttgcaccactgtgggtctgaaattagcgcctctgctgggacgtggtagtttcgctgaactgtcccagtacccaaacgatttcaaaagcctggtgaaccgttataatgaattggttgacacggtcggcctggagatggccaataaacacgtctttggtccgcaagcgtcttctgaaactggcctggcagaaggctacgttcttaaacccgtctatccgcgcttctttaatgtgggtacgcgcgtggcgattaaatgcaagaactccaaattttcggagaaagccaaactgatttcgccaattaaagcgaaggttgaactgacggagaacgataaacgtctgctcggaatctttagcgaatatgttacctggaatcgcgtcagtaacgtactgtcacatattggctcagtgaccgccaaagatttttgtcgtgtttcgggtctgacgatgaaagacatcattcgcgaagcagcacgcgaaggccatgatctgttgttcgctgataacccgtcggcggtgctgaaggagctgacaggcctcatccagaacacgattcgctccaaatggcacgaagttctggag

SEQ ID NO: 2442 - protein, 346 aa, synthetic construct
  REGION 1..346: note = variant of RNA ligase 2 from Klebsiella phage KP179
MHHHHHHGGSNMFAYYSSLENHTNAKFISKIRGAGFLMHTVEWVAREKIHGTNFSVIITPTEIVPAKRTGPILEDESFFGHEIIMKKYMDSFVKVQNMLNAMDLVSVQIFGEFAGGGIQKGVDYGDKDFYVFDILSDSGNEKVYWDDYRVESFCTTVGLKLAPLLGRGSFAELSQYPNDFKSLVNRYNELVDTVGLEMANKHVFGPQASSETGLAEGYVLKPVYPRFFNVGTRVAIKCKNSKFSEKAKLISPIKAKVELTENDKRLLGIFSEYVTWNRVSNVLSHIGSVTAKDFCRVSGLTMKDIIREAAREGHDLLFADNPSAVLKELTGLIQNTIRSKWHEVLE

SEQ ID NO: 2443 - DNA, 1038 bp, synthetic construct
  misc_feature 1..1038: note = variant of RNA ligase 2 from Klebsiella phage KP179
  source 1..1038: mol_type = other DNA
atgcatcaccatcaccatcacggtggcagcaacatgtttgcgtattattcaagtctggaaaaccataccaatgccaagttcattagcaagatccgtggtgcaggcttcctgatgcacaccgtggaatgggtagctcgcgagaagattcatggaacgaactttagcgttatcattactccgaccgaaatcgtgccagccaaacgcacagggccgatcttggaagatgagagcttctttggtcatgaaattatcatgaaaaaatatatggactccttcgtgaaggtgcagaacatgctgaatgcgatggatcttgttagcgtgcaaatctttggcgaatttgcgggtggtggcattcagaaaggcgtcgattacggagacaaagatttctatgtgtttgacatcctgtctgatagcgggaacgagaaaatgtactgggatgactatcgcgtcgaatcgttttgcaccactgtgggtctgaaattagcgcctctgctgggacgtggtagtttcgctgaactgtcccagtacccaaacgatttcaaaagcctggtgaaccgttataatgaattggttgacacggtcggcctggagatggccaataaacacgtctttggtccgcaagcgtcttctgaaactggcctggcagaaggctacgttcttaaacccgtctatccgcgcttctttaatgtgggtacgcgcgtggcgattaaatgcaagaactccaaattttcggagaaagccaaactgatttcgccaattaaagcgaaggttgaactgacggagaacgataaacgtctgctcggaatctttagcgaatatgttacctggaatcgcgtcagtaacgtactgtcacatattggctcagtgaccgccaaagattttgggcgtgtttcgggtctgacgatgaaagacatcattcgcgaagcagcacgcgaaggccatgatctgttgttcgctgataacccgtcggcggtgctgaaggagctgacaggcctcatccagaacacgattcgctccaaatggcacgaagttctggag

SEQ ID NO: 2444 - protein, 346 aa, synthetic construct
  REGION 1..346: note = variant of RNA ligase 2 from Klebsiella phage KP179
MHHHHHHGGSNMFAYYSSLENHTNAKFISKIRGAGFLMHTVEWVAREKIHGTNFSVIITPTEIVPAKRTGPILEDESFFGHEIIMKKYMDSFVKVQNMLNAMDLVSVQIFGEFAGGGIQKGVDYGDKDFYVFDILSDSGNEKMYWDDYRVESFCTTVGLKLAPLLGRGSFAELSQYPNDFKSLVNRYNELVDTVGLEMANKHVFGPQASSETGLAEGYVLKPVYPRFFNVGTRVAIKCKNSKFSEKAKLISPIKAKVELTENDKRLLGIFSEYVTWNRVSNVLSHIGSVTAKDFGRVSGLTMKDIIREAAREGHDLLFADNPSAVLKELTGLIQNTIRSKWHEVLE

SEQ ID NO: 2445 - DNA, 1038 bp, synthetic construct
  misc_feature 1..1038: note = variant of RNA ligase 2 from Klebsiella phage KP179
  source 1..1038: mol_type = other DNA
atgcatcaccatcaccatcacggtggcagcaacatgtttgcgtattattcaagtctggaaaaccataccaatgccaagttcattagcaagatccgtggtgcaggcttcctgatgcacaccgtggaatgggtagctcgcgagaagattcatggaacgaactttagcgttatcattacttctaccgaaatcgtgccagccaaacgcacagggccgatcttggaagatgagagcttctttggtcatgaaattatcatgaaaaaatatatggactccttcgtgaaggtgcagaacatgctgaatgcgatggatcttgttagcgtgcaaatctttggcgaatttgcgggtggtggcattcagaaaggcgtcgattacggagacaaagatttctatgtgtttgacatcctgtctgatagcgggaacgagaaagtttactgggatgactatcgcgtcgaatcgttttgcaccactgtgggtctgaaattagcgcctctgctgggacgtggtagtttcgctgaactgtcccagtacccaaacgatttcaaaagcctggtgaaccgttataatgaattggttgacacggtcggcctggagatggccaataaacacgtctttggtccgcaagcgtcttctgaaactggcctggcagaaggctacgttcttaaacccgtctatccgcgcttctttaatgtgggtacgcgcgtggcgattaaatgcaagaactccaaattttcggagaaagccaaactgatttcgccaattaaagcgaaggttgaactgacggagaacgataaacgtctgctcggaatctttagcgaatatgttacctggaatcgcgtcagtaacgtactgtcacatattggctcagtgaccgccaaagattttgggcgtgtttcgggtctgacgatgaaagacatcattcgcgaagcagcacgcgaaggccatgatctgttgttcgctgataacccgtcggcggtgctgaaggagctgacaggcctcatccagaacacgattcgctccaaatggcacgaagttctggag

SEQ ID NO: 2446 - protein, 346 aa, synthetic construct
  REGION 1..346: note = variant of RNA ligase 2 from Klebsiella phage KP179
MHHHHHHGGSNMFAYYSSLENHTNAKFISKIRGAGFLMHTVEWVAREKIHGTNFSVIITSTEIVPAKRTGPILEDESFFGHEIIMKKYMDSFVKVQNMLNAMDLVSVQIFGEFAGGGIQKGVDYGDKDFYVFDILSDSGNEKVYWDDYRVESFCTTVGLKLAPLLGRGSFAELSQYPNDFKSLVNRYNELVDTVGLEMANKHVFGPQASSETGLAEGYVLKPVYPRFFNVGTRVAIKCKNSKFSEKAKLISPIKAKVELTENDKRLLGIFSEYVTWNRVSNVLSHIGSVTAKDFGRVSGLTMKDIIREAAREGHDLLFADNPSAVLKELTGLIQNTIRSKWHEVLE

SEQ ID NO: 2447 - DNA, 1038 bp, synthetic construct
  misc_feature 1..1038: note = variant of RNA ligase 2 from Klebsiella phage KP179
  source 1..1038: mol_type = other DNA
atgcatcaccatcaccatcacggtggcagcaacatgtttgcgtattattcaagtctggaaaaccataccaatgccaagttcattagcaagatccgtggtgcaggcttcctgatgcacaccgtggaatgggtagctcgcgagaagattcatggaacgaactttagcgttatcattactccgaccgaaatcgtgccagccaaacgcacagggccgatcttggaagatgagagcttctttggtcatgaaattatcatgaaaaaatatatggactccttcgtgaaggtgcagaacatgctgaatgcgatggatcttgttagcgtgcaaatctttggcgaatttgcgggtggtggcattcagaaaggcgtcgattacggagacaaagatttctatgtgtttgacatcctgtctgatagcgggaacgagaaagtttactgggatgactatcgcgtcgaatcgttttgcaccactgtgggtctgaaattagcgcctctgctgggacgtggtagtttcgctgaactgtcccagtacccaaacgatttcaaaagcctggtgaaccgttataatgaattggttgacacggtcggcctggagatggccaataaacacgtctttggtccgcaagcgtcttctgaaactggccatgcagaaggctacgttcttaaacccgtctatccgcgcttctttaatgtgggtacgcgcgtggcgattaaatgcaagaactccaaattttcggagaaagccaaactgatttcgccaattaaagcgaaggttgaactgacggagaacgataaacgtctgctcggaatctttagcgaatatgttacctggaatcgcgtcagtaacgtactgtcacatattggctcagtgaccgccaaagattttgggcgtgtttcgggtctgacgatgaaagacatcattcgcgaagcagcacgcgaaggccatgatctgttgttcgctgataacccgtcggcggtgctgaaggagctgacaggcctcatccagaacacgattcgctccaaatggcacgaagttctggag

SEQ ID NO: 2448 - protein, 346 aa, synthetic construct
  REGION 1..346: note = variant of RNA ligase 2 from Klebsiella phage KP179
MHHHHHHGGSNMFAYYSSLENHTNAKFISKIRGAGFLMHTVEWVAREKIHGTNFSVIITPTEIVPAKRTGPILEDESFFGHEIIMKKYMDSFVKVQNMLNAMDLVSVQIFGEFAGGGIQKGVDYGDKDFYVFDILSDSGNEKVYWDDYRVESFCTTVGLKLAPLLGRGSFAELSQYPNDFKSLVNRYNELVDTVGLEMANKHVFGPQASSETGHAEGYVLKPVYPRFFNVGTRVAIKCKNSKFSEKAKLISPIKAKVELTENDKRLLGIFSEYVTWNRVSNVLSHIGSVTAKDFGRVSGLTMKDIIREAAREGHDLLFADNPSAVLKELTGLIQNTIRSKWHEVLE

SEQ ID NO: 2449 - DNA, 1038 bp, synthetic construct
  misc_feature 1..1038: note = variant of RNA ligase 2 from Klebsiella phage KP179
  source 1..1038: mol_type = other DNA
atgcatcaccatcaccatcacggtggcagcaacatgtttgcgtattattcaagtctggaaaaccataccaatgccaagttcattagcaagatccgtggtgcaggcttcctgatgcacaccgtggaatgggtagctcgcgagaagattcatggaacgaactttagcgttatcattactccgaccgaaatcgtgccagccaaacgcacagggccgatcttggaagatgagagcttctttggtcatgaaattatcatgaaaaaatatatggactccttcgtgaaggtgcagaacatgctgaatgcgatggatcttgttagcgtgcaaatctttggcgaatttgcgggtggtggcattcagaaaggcgtcgattacggagacaaagatttctatgtgtttgacatcctgtctgatagcgggaacgagaaagtttactgggatgactatcgcgtcgaatcgttttgcaccactgtgggtctgaaattagcgcctctgctgggacgtggtagtttcgctgaactgtcccagtacccaaacgatttcaaaagcctggtgaaccgttataatgaattggttgacacggtcggcctggagatggccaataaacacgtctttggtccgcaagcgtcttctgaactgggcctggcagaaggctacgttcttaaacccgtctatccgcgcttctttaatgtgggtacgcgcgtggcgattaaatgcaagaactccaaattttcggagaaagccaaactgatttcgccaattaaagcgaaggttgaactgacggagaacgataaacgtctgctcggaatctttagcgaatatgttacctggaatcgcgtcagtaacgtactgtcacatattggctcagtgaccgccaaagattttgggcgtgtttcgggtctgacgatgaaagacatcattcgcgaagcagcacgcgaaggccatgatctgttgttcgctgataacccgtcggcggtgctgaaggagctgacaggcctcatccagaacacgattcgctccaaatggcacgaagttctggag

SEQ ID NO: 2450 - protein, 346 aa, synthetic construct
  REGION 1..346: note = variant of RNA ligase 2 from Klebsiella phage KP179
MHHHHHHGGSNMFAYYSSLENHTNAKFISKIRGAGFLMHTVEWVAREKIHGTNFSVIITPTEIVPAKRTGPILEDESFFGHEIIMKKYMDSFVKVQNMLNAMDLVSVQIFGEFAGGGIQKGVDYGDKDFYVFDILSDSGNEKVYWDDYRVESFCTTVGLKLAPLLGRGSFAELSQYPNDFKSLVNRYNELVDTVGLEMANKHVFGPQASSELGLAEGYVLKPVYPRFFNVGTRVAIKCKNSKFSEKAKLISPIKAKVELTENDKRLLGIFSEYVTWNRVSNVLSHIGSVTAKDFGRVSGLTMKDIIREAAREGHDLLFADNPSAVLKELTGLIQNTIRSKWHEVLE

SEQ ID NO: 2451 - DNA, 1038 bp, synthetic construct
  misc_feature 1..1038: note = variant of RNA ligase 2 from Klebsiella phage KP179
  source 1..1038: mol_type = other DNA
atgcatcaccatcaccatcacggtggcagcaacatgtttgcgtattattcaagtctggaaaaccataccaatgccaagttcattagcaagatccgtggtgcaggcttcctgatgcacaccgtggaatgggtagctcgcgagaagattcatggaacgaactttagcgttatcattactccgaccgaaatcgtgccagccaaacgcacagggccgatcttggaagatgagagcttctttggtcatgaaattatcatgaaaaaatatatggactccttcgtgaaggtgcagaacatgctgaatgcgatggatcttgttagcgtgcaaatctttggcgaatttgcgggtggtggcattcagaaaggcgtcgattacggagacaaagatttctatgtgtttgacatcctgtctgatagcgggaacgagaaagtttactgggatgactatcgcgtcgaatcgttttgcaccactgtgggtctgaaattagcgcctctgctgggacgtggtagtttcgctgaactgtcccagtacccaaacgatttcaaaagcctggtgaaccgttataatgaattggttgacacggtcggcctggagatggccaataaacacgtctttggtccgcaagcgtcttctgaaactggcctggcagaaggctacgttcttaaacccgtctatccgcgcttctttaatgtgggtacgcgcgtggcggtgaaatgcaagaactccaaattttcggagaaagccaaactgatttcgccaattaaagcgaaggttgaactgacggagaacgataaacgtctgctcggaatctttagcgaatatgttacctggaatcgcgtcagtaacgtactgtcacatattggctcagtgaccgccaaagattttgggcgtgtttcgggtctgacgatgaaagacatcattcgcgaagcagcacgcgaaggccatgatctgttgttcgctgataacccgtcggcggtgctgaaggagctgacaggcctcatccagaacacgattcgctccaaatggcacgaagttctggag

SEQ ID NO: 2452 - protein, 346 aa, synthetic construct
  REGION 1..346: note = variant of RNA ligase 2 from Klebsiella phage KP179
MHHHHHHGGSNMFAYYSSLENHTNAKFISKIRGAGFLMHTVEWVAREKIHGTNFSVIITPTEIVPAKRTGPILEDESFFGHEIIMKKYMDSFVKVQNMLNAMDLVSVQIFGEFAGGGIQKGVDYGDKDFYVFDILSDSGNEKVYWDDYRVESFCTTVGLKLAPLLGRGSFAELSQYPNDFKSLVNRYNELVDTVGLEMANKHVFGPQASSETGLAEGYVLKPVYPRFFNVGTRVAVKCKNSKFSEKAKLISPIKAKVELTENDKRLLGIFSEYVTWNRVSNVLSHIGSVTAKDFGRVSGLTMKDIIREAAREGHDLLFADNPSAVLKELTGLIQNTIRSKWHEVLE

SEQ ID NO: 2453 - DNA, 1038 bp, synthetic construct
  misc_feature 1..1038: note = variant of RNA ligase 2 from Klebsiella phage KP179
  source 1..1038: mol_type = other DNA
atgcatcaccatcaccatcacggtggcagcaacatgtttgcgtattattcaagtctggaaaaccataccaatgccaagttcattagcaagatccgtggtgcaggcttcctgatgcacaccgtggaatgggtagctcgcgagaagattcatggaacgaactttagcgttatcattactccgaccgaaatcgtgccagccaaacgcacagggccgatcttggaagatgagagcttctttggtcatgaaattatcatgaaaaaatatatggactccttcgtgaaggtgcagaacatgctgaatgcgatggatcttgttagcgtgcaaatctttggcgaatttgcgggtggtggcattcagaaaggcgtcgattacggagacaaagatttctatgtgtttgacatcctgtctgatagcgggaacgagaaagtttactgggatgactatcgcgtcgaatcgttttgcaccactgtgggtctgaaattagcgcctctgctgggacgtggtagtttcgctgaactgtcccagtacccaaacgatttcaaaagcctggtgaaccgttataatgaattggttgacacggtcggcctggagatggccaataaacacgtctttggtccgcaagcgtcttctgaaactggcctggcagaaggctacgttcttaaacccgtctatccgcgcttctttaatgtgggtacgcgcgtggcgattaaatgcaagaactccaaattttcggagaaagccaaactgatttcgccaattaaagcgaaggttgaactgacggagaacgataaacgttgtctcggaatctttagcgaatatgttacctggaatcgcgtcagtaacgtactgtcacatattggctcagtgaccgccaaagattttgggcgtgtttcgggtctgacgatgaaagacatcattcgcgaagcagcacgcgaaggccatgatctgttgttcgctgataacccgtcggcggtgctgaaggagctgacaggcctcatccagaacacgattcgctccaaatggcacgaagttctggag

SEQ ID NO: 2454 - protein, 346 aa, synthetic construct
  REGION 1..346: note = variant of RNA ligase 2 from Klebsiella phage KP179
MHHHHHHGGSNMFAYYSSLENHTNAKFISKIRGAGFLMHTVEWVAREKIHGTNFSVIITPTEIVPAKRTGPILEDESFFGHEIIMKKYMDSFVKVQNMLNAMDLVSVQIFGEFAGGGIQKGVDYGDKDFYVFDILSDSGNEKVYWDDYRVESFCTTVGLKLAPLLGRGSFAELSQYPNDFKSLVNRYNELVDTVGLEMANKHVFGPQASSETGLAEGYVLKPVYPRFFNVGTRVAIKCKNSKFSEKAKLISPIKAKVELTENDKRCLGIFSEYVTWNRVSNVLSHIGSVTAKDFGRVSGLTMKDIIREAAREGHDLLFADNPSAVLKELTGLIQNTIRSKWHEVLE

SEQ ID NO: 2455 - DNA, 1038 bp, synthetic construct
  misc_feature 1..1038: note = variant of RNA ligase 2 from Klebsiella phage KP179
  source 1..1038: mol_type = other DNA
atgcatcaccatcaccatcacggtggcagcaacatgtttgcgtattattcaagtctggaaaaccataccaatgccaagttcattagcaagatccgtggtgcaggcttcctgatgcacaccgtggaatgggtagctcgcgagaagattcatggaacgaactttagcgttatcattactccgaccgaaatcgtgccagccaaacgcacagggccgatcttggaagatgagagcttctttggtcatgaaattatcatgaaaaaatatatggactccttcgtgaaggtgcagaacatgctgaatgcgatggatcttgttagcgtgcaaatctttggcgaatttgcgggtggtggcattcagaaaggcgtcgattacggagacaaagatttctatgtgtttgacatcctgtctgatagcgggaacgagaaagtttactgggatgactatcgcgtcgaatcgttttgcaccactgtgggtctgaaattagcgcctctgctgggacgtggtagtttcgctgaactgtcccagtacccaaacgatttcaaaagcctggtgaaccgttataatgaattggttgacacggtcggcctggagatggccaataaacacgtctttggtccgcaagcgtcttctgaaactggcctggcagaaggctacgttcttaaacccgtctatccgcgcttctttaatgtgggtacgcgcgtggcgattaaatgcaagaactccaaattttcggagaaagccaaactgatttcgccaattaaagcgaaggttgaactgacggagaacgataaacgtctgctcggaatctttagcgaatatgttacctggaatcgcgtcagtaacgtactgtcacatattggctcagctaccgccaaagattttgggcgtgtttcgggtctgacgatgaaagacatcattcgcgaagcagcacgcgaaggccatgatctgttgttcgctgataacccgtcggcggtgctgaaggagctgacaggcctcatccagaacacgattcgctccaaatggcacgaagttctggag

SEQ ID NO: 2456 - protein, 346 aa, synthetic construct
  REGION 1..346: note = variant of RNA ligase 2 from Klebsiella phage KP179
MHHHHHHGGSNMFAYYSSLENHTNAKFISKIRGAGFLMHTVEWVAREKIHGTNFSVIITPTEIVPAKRTGPILEDESFFGHEIIMKKYMDSFVKVQNMLNAMDLVSVQIFGEFAGGGIQKGVDYGDKDFYVFDILSDSGNEKVYWDDYRVESFCTTVGLKLAPLLGRGSFAELSQYPNDFKSLVNRYNELVDTVGLEMANKHVFGPQASSETGLAEGYVLKPVYPRFFNVGTRVAIKCKNSKFSEKAKLISPIKAKVELTENDKRLLGIFSEYVTWNRVSNVLSHIGSATAKDFGRVSGLTMKDIIREAAREGHDLLFADNPSAVLKELTGLIQNTIRSKWHEVLE

SEQ ID NO: 2457 - DNA, 1038 bp, synthetic construct
  misc_feature 1..1038: note = variant of RNA ligase 2 from Klebsiella phage KP179
  source 1..1038: mol_type = other DNA
atgcatcaccatcaccatcacggtggcagcaacatgtttgcgtattattcaagtctggaaaaccataccaatgccaagttcattagcaagatccgtggtgcaggcttcctgatgcacaccgtggaatgggtagctcgcgagaagattcatggaacgaactttagcgttatcattactccgaccgaaatcgtgccagccaaacgcacagggccgatcttggaagatgagagcttctttggtcatgaaattatcatgaaaaaatatatggactccttcgtgaaggtgcagaacatgctgaatgcgatggatcttgttagcgtgcaaatctttggcgaatttgcgggtggtggcattcagaaaggcgtcgattacggagacaaagatttctatgtgtttgacatcctgtctgatagcgggaacgagaaagtttactgggatgactatcgcgtcgaatcgttttgcaccactgtgggtctgaaattagcgcctctgctgggacgtggtagtttcgctgaactgtcccagtacccaaacgatttcaaaagcctggtgaaccgttataatgaattggttgacacggtcggcctggagatggccaataaacacgtctttggtccgcaagcgtcttctgaaactggcctggcagaaggctacgttcttaaacccgtctatccgcgcttctttaatgtgggtacgcgcgtggcgattaaatgcaagaactccaaattttcggagaaagccaaactgatttcgccaattaaagcgaaggttgaactgacggagaacgataaacgtctgctcggaatctttagcgaatatgttacctggaatcgcgtcagtaacgtactgtcacatattggctcagtgaccgccaaagattttgggcgtgtttcgggtctgacgatgaaagacatcattcgcgaagcagcacgcgaaggccatgatctgttgttcgctgataacccgtcggcggtgctgaaggagctggcgggcctcatccagaacacgattcgctccaaatggcacgaagttctggag

SEQ ID NO: 2458 - protein, 346 aa, synthetic construct
  REGION 1..346: note = variant of RNA ligase 2 from Klebsiella phage KP179
MHHHHHHGGSNMFAYYSSLENHTNAKFISKIRGAGFLMHTVEWVAREKIHGTNFSVIITPTEIVPAKRTGPILEDESFFGHEIIMKKYMDSFVKVQNMLNAMDLVSVQIFGEFAGGGIQKGVDYGDKDFYVFDILSDSGNEKVYWDDYRVESFCTTVGLKLAPLLGRGSFAELSQYPNDFKSLVNRYNELVDTVGLEMANKHVFGPQASSETGLAEGYVLKPVYPRFFNVGTRVAIKCKNSKFSEKAKLISPIKAKVELTENDKRLLGIFSEYVTWNRVSNVLSHIGSVTAKDFGRVSGLTMKDIIREAAREGHDLLFADNPSAVLKELAGLIQNTIRSKWHEVLE

SEQ ID NO: 2459 - DNA, 1038 bp, synthetic construct
  misc_feature 1..1038: note = variant of RNA ligase 2 from Klebsiella phage KP179
  source 1..1038: mol_type = other DNA
atgcatcaccatcaccatcacggtggcagcaacatgtttgcgtattattcaagtctggaaaaccataccaatgccaagttcattagcaagatccgtggtgcaggcttcctgatgcacaccgtggaatgggtagctcgcgagaagattcatggaacgaactttagcgttatcattactccgaccgaaatcgtgccagccaaacgcacagggccgatcttggaagatgagagcttctttggtcatgaaattatcatgaaaaaatatatggactccttcgtgaaggtgcagaacatgctgaatgcgatggatcttgttagcgtgcaaatctttggcgaatttgcgggtggtggcattcagaaaggcgtcgattacggagacaaagatttctatgtgtttgacatcctgtctgatagcgggaacgagaaagtttactgggatgactatcgcgtcgaatcgttttgcaccactgtgggtctgaaattagcgcctctgctgggacgtggtagtttcgctgaactgtcccagtacccaaacgatttcaaaagcctggtgaaccgttataatgaattggttgacacggtcggcctggagatggccaataaacacgtctttggtccgcaagcgtcttctgaaactaatctggcagaaggctacgttcttaaacccgtctatccgcgcttctttaatgtgggtacgcgcgtggcgattaaatgcaagaactccaaattttcggagaaagccaaactgatttcgccaattaaagcgaaggttgaactgacggagaacgataaacgtctgctcggaatctttagcgaatatgttacctggaatcgcgtcagtaacgtactgtcacatattggctcagtgaccgccaaagattttgggcgtgtttcgggtctgacgatgaaagacatcattcgcgaagcagcacgcgaaggccatgatctgttgttcgctgataacccgtcggcggtgctgaaggagctgacaggcctcatccagaacacgattcgctccaaatggcacgaagttctggag

SEQ ID NO: 2460 - protein, 346 aa, synthetic construct
  REGION 1..346: note = variant of RNA ligase 2 from Klebsiella phage KP179
MHHHHHHGGSNMFAYYSSLENHTNAKFISKIRGAGFLMHTVEWVAREKIHGTNFSVIITPTEIVPAKRTGPILEDESFFGHEIIMKKYMDSFVKVQNMLNAMDLVSVQIFGEFAGGGIQKGVDYGDKDFYVFDILSDSGNEKVYWDDYRVESFCTTVGLKLAPLLGRGSFAELSQYPNDFKSLVNRYNELVDTVGLEMANKHVFGPQASSETNLAEGYVLKPVYPRFFNVGTRVAIKCKNSKFSEKAKLISPIKAKVELTENDKRLLGIFSEYVTWNRVSNVLSHIGSVTAKDFGRVSGLTMKDIIREAAREGHDLLFADNPSAVLKELTGLIQNTIRSKWHEVLE

SEQ ID NO: 2461 - DNA, 1038 bp, synthetic construct
  misc_feature 1..1038: note = variant of RNA ligase 2 from Klebsiella phage KP179
  source 1..1038: mol_type = other DNA
atgcatcaccatcaccatcacggtggcagcaacatgtttgcgtattattcaagtctggaaaaccataccaatgccaagttcattagcaagatccgtggtgcaggcttcctgatgcacaccgtggaatgggtagctcgcgagaagattcatggaacgaactttagcgttatcattactccgaccgaaatcgtgccagccaaacgcacagggccgatcttggaagatgagagcttctttggtcatgaaattatcatgaaaaaatatatggactccttcgtgaaggtgcagaacatgctgaatgcgatggatcttgttagcgtgcaaatctttggcgaatttgcgggtggtggcattcagaaaggcgtcgattacggagacaaagatttctatgtgtttgacatcctgtctgatagcgggaacgagaaagtttactgggatgactatcgcgtcgaatcgttttgcaccactgtgggtctgaaattagcgcctctgctgggacgtggtagtttcgctgaactgtcccagtacccaaacgatttcaaaagcctggtgaaccgttataatgaattggttgacacggtcggcctggagatggccaataaacacgtctttggtccgcaagcgtcttctgaaactggcctggcagaaggctacgttcttaaacccgtctatccgcgcttctttaatgtgggtacgcgcgtggcgattaaatgcaagaactccaaattttcggagaaagccaaactgatttcgccaattaaagcgaaggttgaactgacggagaacgataaacgtctgctcggaatctttagcgaatatgttacctggaatcgcgtcagtaacgtactgtcacatattggctcagtgaccgccaaagattttgggcgtgtttcgggtctgacggcgaaagacatcattcgcgaagcagcacgcgaaggccatgatctgttgttcgctgataacccgtcggcggtgctgaaggagctgacaggcctcatccagaacacgattcgctccaaatggcacgaagttctggag

SEQ ID NO: 2462 - protein, 346 aa, synthetic construct
  REGION 1..346: note = variant of RNA ligase 2 from Klebsiella phage KP179
MHHHHHHGGSNMFAYYSSLENHTNAKFISKIRGAGFLMHTVEWVAREKIHGTNFSVIITPTEIVPAKRTGPILEDESFFGHEIIMKKYMDSFVKVQNMLNAMDLVSVQIFGEFAGGGIQKGVDYGDKDFYVFDILSDSGNEKVYWDDYRVESFCTTVGLKLAPLLGRGSFAELSQYPNDFKSLVNRYNELVDTVGLEMANKHVFGPQASSETGLAEGYVLKPVYPRFFNVGTRVAIKCKNSKFSEKAKLISPIKAKVELTENDKRLLGIFSEYVTWNRVSNVLSHIGSVTAKDFGRVSGLTAKDIIREAAREGHDLLFADNPSAVLKELTGLIQNTIRSKWHEVLE

SEQ ID NO: 2463 - DNA, 1038 bp, synthetic construct
  misc_feature 1..1038: note = variant of RNA ligase 2 from Klebsiella phage KP179
  source 1..1038: mol_type = other DNA
atgcatcaccatcaccatcacggtggcagcaacatgtttgcgtattattcaagtctggaaaaccataccaatgccaagttcattagcaagatccgtggtgcaggcttcctgatgcacaccgtggaatgggtagctcgcgagaagattcatggaacgaactttagcgttatcattactccgaccgaaatcgtgccagccaaacgcacagggccgatcttggaagatgagagcttctttggtcatgaaattatcatgaaaaaatatatggactccttcgtgaaggtgcagaacatgctgaatgcgatggatcttgttagcgtgcaaatctttggcgaatttgcgggtggtggcattcagaaaggcgtcgattacggagacaaagatttctatgtgtttgacatcctgtctgatagcgggaacgagaaagtttactgggatgactatcgcgtcgaatcgttttgcaccactgtgggtctgaaattagcgcctctgctgggacgtggtagtttcgctgaactgtcccagtacccaaacgatttcaaaagcctggtgaaccgttataatgaattggttgacacggtcggcctggagatggccaataaacacgtctttggtccgcaagcgtcttctgaaactggcctggcagaaggctacgttcttaaacccgtctatccgcgcttctttaatgtgggtacgcgcgtggcgattaaatgcaagaactccaaattttcggagaaagccaaactgatttcgccaattaaagcgaaggttgaactgacggagaacgataaacgtctgctcggaatctttagcgaatatgttacctggaatcgcgtcagtaacgtactgtcacatattggctcagtgaccgccaaagattcggggcgtgtttcgggtctgacgatgaaagacatcattcgcgaagcagcacgcgaaggccatgatctgttgttcgctgataacccgtcggcggtgctgaaggagctgacaggcctcatccagaacacgattcgctccaaatggcacgaagttctggag

SEQ ID NO: 2464 - protein, 346 aa, synthetic construct
  REGION 1..346: note = variant of RNA ligase 2 from Klebsiella phage KP179
MHHHHHHGGSNMFAYYSSLENHTNAKFISKIRGAGFLMHTVEWVAREKIHGTNFSVIITPTEIVPAKRTGPILEDESFFGHEIIMKKYMDSFVKVQNMLNAMDLVSVQIFGEFAGGGIQKGVDYGDKDFYVFDILSDSGNEKVYWDDYRVESFCTTVGLKLAPLLGRGSFAELSQYPNDFKSLVNRYNELVDTVGLEMANKHVFGPQASSETGLAEGYVLKPVYPRFFNVGTRVAIKCKNSKFSEKAKLISPIKAKVELTENDKRLLGIFSEYVTWNRVSNVLSHIGSVTAKDSGRVSGLTMKDIIREAAREGHDLLFADNPSAVLKELTGLIQNTIRSKWHEVLE

SEQ ID NO: 2465 - DNA, 1038 bp, synthetic construct
  misc_feature 1..1038: note = variant of RNA ligase 2 from Klebsiella phage KP179
  source 1..1038: mol_type = other DNA
atgcatcaccatcaccatcacggtggcagcaacatgtttgcgtattattcaagtctggaaaaccataccaatgccaagttcattagcaagatccgtggtgcaggcttcctgatgcacaccgtggaatgggtagctcgcgagaagattcatggaacgaactttagcgttatcattactccgaccgaaatcgtgccagccaaacgcacagggccgatcttggaagatgagagcttctttggtcatgaaattatcatgaaaaaatatatggactccttcgtgaaggtgcagaacatgctgaatgcgatggatcttgttagcgtgcaaatctttggcgaatttgcgggtggtggcattcagaaaggcgtcgattacggagacaaagatttctatgtgtttgacatcctgtctgatagcgggaacgagaaagtttactgggatgactatcgcgtcgaatcgttttgcaccactgtgggtctgaaattagcgcctctgctgggacgtggtagtttcgctgaactgtcccagtacccaaacgatttcaaaagcctggtgaaccgttataatgaattggttgacacggtcggcctggagatggccaataaacacgtctttggtccgcaagcgtcttctgaaactggcctggcagaaggctacgttcttaaacccgtctatccgcgcttctttaatgtgggtacgcgcgtggcgattaaatgcaagaactccaaattttcggagaaagccaaactgatttcgccaattaaagcgaaggttgaactgacggagaacgataaacgtctgctcggaatctttagcgaatatgttacctggaatcgcgtcagtaacgtactgtcacatattggctcagtgaccgccaaagattttgggcgtgtttcgggtctgacgatgaaagacatcattcgcgaagcagcacgcgaaggccatgatctgttgttcgctgataacccgtcggcggtgctgaaggagctgacaggcctcatccagaacattattcgctccaaatggcacgaagttctggag

SEQ ID NO: 2466 - protein, 346 aa, synthetic construct
  REGION 1..346: note = variant of RNA ligase 2 from Klebsiella phage KP179
MHHHHHHGGSNMFAYYSSLENHTNAKFISKIRGAGFLMHTVEWVAREKIHGTNFSVIITPTEIVPAKRTGPILEDESFFGHEIIMKKYMDSFVKVQNMLNAMDLVSVQIFGEFAGGGIQKGVDYGDKDFYVFDILSDSGNEKVYWDDYRVESFCTTVGLKLAPLLGRGSFAELSQYPNDFKSLVNRYNELVDTVGLEMANKHVFGPQASSETGLAEGYVLKPVYPRFFNVGTRVAIKCKNSKFSEKAKLISPIKAKVELTENDKRLLGIFSEYVTWNRVSNVLSHIGSVTAKDFGRVSGLTMKDIIREAAREGHDLLFADNPSAVLKELTGLIQNIIRSKWHEVLE

SEQ ID NO: 2467 - DNA, 1038 bp, synthetic construct
  misc_feature 1..1038: note = variant of RNA ligase 2 from Klebsiella phage KP179
  source 1..1038: mol_type = other DNA
atgcatcaccatcaccatcacggtggcagcaacatgtttgcgtattattcaagtctggaaaaccataccaatgccaagttcattagcaagatccgtggtgcaggcttcctgatgcacaccgtggaatgggtagctcgcgagaagattcatggaacgaactttagcgttatcattactccgaccgaaatcgtgccagccaaacgcacagggccgatcttggaagatgagagcttctttggtcatgaaattatcatgaaaaaatatatggactccttcgtgaaggtgcagaacatgctgaatgcgatggatcttgttagcgtgcaaatctttggcgaatttgcgggtggtggcattcagaaaggcgtcgattacggagacaaagatttctatgtgtttgacatcctgtctgatagcgggaacgagaaagtttactgggatgactatcgcgtcgaatcgttttgcaccactgtgggtctgaaattagcgcctctgctgggacgtggtagtttcgctgaactgtcccagtacccagtggatttcaaaagcctggtgaaccgttataatgaattggttgacacggtcggcctggagatggccaataaacacgtctttggtccgcaagcgtcttctgaaactggcctggcagaaggctacgttcttaaacccgtctatccgcgcttctttaatgtgggtacgcgcgtggcgattaaatgcaagaactccaaattttcggagaaagccaaactgatttcgccaattaaagcgaaggttgaactgacggagaacgataaacgtctgctcggaatctttagcgaatatgttacctggaatcgcgtcagtaacgtactgtcacatattggctcagtgaccgccaaagattttgggcgtgtttcgggtctgacgatgaaagacatcattcgcgaagcagcacgcgaaggccatgatctgttgttcgctgataacccgtcggcggtgctgaaggagctgacaggcctcatccagaacacgattcgctccaaatggcacgaagttctggag

SEQ ID NO: 2468 - protein, 346 aa, synthetic construct
  REGION 1..346: note = variant of RNA ligase 2 from Klebsiella phage KP179
MHHHHHHGGSNMFAYYSSLENHTNAKFISKIRGAGFLMHTVEWVAREKIHGTNFSVIITPTEIVPAKRTGPILEDESFFGHEIIMKKYMDSFVKVQNMLNAMDLVSVQIFGEFAGGGIQKGVDYGDKDFYVFDILSDSGNEKVYWDDYRVESFCTTVGLKLAPLLGRGSFAELSQYPVDFKSLVNRYNELVDTVGLEMANKHVFGPQASSETGLAEGYVLKPVYPRFFNVGTRVAIKCKNSKFSEKAKLISPIKAKVELTENDKRLLGIFSEYVTWNRVSNVLSHIGSVTAKDFGRVSGLTMKDIIREAAREGHDLLFADNPSAVLKELTGLIQNTIRSKWHEVLE

SEQ ID NO: 2469 - DNA, 1038 bp, synthetic construct
  misc_feature 1..1038: note = variant of RNA ligase 2 from Klebsiella phage KP179
  source 1..1038: mol_type = other DNA
atgcatcaccatcaccatcacggtggcagcaacatgtttgcgtattattcaagtctggaaaaccataccaatgccaagttcattagcaagatccgtggtgcaggcttcctgatgcacaccgtggaatgggtagctcgcgagaagattcatggaacgaactttagcgttatcattactccgaccgaaatcgtgccagccaaacgcacagggccgatcttggaagatgagagcttctttggtcatgaaattatcatgaaaaaatatatggactccttcgtgaaggtgcagaacatgctgaatgcgatggatcttgttagcgtgcaaatctttggcgaatttgcgggtggtggcattcagaaaggcgtcgattacggagacaaagatttctatgtgtttgacatcctgtctgatagcgggaacgagaaagtttactgggatgactatcgcgtcgaatcgttttgcaccactgtgggtctgaaattagcgcctctgctgggacgtggtagtttcgctgaactgtcccagtacccaaacgatttcaaaagcctggtgaaccgttataatgaattggttgacacggtcggcctggagatggccaataaacacgtctttggtccgcaagcgtcttctgaaactggcctggcagaaggctacgttcttaaacccgtctatccgcgcttctttaatgtgggtacgcgcgtggcgattaaatgcaagaactccaaattttcggagaaagccaaactgatttcgccaattaaagcgaaggttgaactgacggagaacgataaacgtctgctcggaatctttagcgaatatgttacctggaatcgcgtcagtaacgtactgtcacatattggctcagtgaccgccaaagattttgggcgtgtttcgggtctgacgatgaaagacatcattcgcgaagcagcacgcgaaggccatgatctgttgttcgctgataacccgtcgggggtgctgaaggagctgacaggcctcatccagaacacgattcgctccaaatggcacgaagttctggag

SEQ ID NO: 2470 - protein, 346 aa, synthetic construct
  REGION 1..346: note = variant of RNA ligase 2 from Klebsiella phage KP179
MHHHHHHGGSNMFAYYSSLENHTNAKFISKIRGAGFLMHTVEWVAREKIHGTNFSVIITPTEIVPAKRTGPILEDESFFGHEIIMKKYMDSFVKVQNMLNAMDLVSVQIFGEFAGGGIQKGVDYGDKDFYVFDILSDSGNEKVYWDDYRVESFCTTVGLKLAPLLGRGSFAELSQYPNDFKSLVNRYNELVDTVGLEMANKHVFGPQASSETGLAEGYVLKPVYPRFFNVGTRVAIKCKNSKFSEKAKLISPIKAKVELTENDKRLLGIFSEYVTWNRVSNVLSHIGSVTAKDFGRVSGLTMKDIIREAAREGHDLLFADNPSGVLKELTGLIQNTIRSKWHEVLE

SEQ ID NO: 2471 - DNA, 1038 bp, synthetic construct
  misc_feature 1..1038: note = variant of RNA ligase 2 from Klebsiella phage KP179
  source 1..1038: mol_type = other DNA
atgcatcaccatcaccatcacggtggcagcaacatgtttgcgtattattcaagtctggaaaaccataccaatgccaagttcattagcaagatccgtggtgcaggcttcctgatgcacaccgtggaatgggtagctcgcgagaagattcatggaacgaactttagcgttatcattactccgaccgaaatcgtgccagccaaacgcacagggccgatcttggaagatgagagcttctttggtcatgaaattatcatgaaaaaatatatggactccttcgtgaaggtgcagaacatgctgaatgcgatggatcttgttagcgtgcaaatctttggcgaatttgcgggtggtggcattcagaaaggcgtcgattacggagacaaagatttctatgtgtttgacatcctgtctgatagcgggaacgagaaagtttactgggatgactatcgcgtcgaatcgttttgcaccactgtgggtctgaaattagcgcctctgctgggacgtggtagtttcgctgaactgtcccagtacccaaacgatttcaaaagcctggtgaaccgttataatgaattggttgacacggtcggcctggagatggccaataaacacgtctttggtccgcaagcgtcttctgaaactggcctggcagaaggctacgttcttaaacccgtctatccgcgcttctttaatgtgggtacgcgcgtggcgattaaatgcaagaactccaaattttcggagaaagccaaactgatttcgccaattaaagcgaaggttgaactgacggagaacgataaacgtctgctcggaatctttagcgaatatgttacctggaatcgcgtcagtaacgtactgtcacatattggctcagtgaccgccaaagattttgggcgtttgtcgggtctgacgatgaaagacatcattcgcgaagcagcacgcgaaggccatgatctgttgttcgctgataacccgtcggcggtgctgaaggagctgacaggcctcatccagaacacgattcgctccaaatggcacgaagttctggag

SEQ ID NO: 2472 - protein, 346 aa, synthetic construct
  REGION 1..346: note = variant of RNA ligase 2 from Klebsiella phage KP179
MHHHHHHGGSNMFAYYSSLENHTNAKFISKIRGAGFLMHTVEWVAREKIHGTNFSVIITPTEIVPAKRTGPILEDESFFGHEIIMKKYMDSFVKVQNMLNAMDLVSVQIFGEFAGGGIQKGVDYGDKDFYVFDILSDSGNEKVYWDDYRVESFCTTVGLKLAPLLGRGSFAELSQYPNDFKSLVNRYNELVDTVGLEMANKHVFGPQASSETGLAEGYVLKPVYPRFFNVGTRVAIKCKNSKFSEKAKLISPIKAKVELTENDKRLLGIFSEYVTWNRVSNVLSHIGSVTAKDFGRLSGLTMKDIIREAAREGHDLLFADNPSAVLKELTGLIQNTIRSKWHEVLE

SEQ ID NO: 2473 - DNA, 1038 bp, synthetic construct
  misc_feature 1..1038: note = variant of RNA ligase 2 from Klebsiella phage KP179
  source 1..1038: mol_type = other DNA
atgcatcaccatcaccatcacggtggcagcaacatgtttgcgtattattcaagtctggaaaaccataccaatgccaagttcattagcaagatccgtggtgcaggcttcctgatgcacaccgtggaatgggtagctcgcgagaagattcatggaacgaactttagcgttatcattactccgaccgaaatcgtgccagccaaacgcacagggccgatcttggaagatgagagcttctttggtcatgaaattatcatgaaaaaatatatggactccttcgtgaaggtgcagaacatgattaatgcgatggatcttgttagcgtgcaaatctttggcgaatttgcgggtggtggcattcagaaaggcgtcgattacggagacaaagatttctatgtgtttgacatcctgtctgatagcgggaacgagaaagtttactgggatgactatcgcgtcgaatcgttttgcaccactgtgggtctgaaattagcgcctctgctgggacgtggtagtttcgctgaactgtcccagtacccaaacgatttcaaaagcctggtgaaccgttataatgaattggttgacacggtcggcctggagatggccaataaacacgtctttggtccgcaagcgtcttctgaaactggcctggcagaaggctacgttcttaaacccgtctatccgcgcttctttaatgtgggtacgcgcgtggcgattaaatgcaagaactccaaattttcggagaaagccaaactgatttcgccaattaaagcgaaggttgaactgacggagaacgataaacgtctgctcggaatctttagcgaatatgttacctggaatcgcgtcagtaacgtactgtcacatattggctcagtgaccgccaaagattttgggcgtgtttcgggtctgacgatgaaagacatcattcgcgaagcagcacgcgaaggccatgatctgttgttcgctgataacccgtcggcggtgctgaaggagctgacaggcctcatccagaacacgattcgctccaaatggcacgaagttctggag

SEQ ID NO: 2474 - protein, 346 aa, synthetic construct
  REGION 1..346: note = variant of RNA ligase 2 from Klebsiella phage KP179
MHHHHHHGGSNMFAYYSSLENHTNAKFISKIRGAGFLMHTVEWVAREKIHGTNFSVIITPTEIVPAKRTGPILEDESFFGHEIIMKKYMDSFVKVQNMINAMDLVSVQIFGEFAGGGIQKGVDYGDKDFYVFDILSDSGNEKVYWDDYRVESFCTTVGLKLAPLLGRGSFAELSQYPNDFKSLVNRYNELVDTVGLEMANKHVFGPQASSETGLAEGYVLKPVYPRFFNVGTRVAIKCKNSKFSEKAKLISPIKAKVELTENDKRLLGIFSEYVTWNRVSNVLSHIGSVTAKDFGRVSGLTMKDIIREAAREGHDLLFADNPSAVLKELTGLIQNTIRSKWHEVLE

SEQ ID NO: 2475 - DNA, 1038 bp, synthetic construct
  misc_feature 1..1038: note = variant of RNA ligase 2 from Klebsiella phage KP179
  source 1..1038: mol_type = other DNA
atgcatcaccatcaccatcacggtggcagcaacatgtttgcgtattattcaagtctggaaaaccataccaatgccaagttcattagcaagatccgtggtgcaggcttcctgatgcacaccgtggaatgggtagctcgcgagaagattcatggaacgaactttagcgttatcattactccgaccgaaatcgtgccagccaaacgcacagggccgatcttggaagatgagagcttctttggtcatgaaattatcatgaaaaaatatatggactccttcgtgaaggtgcagaacatgctgaatgcgatggatcttgttagcgtgcaaatctttggcgaatttgcgggtggtggcattcagaaaggcgtcgattacggagacaaagatttctatgtgtttgacatcctgtctgatagcgggaacgagaaagtttactgggatgactatcgcgtcgaatcgttttgcaccactgtgggtctgaaattagcgcctctgctgggacgtggtagtttcgctgaactgtcccagtacccaaacgatttcaaaagcctgttgaaccgttataatgaattggttgacacggtcggcctggagatggccaataaacacgtctttggtccgcaagcgtcttctgaaactggcctggcagaaggctacgttcttaaacccgtctatccgcgcttctttaatgtgggtacgcgcgtggcgattaaatgcaagaactccaaattttcggagaaagccaaactgatttcgccaattaaagcgaaggttgaactgacggagaacgataaacgtctgctcggaatctttagcgaatatgttacctggaatcgcgtcagtaacgtactgtcacatattggctcagtgaccgccaaagattttgggcgtgtttcgggtctgacgatgaaagacatcattcgcgaagcagcacgcgaaggccatgatctgttgttcgctgataacccgtcggcggtgctgaaggagctgacaggcctcatccagaacacgattcgctccaaatggcacgaagttctggag

SEQ ID NO: 2476 - protein, 346 aa, synthetic construct
  REGION 1..346: note = variant of RNA ligase 2 from Klebsiella phage KP179
MHHHHHHGGSNMFAYYSSLENHTNAKFISKIRGAGFLMHTVEWVAREKIHGTNFSVIITPTEIVPAKRTGPILEDESFFGHEIIMKKYMDSFVKVQNMLNAMDLVSVQIFGEFAGGGIQKGVDYGDKDFYVFDILSDSGNEKVYWDDYRVESFCTTVGLKLAPLLGRGSFAELSQYPNDFKSLLNRYNELVDTVGLEMANKHVFGPQASSETGLAEGYVLKPVYPRFFNVGTRVAIKCKNSKFSEKAKLISPIKAKVELTENDKRLLGIFSEYVTWNRVSNVLSHIGSVTAKDFGRVSGLTMKDIIREAAREGHDLLFADNPSAVLKELTGLIQNTIRSKWHEVLE

SEQ ID NO: 2477 - DNA, 1038 bp, synthetic construct
  misc_feature 1..1038: note = variant of RNA ligase 2 from Klebsiella phage KP179
  source 1..1038: mol_type = other DNA
atgcatcaccatcaccatcacggtggcagcaacatgtttgcgtattattcaagtctggaaaaccataccaatgccaagttcattagcaagatccgtggtgcaggcttcctgatgcacaccgtggaatgggtagctcgcgagaagattcatggaacgaactttagcgttatcattactccgaccgaaatcgtgccagccaaacgcacagggccgatcttggaagatgagagcttctttggtcatgaaattatcatgaaaaaatatatggactccttcgtgaaggtgcagaacatgctgaatgcgatggatcttgttagcgtgcaaatctttggcgaatttgcgggtggtggcattcagaaaggcgtcgattacggagacaaagatttctatgtgtttgacatcctgtctgatagcgggaacgagaaagtttactgggatgactatcgcgtcgaatcgttttgcaccactgtgggtctgaaattagcgcctctgctgggacgtggtaatttcgctgaactgtcccagtacccaaacgatttcaaaagcctggtgaaccgttataatgaattggttgacacggtcggcctggagatggccaataaacacgtctttggtccgcaagcgtcttctgaaactggcctggcagaaggctacgttcttaaacccgtctatccgcgcttctttaatgtgggtacgcgcgtggcgattaaatgcaagaactccaaattttcggagaaagccaaactgatttcgccaattaaagcgaaggttgaactgacggagaacgataaacgtctgctcggaatctttagcgaatatgttacctggaatcgcgtcagtaacgtactgtcacatattggctcagtgaccgccaaagattttgggcgtgtttcgggtctgacgatgaaagacatcattcgcgaagcagcacgcgaaggccatgatctgttgttcgctgataacccgtcggcggtgctgaaggagctgacaggcctcatccagaacacgattcgctccaaatggcacgaagttctggag

SEQ ID NO: 2478 - protein, 346 aa, synthetic construct
  REGION 1..346: note = variant of RNA ligase 2 from Klebsiella phage KP179
MHHHHHHGGSNMFAYYSSLENHTNAKFISKIRGAGFLMHTVEWVAREKIHGTNFSVIITPTEIVPAKRTGPILEDESFFGHEIIMKKYMDSFVKVQNMLNAMDLVSVQIFGEFAGGGIQKGVDYGDKDFYVFDILSDSGNEKVYWDDYRVESFCTTVGLKLAPLLGRGNFAELSQYPNDFKSLVNRYNELVDTVGLEMANKHVFGPQASSETGLAEGYVLKPVYPRFFNVGTRVAIKCKNSKFSEKAKLISPIKAKVELTENDKRLLGIFSEYVTWNRVSNVLSHIGSVTAKDFGRVSGLTMKDIIREAAREGHDLLFADNPSAVLKELTGLIQNTIRSKWHEVLE

SEQ ID NO: 2479 - DNA, 1038 bp, synthetic construct
  misc_feature 1..1038: note = variant of RNA ligase 2 from Klebsiella phage KP179
  source 1..1038: mol_type = other DNA
atgcatcaccatcaccatcacggtggcagcaacatgtttgcgtattattcaagtctggaaaaccataccaatgccaagttcattagcaagatccgtggtgcaggcttcctgatgcacaccgtggaatgggtagctcgcgagaagattcatggaacgaactttagcgttatcattactccgaccgaaatcgtgccagccaaacgcacagggccgatcttggaagatgagagcttctttggtcatgaaattatcatgaaaaaatatatggactccttcgtgaaggtgcagaacatgctgaatgcgatggatcttgttagcgtgcaaatctttggcgaatttgcgggtggtggcattcagaaaggcgtcgattacggagacaaagatttctatgtgtttgacatcctgtctgatagcgggaacgagaaagtttactgggatgactatcgcgtcgaatcgttttgcaccactgtgggtctgaaattagcgcctctgctgggacgtggtagtttcgctgaactgtcccagtacccaaacgatttcaaaagcctggtgaaccgttataatgaattggttgacacggtcggcctggagatggccaataaacacgtctttggtccgcaagcgtcttctgaagggggcctggcagaaggctacgttcttaaacccgtctatccgcgcttctttaatgtgggtacgcgcgtggcgattaaatgcaagaactccaaattttcggagaaagccaaactgatttcgccaattaaagcgaaggttgaactgacggagaacgataaacgtctgctcggaatctttagcgaatatgttacctggaatcgcgtcagtaacgtactgtcacatattggctcagtgaccgccaaagattttgggcgtgtttcgggtctgacgatgaaagacatcattcgcgaagcagcacgcgaaggccatgatctgttgttcgctgataacccgtcggcggtgctgaaggagctgacaggcctcatccagaacacgattcgctccaaatggcacgaagttctggag

SEQ ID NO: 2480 - protein, 346 aa, synthetic construct
  REGION 1..346: note = variant of RNA ligase 2 from Klebsiella phage KP179
MHHHHHHGGSNMFAYYSSLENHTNAKFISKIRGAGFLMHTVEWVAREKIHGTNFSVIITPTEIVPAKRTGPILEDESFFGHEIIMKKYMDSFVKVQNMLNAMDLVSVQIFGEFAGGGIQKGVDYGDKDFYVFDILSDSGNEKVYWDDYRVESFCTTVGLKLAPLLGRGSFAELSQYPNDFKSLVNRYNELVDTVGLEMANKHVFGPQASSEGGLAEGYVLKPVYPRFFNVGTRVAIKCKNSKFSEKAKLISPIKAKVELTENDKRLLGIFSEYVTWNRVSNVLSHIGSVTAKDFGRVSGLTMKDIIREAAREGHDLLFADNPSAVLKELTGLIQNTIRSKWHEVLE

SEQ ID NO: 2481 - DNA, 1038 bp, synthetic construct
  misc_feature 1..1038: note = variant of RNA ligase 2 from Klebsiella phage KP179
  source 1..1038: mol_type = other DNA
atgcatcaccatcaccatcacggtggcagcaacatgtttgcgtattattcaagtctggaaaaccataccaatgccaagttcattagcaagatccgtggtgcaggcttcctgatgcacaccgtggaatgggtagctcgcgagaagattcatggaacgaactttagcgttatcattactccgaccgaaatcgtgccagccaaacgcacagggccgatcttggaagatgagagcttctttggtcatgaaattatcatgaaaaaatatatggactccttcgtgaaggtgcagaacatgctgaatgcgatggatcttgttagcgtgcaaatctttggcgaatttgcgggtggtggcattcagaaaggcgtcgattacggagacaaagatttctatgtgtttgacatcctgtctgatagcgggaacgagaaagtttactgggatgactatcgcgtcgaatcgttttgcaccactgtgggtctgaaattagcgcctctgctgggacgtggtagtttcgctgaactgtcccagtacccaaacgatttcaaaagcctggtgaaccgttataatgaattggttgacacggtcggcctggagatggccaataaacacgtctttggtccgcaagcgtcttctgaaactggcctggcagaaggctacgttcttaaacccgtctatccgcgcttctttaatgtgggtacgcgcgtggcgattaaatgcaagaactccaaattttcggagaaagccaaactgatttcgccaattaaagcgaaggttgaactgacggagaacgataaacgtctgctcggaatctttagcgaatatgttacctggaatcgcgtcagtaacgctctgtcacatattggctcagtgaccgccaaagattttgggcgtgtttcgggtctgacgatgaaagacatcattcgcgaagcagcacgcgaaggccatgatctgttgttcgctgataacccgtcggcggtgctgaaggagctgacaggcctcatccagaacacgattcgctccaaatggcacgaagttctggag

SEQ ID NO: 2482 - protein, 346 aa, synthetic construct
  REGION 1..346: note = variant of RNA ligase 2 from Klebsiella phage KP179
MHHHHHHGGSNMFAYYSSLENHTNAKFISKIRGAGFLMHTVEWVAREKIHGTNFSVIITPTEIVPAKRTGPILEDESFFGHEIIMKKYMDSFVKVQNMLNAMDLVSVQIFGEFAGGGIQKGVDYGDKDFYVFDILSDSGNEKVYWDDYRVESFCTTVGLKLAPLLGRGSFAELSQYPNDFKSLVNRYNELVDTVGLEMANKHVFGPQASSETGLAEGYVLKPVYPRFFNVGTRVAIKCKNSKFSEKAKLISPIKAKVELTENDKRLLGIFSEYVTWNRVSNALSHIGSVTAKDFGRVSGLTMKDIIREAAREGHDLLFADNPSAVLKELTGLIQNTIRSKWHEVLE

SEQ ID NO: 2483 - DNA, 1038 bp, synthetic construct
  misc_feature 1..1038: note = variant of RNA ligase 2 from Klebsiella phage KP179
  source 1..1038: mol_type = other DNA
atgcatcaccatcaccatcacggtggcagcaacatgtttgcgtattattcaagtctggaaaaccataccaatgccaagttcattagcaagatccgtggtgcaggcttcctgatgcacaccgtggaatgggtagctcgcgagaagattcatggaacgaactttagcgttatcattactccgaccgaaatcgtgccagccaaacgcacagggccgatcttggaagatgagagcttctttggtcatgaaattatcatgaaaaaatatatggactccttcgtgaaggtgcagaacatgctgaatgcgatggatcttgttagcgtgcaaatctttggcgaatttgcgggtggtggcattcagaaaggcgtcgattacggagacaaagatttctatgtgtttgacatcctgtctgatagcgggaacgagaaagtttactgggatgactatcgcgtcgaatcgttttgcaccactgtgggtctgaaattagcgcctctgctgggacgtggtagtttcgctgaactgtcccagtacccaaacgatttcaaaagcctggtgaaccgttataatgaattggttgacacggtcggcctggagatggccaataaacacgtctttggtccgcaagcgtcttctgaaactggcctggcagaaggctacgttcttaaacccgtctatccgcgcttctttaatgtgggtacgcgcgtggcgattaaatgcaagaactccaaattttcggagaaagccaaactgatttcgccaattaaagcgaaggttgaactgacggagaacgataaacgtctgctcggaatctttggtgaatatgttacctggaatcgcgtcagtaacgtactgtcacatattggctcagtgaccgccaaagattttgggcgtgtttcgggtctgacgatgaaagacatcattcgcgaagcagcacgcgaaggccatgatctgttgttcgctgataacccgtcggcggtgctgaaggagctgacaggcctcatccagaacacgattcgctccaaatggcacgaagttctggag

SEQ ID NO: 2484 - protein, 346 aa, synthetic construct
  REGION 1..346: note = variant of RNA ligase 2 from Klebsiella phage KP179
MHHHHHHGGSNMFAYYSSLENHTNAKFISKIRGAGFLMHTVEWVAREKIHGTNFSVIITPTEIVPAKRTGPILEDESFFGHEIIMKKYMDSFVKVQNMLNAMDLVSVQIFGEFAGGGIQKGVDYGDKDFYVFDILSDSGNEKVYWDDYRVESFCTTVGLKLAPLLGRGSFAELSQYPNDFKSLVNRYNELVDTVGLEMANKHVFGPQASSETGLAEGYVLKPVYPRFFNVGTRVAIKCKNSKFSEKAKLISPIKAKVELTENDKRLLGIFGEYVTWNRVSNVLSHIGSVTAKDFGRVSGLTMKDIIREAAREGHDLLFADNPSAVLKELTGLIQNTIRSKWHEVLE

SEQ ID NO: 2485 - DNA, 1038 bp, synthetic construct
  misc_feature 1..1038: note = variant of RNA ligase 2 from Klebsiella phage KP179
  source 1..1038: mol_type = other DNA
atgcatcaccatcaccatcacggtggcagcaacatgtttgcgtattattcaagtctggaaaaccataccaatgccaagttcattagcaagatccgtggtgcaggcttcctgatgcacaccgtggaatgggtagctcgcgagaagattcatggaacgaactttagcgttatcattactccgaccgaaatcgtgccagccaaacgcacagggccgatcttggaagatgagagcttctttggtcatgaaattatcatgaaaaaatatatggactccttcgtgaaggtgcagaacatgctgaatgcgatggatcttgttatggtgcaaatctttggcgaatttgcgggtggtggcattcagaaaggcgtcgattacggagacaaagatttctatgtgtttgacatcctgtctgatagcgggaacgagaaagtttactgggatgactatcgcgtcgaatcgttttgcaccactgtgggtctgaaattagcgcctctgctgggacgtggtagtttcgctgaactgtcccagtacccaaacgatttcaaaagcctggtgaaccgttataatgaattggttgacacggtcggcctggagatggccaataaacacgtctttggtccgcaagcgtcttctgaaactggcctggcagaaggctacgttcttaaacccgtctatccgcgcttctttaatgtgggtacgcgcgtggcgattaaatgcaagaactccaaattttcggagaaagccaaactgatttcgccaattaaagcgaaggttgaactgacggagaacgataaacgtctgctcggaatctttagcgaatatgttacctggaatcgcgtcagtaacgtactgtcacatattggctcagtgaccgccaaagattttgggcgtgtttcgggtctgacgatgaaagacatcattcgcgaagcagcacgcgaaggccatgatctgttgttcgctgataacccgtcggcggtgctgaaggagctgacaggcctcatccagaacacgattcgctccaaatggcacgaagttctggag

SEQ ID NO: 2486 - protein, 346 aa, synthetic construct
  REGION 1..346: note = variant of RNA ligase 2 from Klebsiella phage KP179
MHHHHHHGGSNMFAYYSSLENHTNAKFISKIRGAGFLMHTVEWVAREKIHGTNFSVIITPTEIVPAKRTGPILEDESFFGHEIIMKKYMDSFVKVQNMLNAMDLVMVQIFGEFAGGGIQKGVDYGDKDFYVFDILSDSGNEKVYWDDYRVESFCTTVGLKLAPLLGRGSFAELSQYPNDFKSLVNRYNELVDTVGLEMANKHVFGPQASSETGLAEGYVLKPVYPRFFNVGTRVAIKCKNSKFSEKAKLISPIKAKVELTENDKRLLGIFSEYVTWNRVSNVLSHIGSVTAKDFGRVSGLTMKDIIREAAREGHDLLFADNPSAVLKELTGLIQNTIRSKWHEVLE

SEQ ID NO: 2487 - DNA, 1038 bp, synthetic construct
  misc_feature 1..1038: note = variant of RNA ligase 2 from Klebsiella phage KP179
  source 1..1038: mol_type = other DNA
atgcatcaccatcaccatcacggtggcagcaacatgtttgcgtattattcaagtctggaaaaccataccaatgccaagttcattagcaagatccgtggtgcaggcttcctgatgcacaccgtggaatgggtagctcgcgagaagattcatggaacgaactttagcgttatcattactccgaccgaaatcgtgccagccaaacgcacagggccgatcttggaagatgagagcttctttggtcatgaaattatcatgaaaaaatatatggactccttcgtgaaggtgcagaacatgctgaatgcgatggatcttgttagcgtgcaaatctttggcgaatttgcgggtggtggcattcagaaaggcgtcgattacggagacaaagatttctatgtgtttgacatcctgtctgatagcgggaacgagaaagtttactgggatgactatcgcgtcgaatcgttttgcaccactgtgggtctgaaattagcgcctctgctgggacgtggtagtttcgctgaactgtcccagtacccaaacgatttcaaaagcctggtgaaccgttataatgaattggttgacacggtcggcctggagatggccaataaacacgtctttggtccgcaagcgtcttctgaaactggcctggcagaaggctacgttcttaaacccgtctatccgcgcttctttaatgtgggtacgcgcgtggcgattaaatgcaagaactccaaattttcggagaaagccaaactgatttcgccaattaaagcgaaggttgaactgacggagaacgataaacgtctgctcggaatctttgctgaatatgttacctggaatcgcgtcagtaacgtactgtcacatattggctcagtgaccgccaaagattttgggcgtgtttcgggtctgacgatgaaagacatcattcgcgaagcagcacgcgaaggccatgatctgttgttcgctgataacccgtcggcggtgctgaaggagctgacaggcctcatccagaacacgattcgctccaaatggcacgaagttctggag

SEQ ID NO: 2488 - protein, 346 aa, synthetic construct
  REGION 1..346: note = variant of RNA ligase 2 from Klebsiella phage KP179
MHHHHHHGGSNMFAYYSSLENHTNAKFISKIRGAGFLMHTVEWVAREKIHGTNFSVIITPTEIVPAKRTGPILEDESFFGHEIIMKKYMDSFVKVQNMLNAMDLVSVQIFGEFAGGGIQKGVDYGDKDFYVFDILSDSGNEKVYWDDYRVESFCTTVGLKLAPLLGRGSFAELSQYPNDFKSLVNRYNELVDTVGLEMANKHVFGPQASSETGLAEGYVLKPVYPRFFNVGTRVAIKCKNSKFSEKAKLISPIKAKVELTENDKRLLGIFAEYVTWNRVSNVLSHIGSVTAKDFGRVSGLTMKDIIREAAREGHDLLFADNPSAVLKELTGLIQNTIRSKWHEVLE

SEQ ID NO: 2489 - DNA, 1038 bp, synthetic construct
  misc_feature 1..1038: note = variant of RNA ligase 2 from Klebsiella phage KP179
  source 1..1038: mol_type = other DNA
atgcatcaccatcaccatcacggtggcagcaacatgtttgcgtattattcaagtctggaaaaccataccaatgccaagttcattagcaagatccgtggtgcaggcttcctgatgcacaccgtggaatgggtagctcgcgagaagattcatggaacgaactttagcgttatcattactgataccgaaatcgtgccagccaaacgcacagggccgatcttggaagatgagagcttctttggtcatgaaattatcatgaaaaaatatatggactccttcgtgaaggtgcagaacatgctgaatgcgatggatcttgttagcgtgcaaatctttggcgaatttgcgggtggtggcattcagaaaggcgtcgattacggagacaaagatttctatgtgtttgacatcctgtctgatagcgggaacgagaaagtttactgggatgactatcgcgtcgaatcgttttgcaccactgtgggtctgaaattagcgcctctgctgggacgtggtagtttcgctgaactgtcccagtacccaaacgatttcaaaagcctggtgaaccgttataatgaattggttgacacggtcggcctggagatggccaataaacacgtctttggtccgcaagcgtcttctgaaactggcctggcagaaggctacgttcttaaacccgtctatccgcgcttctttaatgtgggtacgcgcgtggcgattaaatgcaagaactccaaattttcggagaaagccaaactgatttcgccaattaaagcgaaggttgaactgacggagaacgataaacgtctgctcggaatctttagcgaatatgttacctggaatcgcgtcagtaacgtactgtcacatattggctcagtgaccgccaaagattttgggcgtgtttcgggtctgacgatgaaagacatcattcgcgaagcagcacgcgaaggccatgatctgttgttcgctgataacccgtcggcggtgctgaaggagctgacaggcctcatccagaacacgattcgctccaaatggcacgaagttctggag

SEQ ID NO: 2490 - protein, 346 aa, synthetic construct
  REGION 1..346: note = variant of RNA ligase 2 from Klebsiella phage KP179
MHHHHHHGGSNMFAYYSSLENHTNAKFISKIRGAGFLMHTVEWVAREKIHGTNFSVIITDTEIVPAKRTGPILEDESFFGHEIIMKKYMDSFVKVQNMLNAMDLVSVQIFGEFAGGGIQKGVDYGDKDFYVFDILSDSGNEKVYWDDYRVESFCTTVGLKLAPLLGRGSFAELSQYPNDFKSLVNRYNELVDTVGLEMANKHVFGPQASSETGLAEGYVLKPVYPRFFNVGTRVAIKCKNSKFSEKAKLISPIKAKVELTENDKRLLGIFSEYVTWNRVSNVLSHIGSVTAKDFGRVSGLTMKDIIREAAREGHDLLFADNPSAVLKELTGLIQNTIRSKWHEVLE

SEQ ID NO: 2491 - DNA, 1038 bp, synthetic construct
  misc_feature 1..1038: note = variant of RNA ligase 2 from Klebsiella phage KP179
  source 1..1038: mol_type = other DNA
atgcatcaccatcaccatcacggtggcagcaacatgtttgcgtattattcaagtctggaaaaccataccaatgccaagttcattagcaagatccgtggtgcaggcttcctgatgcacaccgtggaatgggtagctcgcgagaagattcatggaacgaactttagcgttatcattactccgaccgaaatcgtgccagccaaacgcacagggccgatcttggaagatgagagcttctttggtcatgaaattatcatgaaaaaatatacggactccttcgtgaaggtgcagaacatgctgaatgcgatggatcttgttagcgtgcaaatctttggcgaatttgcgggtggtggcattcagaaaggcgtcgattacggagacaaagatttctatgtgtttgacatcctgtctgatagcgggaacgagaaagtttactgggatgactatcgcgtcgaatcgttttgcaccactgtgggtctgaaattagcgcctctgctgggacgtggtagtttcgctgaactgtcccagtacccaaacgatttcaaaagcctggtgaaccgttataatgaattggttgacacggtcggcctggagatggccaataaacacgtctttggtccgcaagcgtcttctgaaactggcctggcagaaggctacgttcttaaacccgtctatccgcgcttctttaatgtgggtacgcgcgtggcgattaaatgcaagaactccaaattttcggagaaagccaaactgatttcgccaattaaagcgaaggttgaactgacggagaacgataaacgtctgctcggaatctttagcgaatatgttacctggaatcgcgtcagtaacgtactgtcacatattggctcagtgaccgccaaagattttgggcgtgtttcgggtctgacgatgaaagacatcattcgcgaagcagcacgcgaaggccatgatctgttgttcgctgataacccgtcggcggtgctgaaggagctgacaggcctcatccagaacacgattcgctccaaatggcacgaagttctggag

SEQ ID NO: 2492 - protein, 346 aa, synthetic construct
  REGION 1..346: note = variant of RNA ligase 2 from Klebsiella phage KP179
MHHHHHHGGSNMFAYYSSLENHTNAKFISKIRGAGFLMHTVEWVAREKIHGTNFSVIITPTEIVPAKRTGPILEDESFFGHEIIMKKYTDSFVKVQNMLNAMDLVSVQIFGEFAGGGIQKGVDYGDKDFYVFDILSDSGNEKVYWDDYRVESFCTTVGLKLAPLLGRGSFAELSQYPNDFKSLVNRYNELVDTVGLEMANKHVFGPQASSETGLAEGYVLKPVYPRFFNVGTRVAIKCKNSKFSEKAKLISPIKAKVELTENDKRLLGIFSEYVTWNRVSNVLSHIGSVTAKDFGRVSGLTMKDIIREAAREGHDLLFADNPSAVLKELTGLIQNTIRSKWHEVLE

SEQ ID NO: 2493 - DNA, 1038 bp, synthetic construct
  misc_feature 1..1038: note = variant of RNA ligase 2 from Klebsiella phage KP179
  source 1..1038: mol_type = other DNA
atgcatcaccatcaccatcacggtggcagcaacatgtttgcgtattattcaagtctggaaaaccataccaatgccaagttcattagcaagatccgtggtgcaggcttcctgatgcacaccgtggaatgggtagctcgcgagaagattcatggaacgaactttagcgttatcattactccgaccgaaatcgtgccagccaaacgcacagggccgatcttggaagatgagagcttctttggtcatgaaattatcatgaaaaaatatatggactccttcgtgaaggtgcagaacatgctgaatgcgatggatcttgttagcgtgcaaatctttggcgaatttgcgggtggtggcattcagaaaggcgtcgattacggagacaaagatttctatgtgtttgacatcctgtctgatagcgggaacgagaaagtttactgggatgactatcgcgtcgaatcgttttgcaccactgtgggtctgaaattagcgcctctgctgggacgtggtagtttcgctgaactgtcccagtacccaaacgatttcaaaagcctggtgaaccgttataatgaattggttgacacggtcggcctggagatggccaataaacacgtctttggtccgcaagcgtcttctgaaactggcctggcagaaggctacgttcttaaacccgtctatccgcgcttctttaatgtgggtacgcgcgtggcgattaaatgcaagaactccaaattttcggagaaagccaaactgatttcgccaattaaagcgaaggttgaactgacggagaacgataaacgtctgctcggaatctttagcgaatatgttacctggaatcgcgtcagtaacgtactgtcacatattggctcagtgaccgccaaagattttgggcgtgtttcgggtctgacgattaaagacatcattcgcgaagcagcacgcgaaggccatgatctgttgttcgctgataacccgtcggcggtgctgaaggagctgacaggcctcatccagaacacgattcgctccaaatggcacgaagttctggag

SEQ ID NO: 2494 - protein, 346 aa, synthetic construct
  REGION 1..346: note = variant of RNA ligase 2 from Klebsiella phage KP179
MHHHHHHGGSNMFAYYSSLENHTNAKFISKIRGAGFLMHTVEWVAREKIHGTNFSVIITPTEIVPAKRTGPILEDESFFGHEIIMKKYMDSFVKVQNMLNAMDLVSVQIFGEFAGGGIQKGVDYGDKDFYVFDILSDSGNEKVYWDDYRVESFCTTVGLKLAPLLGRGSFAELSQYPNDFKSLVNRYNELVDTVGLEMANKHVFGPQASSETGLAEGYVLKPVYPRFFNVGTRVAIKCKNSKFSEKAKLISPIKAKVELTENDKRLLGIFSEYVTWNRVSNVLSHIGSVTAKDFGRVSGLTIKDIIREAAREGHDLLFADNPSAVLKELTGLIQNTIRSKWHEVLE

SEQ ID NO: 2495 - DNA, 1038 bp, synthetic construct
  misc_feature 1..1038: note = variant of RNA ligase 2 from Klebsiella phage KP179
  source 1..1038: mol_type = other DNA
atgcatcaccatcaccatcacggtggcagcaacatgtttgcgtattattcaagtctggaaaaccataccaatgccaagttcattagcaagatccgtggtgcaggcttcctgatgcacaccgtggaatgggtagctcgcgagaagattcatggaacgaactttagcgttatcattactccgaccgaaatcgtgccagccaaacgcacagggccgatcttggaagatgagagcttctttggtcatgaaattatcatgaaaaaatatatggactccttcgtgaaggtgcagaacatgctgaatgcgatggatcttgttagcgtgcaaatctttggcgaatttgcgggtggtggcattcagaaaggcgtcgattacggagacaaagatttctatgtgtttgacatcctgtctgatagcgggaacgagaaagtttactgggatgactatcgcgtcgaatcgttttgcaccactgtgggtctgaaattagcgcctctgctgggacgtggtagtttcgctgaactgtcccagtacccaaacgatttcaaaagcctggtgaaccgttataatgaattggttgacacggtcggcctggagatggccaataaacacgtctttggtccgcaagcgtcttctgaaactggcctggcagaaggctacgttcttaaacccgtctatccgcgcttctttaatgtgggtacgcgcgtggcgattaaatgcaagaactccaaattttcggagaaagccaaactgatttcgccaattaaagcgaaggttgaactgacggagaacgataaacgtctgctcggaatcgtgagcgaatatgttacctggaatcgcgtcagtaacgtactgtcacatattggctcagtgaccgccaaagattttgggcgtgtttcgggtctgacgatgaaagacatcattcgcgaagcagcacgcgaaggccatgatctgttgttcgctgataacccgtcggcggtgctgaaggagctgacaggcctcatccagaacacgattcgctccaaatggcacgaagttctggag

SEQ ID NO: 2496 - protein, 346 aa, synthetic construct
  REGION 1..346: note = variant of RNA ligase 2 from Klebsiella phage KP179
MHHHHHHGGSNMFAYYSSLENHTNAKFISKIRGAGFLMHTVEWVAREKIHGTNFSVIITPTEIVPAKRTGPILEDESFFGHEIIMKKYMDSFVKVQNMLNAMDLVSVQIFGEFAGGGIQKGVDYGDKDFYVFDILSDSGNEKVYWDDYRVESFCTTVGLKLAPLLGRGSFAELSQYPNDFKSLVNRYNELVDTVGLEMANKHVFGPQASSETGLAEGYVLKPVYPRFFNVGTRVAIKCKNSKFSEKAKLISPIKAKVELTENDKRLLGIVSEYVTWNRVSNVLSHIGSVTAKDFGRVSGLTMKDIIREAAREGHDLLFADNPSAVLKELTGLIQNTIRSKWHEVLE

SEQ ID NO: 2497 - DNA, 1038 bp, synthetic construct
  misc_feature 1..1038: note = variant of RNA ligase 2 from Klebsiella phage KP179
  source 1..1038: mol_type = other DNA
atgcatcaccatcaccatcacggtggcagcaacatgtttgcgtattattcaagtctggaaaaccataccaatgccaagttcattagcaagatccgtggtgcaggcttcctgatgcacaccgtggaatgggtagctcgcgagaagattcatggaacgaactttagcgttgtgattactccgaccgaaatcgtgccagccaaacgcacagggccgatcttggaagatgagagcttctttggtcatgaaattatcatgaaaaaatatatggactccttcgtgaaggtgcagaacatgctgaatgcgatggatcttgttagcgtgcaaatctttggcgaatttgcgggtggtggcattcagaaaggcgtcgattacggagacaaagatttctatgtgtttgacatcctgtctgatagcgggaacgagaaagtttactgggatgactatcgcgtcgaatcgttttgcaccactgtgggtctgaaattagcgcctctgctgggacgtggtagtttcgctgaactgtcccagtacccaaacgatttcaaaagcctggtgaaccgttataatgaattggttgacacggtcggcctggagatggccaataaacacgtctttggtccgcaagcgtcttctgaaactggcctggcagaaggctacgttcttaaacccgtctatccgcgcttctttaatgtgggtacgcgcgtggcgattaaatgcaagaactccaaattttcggagaaagccaaactgatttcgccaattaaagcgaaggttgaactgacggagaacgataaacgtctgctcggaatctttagcgaatatgttacctggaatcgcgtcagtaacgtactgtcacatattggctcagtgaccgccaaagattttgggcgtgtttcgggtctgacgatgaaagacatcattcgcgaagcagcacgcgaaggccatgatctgttgttcgctgataacccgtcggcggtgctgaaggagctgacaggcctcatccagaacacgattcgctccaaatggcacgaagttctggag

SEQ ID NO: 2498 - protein, 346 aa, synthetic construct
  REGION 1..346: note = variant of RNA ligase 2 from Klebsiella phage KP179
MHHHHHHGGSNMFAYYSSLENHTNAKFISKIRGAGFLMHTVEWVAREKIHGTNFSVVITPTEIVPAKRTGPILEDESFFGHEIIMKKYMDSFVKVQNMLNAMDLVSVQIFGEFAGGGIQKGVDYGDKDFYVFDILSDSGNEKVYWDDYRVESFCTTVGLKLAPLLGRGSFAELSQYPNDFKSLVNRYNELVDTVGLEMANKHVFGPQASSETGLAEGYVLKPVYPRFFNVGTRVAIKCKNSKFSEKAKLISPIKAKVELTENDKRLLGIFSEYVTWNRVSNVLSHIGSVTAKDFGRVSGLTMKDIIREAAREGHDLLFADNPSAVLKELTGLIQNTIRSKWHEVLE

SEQ ID NO: 2499 - DNA, 1038 bp, synthetic construct
  misc_feature 1..1038: note = variant of RNA ligase 2 from Klebsiella phage KP179
  source 1..1038: mol_type = other DNA
atgcatcaccatcaccatcacggtggcagcaacatgtttgcgtattattcaagtctggaaaaccataccaatgccaagttcattagcaagatccgtggtgcaggcttcctgatgcacaccgtggaatgggtagctcgcgagaagattcatggaacgaactttagcgttatcattactccgaccgaaatcgtgccagccaaacgcacagggccgatcttggaagatgagagcttctttggtcatgaaattatcatgaaaaaatatatggactccttcgtgaaggtgcagaacatgctgaatgcgatggatcttgttagcgtgcaaatctttggcgaatttgcgggtggtggcattcagaaaggcgtcgattacggagacaaagatttctatgtgtttgacatcctgtctgatagcgggaacgagaaacattactgggatgactatcgcgtcgaatcgttttgcaccactgtgggtctgaaattagcgcctctgctgggacgtggtagtttcgctgaactgtcccagtacccaaacgatttcaaaagcctggtgaaccgttataatgaattggttgacacggtcggcctggagatggccaataaacacgtctttggtccgcaagcgtcttctgaaactggcctggcagaaggctacgttcttaaacccgtctatccgcgcttctttaatgtgggtacgcgcgtggcgattaaatgcaagaactccaaattttcggagaaagccaaactgatttcgccaattaaagcgaaggttgaactgacggagaacgataaacgtctgctcggaatctttagcgaatatgttacctggaatcgcgtcagtaacgtactgtcacatattggctcagtgaccgccaaagattttgggcgtgtttcgggtctgacgatgaaagacatcattcgcgaagcagcacgcgaaggccatgatctgttgttcgctgataacccgtcggcggtgctgaaggagctgacaggcctcatccagaacacgattcgctccaaatggcacgaagttctggag

SEQ ID NO: 2500 - protein, 346 aa, synthetic construct
  REGION 1..346: note = variant of RNA ligase 2 from Klebsiella phage KP179
MHHHHHHGGSNMFAYYSSLENHTNAKFISKIRGAGFLMHTVEWVAREKIHGTNFSVIITPTEIVPAKRTGPILEDESFFGHEIIMKKYMDSFVKVQNMLNAMDLVSVQIFGEFAGGGIQKGVDYGDKDFYVFDILSDSGNEKHYWDDYRVESFCTTVGLKLAPLLGRGSFAELSQYPNDFKSLVNRYNELVDTVGLEMANKHVFGPQASSETGLAEGYVLKPVYPRFFNVGTRVAIKCKNSKFSEKAKLISPIKAKVELTENDKRLLGIFSEYVTWNRVSNVLSHIGSVTAKDFGRVSGLTMKDIIREAAREGHDLLFADNPSAVLKELTGLIQNTIRSKWHEVLE

SEQ ID NO: 2501 - DNA, 1038 bp, synthetic construct
  misc_feature 1..1038: note = variant of RNA ligase 2 from Klebsiella phage KP179
  source 1..1038: mol_type = other DNA
atgcatcaccatcaccatcacggtggcagcaacatgtttgcgtattattcaagtctggaaaaccataccaatgccaagttcattagcaagatccgtggtgcaggcttcctgatgcacaccgtggaatgggtagctcgcgagaagattcatggaacgaactttagcgttatcattactccgaccgaaatcgtgccagccaaacgcacagggccgatcttggaagatgagagcttctttggtcatgaaattatcatgaaaaaatatatggactccttcgtgaaggtgcagaacatgctgaatgcgatggatcttgttagcgtgcaaatctttggcgaatttgcgggtggtggcattcagaaaggcgtcgattacggagacaaagatttctatgtgtttgacatcctgtctgatagcgggaacgagaaagtttactgggatgactatcgcgtcgaatcgttttgcaccactgtgggtctgaaattagcgcctctgctgggacgtggtagtttcgctgaactgtcccagtacaagaacgatttcaaaagcctggtgaaccgttataatgaattggttgacacggtcggcctggagatggccaataaacacgtctttggtccgcaagcgtcttctgaaactggcctggcagaaggctacgttcttaaacccgtctatccgcgcttctttaatgtgggtacgcgcgtggcgattaaatgcaagaactccaaattttcggagaaagccaaactgatttcgccaattaaagcgaaggttgaactgacggagaacgataaacgtctgctcggaatctttagcgaatatgttacctggaatcgcgtcagtaacgtactgtcacatattggctcagtgaccgccaaagattttgggcgtgtttcgggtctgacgatgaaagacatcattcgcgaagcagcacgcgaaggccatgatctgttgttcgctgataacccgtcggcggtgctgaaggagctgacaggcctcatccagaacacgattcgctccaaatggcacgaagttctggag

SEQ ID NO: 2502 - protein, 346 aa, synthetic construct
  REGION 1..346: note = variant of RNA ligase 2 from Klebsiella phage KP179
MHHHHHHGGSNMFAYYSSLENHTNAKFISKIRGAGFLMHTVEWVAREKIHGTNFSVIITPTEIVPAKRTGPILEDESFFGHEIIMKKYMDSFVKVQNMLNAMDLVSVQIFGEFAGGGIQKGVDYGDKDFYVFDILSDSGNEKVYWDDYRVESFCTTVGLKLAPLLGRGSFAELSQYKNDFKSLVNRYNELVDTVGLEMANKHVFGPQASSETGLAEGYVLKPVYPRFFNVGTRVAIKCKNSKFSEKAKLISPIKAKVELTENDKRLLGIFSEYVTWNRVSNVLSHIGSVTAKDFGRVSGLTMKDIIREAAREGHDLLFADNPSAVLKELTGLIQNTIRSKWHEVLE

SEQ ID NO: 2503 - DNA, 1038 bp, synthetic construct
  misc_feature 1..1038: note = variant of RNA ligase 2 from Klebsiella phage KP179
  source 1..1038: mol_type = other DNA
atgcatcaccatcaccatcacggtggcagcaacatgtttgcgtattattcaagtctggaaaaccataccaatgccaagttcattagcaagatccgtggtgcaggcttcctgatgcacaccgtggaatgggtagctcgcgagaagattcatggaacgaactttagcgttatcattactccgaccgaaatcgtgccagccaaacgcacagggccgatcttggaagatgagagcttctttggtcatgaaattatcatgaaaaaatatatggactccttcgtgaaggtgcagaacatgctgaatgcgatggatcttgttagcgtgcaaatctttggcgaatttgcgggtggtggcattcagaaaggcgtcgattacggagacaaagatttctatgtgtttgacatcctgtctgatagcgggaacgagaaagtttactgggatgactatcgcgtcgaatcgttttgcaccactgtgggtctgaaattagcgcctctgctgggacgtggtagtttcgctgaactgtcccagtacccaaacgatttcaaaagcctggtgaaccgttataatgaattggttgacacggtcggcctggagatggccaataaacacgtctttggtccgcaagcgtcttctgaaactggcctggcagaaggctacgttcttaaacccgtctatccgcgcttctttaatgtgggtacgcgcgtggcgattaaatgcaagaactccaaattttcggagaaagccaaactgatttcgccaattaaagcgaaggttgaactgacggagaacgataaacgtctgctcggaatctttagcgaatatgttacctggaatcgcgtcagtaacgtactgtcacatattggctcagtgaccttgaaagattttgggcgtgtttcgggtctgacgatgaaagacatcattcgcgaagcagcacgcgaaggccatgatctgttgttcgctgataacccgtcggcggtgctgaaggagctgacaggcctcatccagaacacgattcgctccaaatggcacgaagttctggag

SEQ ID NO: 2504 - protein, 346 aa, synthetic construct
  REGION 1..346: note = variant of RNA ligase 2 from Klebsiella phage KP179
MHHHHHHGGSNMFAYYSSLENHTNAKFISKIRGAGFLMHTVEWVAREKIHGTNFSVIITPTEIVPAKRTGPILEDESFFGHEIIMKKYMDSFVKVQNMLNAMDLVSVQIFGEFAGGGIQKGVDYGDKDFYVFDILSDSGNEKVYWDDYRVESFCTTVGLKLAPLLGRGSFAELSQYPNDFKSLVNRYNELVDTVGLEMANKHVFGPQASSETGLAEGYVLKPVYPRFFNVGTRVAIKCKNSKFSEKAKLISPIKAKVELTENDKRLLGIFSEYVTWNRVSNVLSHIGSVTLKDFGRVSGLTMKDIIREAAREGHDLLFADNPSAVLKELTGLIQNTIRSKWHEVLE

SEQ ID NO: 2505 - DNA, 1038 bp, synthetic construct
  misc_feature 1..1038: note = variant of RNA ligase 2 from Klebsiella phage KP179
  source 1..1038: mol_type = other DNA
atgcatcaccatcaccatcacggtggcagcaacatgtttgcgtattattcaagtctggaaaaccataccaatgccaagttcattagcaagatccgtggtgcaggcttcctgatgcacaccgtggaatgggtagctcgcgagaagattcatggaacgaactttagcgttatcattactccgaccgaaatcgtgccagccaaacgcacagggccgatcttggaagatgagagcttctttggtcatgaaattatcatgaaaaaatatatggactccttcgtgaaggtgcagaacatgctgaatgcgatggatcttgttagcgtgcaaatctttggcgaatttgcgggtggtggcattcagaaaggcgtcgattacggagacaaagatttctatgtgtttgacatcctgtctgatagcgggaacgagaaagtttactgggatgactatcgcgtcgaatcgttttgcaccactgtgggtctgaaattagcgcctctgctgggacgtggtagtttcgctgaactgtcccagtacccaaacgatttcaaaagcctggtgaaccgttataatgaattggttgacacggtcggcctggagatggccaataaacacgtctttggtccgcaagcgtcttctgaaactggccaggcagaaggctacgttcttaaacccgtctatccgcgcttctttaatgtgggtacgcgcgtggcgattaaatgcaagaactccaaattttcggagaaagccaaactgatttcgccaattaaagcgaaggttgaactgacggagaacgataaacgtctgctcggaatctttagcgaatatgttacctggaatcgcgtcagtaacgtactgtcacatattggctcagtgaccgccaaagattttgggcgtgtttcgggtctgacgatgaaagacatcattcgcgaagcagcacgcgaaggccatgatctgttgttcgctgataacccgtcggcggtgctgaaggagctgacaggcctcatccagaacacgattcgctccaaatggcacgaagttctggag

SEQ ID NO: 2506 - protein, 346 aa, synthetic construct
  REGION 1..346: note = variant of RNA ligase 2 from Klebsiella phage KP179
MHHHHHHGGSNMFAYYSSLENHTNAKFISKIRGAGFLMHTVEWVAREKIHGTNFSVIITPTEIVPAKRTGPILEDESFFGHEIIMKKYMDSFVKVQNMLNAMDLVSVQIFGEFAGGGIQKGVDYGDKDFYVFDILSDSGNEKVYWDDYRVESFCTTVGLKLAPLLGRGSFAELSQYPNDFKSLVNRYNELVDTVGLEMANKHVFGPQASSETGQAEGYVLKPVYPRFFNVGTRVAIKCKNSKFSEKAKLISPIKAKVELTENDKRLLGIFSEYVTWNRVSNVLSHIGSVTAKDFGRVSGLTMKDIIREAAREGHDLLFADNPSAVLKELTGLIQNTIRSKWHEVLE

SEQ ID NO: 2507 - DNA, 1038 bp, synthetic construct
  misc_feature 1..1038: note = variant of RNA ligase 2 from Klebsiella phage KP179
  source 1..1038: mol_type = other DNA
atgcatcaccatcaccatcacggtggcagcaacatgtttgcgtattattcaagtctggaaaaccataccaatgccaagttcattagcaagatccgtggtgcaggcttcctgatgcacaccgtggaatgggtagctcgcgagaagattcatggaacgaactttagcgttatcattactccgaccgaaatcgtgccagccaaacgcacagggccgatcttggaagatgagagcttctttggtcatgaaattatcatgaaaaaatatatggactccttcgtgaaggtgcagaacatgctgaatgcgatggatcttgttagcgtgcaaatctttggcgaatttgcgggtggtggcattcagaaaggcgtcgattacggagacaaagatttctatgtgtttgacatcctgtctgatagcgggaacgagaaagtttactgggatgactatcgcgtcgaatcgttttgcaccactgtgggtctgaaattagcgcctctgctgggacgtggtagtttcgctgaactgtcccagtacccaaacgatttcaaaagcctggtgaaccgttataatgaattggttgacacggtcggcctggagatggccaataaacacgtctttggtccgcaagcgtcttctgaaactggcctggcagaaggctacgttcttaaacccgtctatccgcgcttctttaatgtgggtacgcgcgtggcgattaaatgcaagaactccaaattttcggagaaagccaaactgatttcgccaattaaagcgaaggttgaactgacggagaacgataaacgtctgctcggaatctttagcgaatatgttacctggaatcgcgtcagtaacgtactgtcacatattggctcagtgaccgccaaagattttgggcgtgtttcgggtctgattatgaaagacatcattcgcgaagcagcacgcgaaggccatgatctgttgttcgctgataacccgtcggcggtgctgaaggagctgacaggcctcatccagaacacgattcgctccaaatggcacgaagttctggag

SEQ ID NO: 2508 - protein, 346 aa, synthetic construct
  REGION 1..346: note = variant of RNA ligase 2 from Klebsiella phage KP179
MHHHHHHGGSNMFAYYSSLENHTNAKFISKIRGAGFLMHTVEWVAREKIHGTNFSVIITPTEIVPAKRTGPILEDESFFGHEIIMKKYMDSFVKVQNMLNAMDLVSVQIFGEFAGGGIQKGVDYGDKDFYVFDILSDSGNEKVYWDDYRVESFCTTVGLKLAPLLGRGSFAELSQYPNDFKSLVNRYNELVDTVGLEMANKHVFGPQASSETGLAEGYVLKPVYPRFFNVGTRVAIKCKNSKFSEKAKLISPIKAKVELTENDKRLLGIFSEYVTWNRVSNVLSHIGSVTAKDFGRVSGLIMKDIIREAAREGHDLLFADNPSAVLKELTGLIQNTIRSKWHEVLE

SEQ ID NO: 2509 - DNA, 1038 bp, synthetic construct
  misc_feature 1..1038: note = variant of RNA ligase 2 from Klebsiella phage KP179
  source 1..1038: mol_type = other DNA
atgcatcaccatcaccatcacggtggcagcaacatgtttgcgtattattcaagtctggaaaaccataccaatgccaagttcattagcaagatccgtggtgcaggcttcctgatgcacaccgtggaatgggtagctcgcgagaagattcatggaacgaactttagcgttatcattactccgaccgaaatcgtgccagccaaacgcacagggccgatcttggaagatgagagcttctttggtcatgaaattatcatgaaaaaatatatggactccttcgtgaaggtgcagaacatgctgaatgcgatggatcttgttagcgtgcaaatctttggcgaatttgcgggtggtggcattcagaaaggcgtcgattacggagacaaagatttctatgtgtttgacatcctgtctgatagcgggaacgagaaagtttactgggatgactatcgcgtcgaatcgttttgcaccactgtgggtctgaaattagcgcctctgctgggacgtggtagtttcgctgaactgtcccagtacccaaacgatttcaaaagcctggtgaaccgttataatgaattggttgacacggtcggcctggagatggccaataaacacgtctttggtccgcaagcgtcttctgaaactggcctggcagaaggctacgttcttaaacccgtctatccgcgcttctttaatgtgggtacgcgcgtggcgattaaatgcaagaactccaaattttcggagaaagccaaactgatttcgccaattaaagcgaaggttgaactgacggagaacgataaacgtctgctcggaatctttgaggaatatgttacctggaatcgcgtcagtaacgtactgtcacatattggctcagtgaccgccaaagattttgggcgtgtttcgggtctgacgatgaaagacatcattcgcgaagcagcacgcgaaggccatgatctgttgttcgctgataacccgtcggcggtgctgaaggagctgacaggcctcatccagaacacgattcgctccaaatggcacgaagttctggag

SEQ ID NO: 2510 - protein, 346 aa, synthetic construct
  REGION 1..346: note = variant of RNA ligase 2 from Klebsiella phage KP179
MHHHHHHGGSNMFAYYSSLENHTNAKFISKIRGAGFLMHTVEWVAREKIHGTNFSVIITPTEIVPAKRTGPILEDESFFGHEIIMKKYMDSFVKVQNMLNAMDLVSVQIFGEFAGGGIQKGVDYGDKDFYVFDILSDSGNEKVYWDDYRVESFCTTVGLKLAPLLGRGSFAELSQYPNDFKSLVNRYNELVDTVGLEMANKHVFGPQASSETGLAEGYVLKPVYPRFFNVGTRVAIKCKNSKFSEKAKLISPIKAKVELTENDKRLLGIFEEYVTWNRVSNVLSHIGSVTAKDFGRVSGLTMKDIIREAAREGHDLLFADNPSAVLKELTGLIQNTIRSKWHEVLE

SEQ ID NO: 2511 - DNA, 1038 bp, synthetic construct
  misc_feature 1..1038: note = variant of RNA ligase 2 from Klebsiella phage KP179
  source 1..1038: mol_type = other DNA
atgcatcaccatcaccatcacggtggcagcaacatgtttgcgtattattcaagtctggaaaaccataccaatgccaagttcattagcaagatccgtggtgcaggcttcctgatgcacaccgtggaatgggtagctcgcgagaagattcatggaacgaactttagcgttatcattactccgaccgaaatcgtgccagccaaacgcacagggccgatcttggaagatgagagcttctttggtcatgaaattatcatgaaaaaatatatggactccttcgtgaaggtgcagaacatgctgaatgcgatggatcttgttagcgtgcaattgtttggcgaatttgcgggtggtggcattcagaaaggcgtcgattacggagacaaagatttctatgtgtttgacatcctgtctgatagcgggaacgagaaagtttactgggatgactatcgcgtcgaatcgttttgcaccactgtgggtctgaaattagcgcctctgctgggacgtggtagtttcgctgaactgtcccagtacccaaacgatttcaaaagcctggtgaaccgttataatgaattggttgacacggtcggcctggagatggccaataaacacgtctttggtccgcaagcgtcttctgaaactggcctggcagaaggctacgttcttaaacccgtctatccgcgcttctttaatgtgggtacgcgcgtggcgattaaatgcaagaactccaaattttcggagaaagccaaactgatttcgccaattaaagcgaaggttgaactgacggagaacgataaacgtctgctcggaatctttagcgaatatgttacctggaatcgcgtcagtaacgtactgtcacatattggctcagtgaccgccaaagattttgggcgtgtttcgggtctgacgatgaaagacatcattcgcgaagcagcacgcgaaggccatgatctgttgttcgctgataacccgtcggcggtgctgaaggagctgacaggcctcatccagaacacgattcgctccaaatggcacgaagttctggag

SEQ ID NO: 2512 - protein, 346 aa, synthetic construct
  REGION 1..346: note = variant of RNA ligase 2 from Klebsiella phage KP179
MHHHHHHGGSNMFAYYSSLENHTNAKFISKIRGAGFLMHTVEWVAREKIHGTNFSVIITPTEIVPAKRTGPILEDESFFGHEIIMKKYMDSFVKVQNMLNAMDLVSVQLFGEFAGGGIQKGVDYGDKDFYVFDILSDSGNEKVYWDDYRVESFCTTVGLKLAPLLGRGSFAELSQYPNDFKSLVNRYNELVDTVGLEMANKHVFGPQASSETGLAEGYVLKPVYPRFFNVGTRVAIKCKNSKFSEKAKLISPIKAKVELTENDKRLLGIFSEYVTWNRVSNVLSHIGSVTAKDFGRVSGLTMKDIIREAAREGHDLLFADNPSAVLKELTGLIQNTIRSKWHEVLE

SEQ ID NO: 2513 - DNA, 1038 bp, synthetic construct
  misc_feature 1..1038: note = variant of RNA ligase 2 from Klebsiella phage KP179
  source 1..1038: mol_type = other DNA
atgcatcaccatcaccatcacggtggcagcaacatgtttgcgtattattcaagtctggaaaaccataccaatgccaagttcattagcaagatccgtggtgcaggcttcctgatgcacaccgtggaatgggtagctcgcgagaagattcatggaacgaactttagcgttatcattactccgaccgaaatcgtgccagccaaacgcacagggccgatcttggaagatgagagcttctttggtcatgaaattatcatgaaaaaatatatggactccttcgtgaaggtgcagaacatgctgaatgcgatggatcttgttagcgtgcaaatctttggcgaatttgcgggtggtggcattcagaaaggcgtcgattacggagacaaagatttctatgtgtttgacatcctgtctgatagcgggaacgagaaagtttactgggatgactatcgcgtcgaatcgttttgcaccactgtgggtctgaaattagcgcctctgctgggacgtggtagtttcgctgaactgtcccagtacccaaacgatttcaaaagcctggtgaaccgttataatgaattgtgtgacacggtcggcctggagatggccaataaacacgtctttggtccgcaagcgtcttctgaaactggcctggcagaaggctacgttcttaaacccgtctatccgcgcttctttaatgtgggtacgcgcgtggcgattaaatgcaagaactccaaattttcggagaaagccaaactgatttcgccaattaaagcgaaggttgaactgacggagaacgataaacgtctgctcggaatctttagcgaatatgttacctggaatcgcgtcagtaacgtactgtcacatattggctcagtgaccgccaaagattttgggcgtgtttcgggtctgacgatgaaagacatcattcgcgaagcagcacgcgaaggccatgatctgttgttcgctgataacccgtcggcggtgctgaaggagctgacaggcctcatccagaacacgattcgctccaaatggcacgaagttctggag

SEQ ID NO: 2514 - protein, 346 aa, synthetic construct
  REGION 1..346: note = variant of RNA ligase 2 from Klebsiella phage KP179
MHHHHHHGGSNMFAYYSSLENHTNAKFISKIRGAGFLMHTVEWVAREKIHGTNFSVIITPTEIVPAKRTGPILEDESFFGHEIIMKKYMDSFVKVQNMLNAMDLVSVQIFGEFAGGGIQKGVDYGDKDFYVFDILSDSGNEKVYWDDYRVESFCTTVGLKLAPLLGRGSFAELSQYPNDFKSLVNRYNELCDTVGLEMANKHVFGPQASSETGLAEGYVLKPVYPRFFNVGTRVAIKCKNSKFSEKAKLISPIKAKVELTENDKRLLGIFSEYVTWNRVSNVLSHIGSVTAKDFGRVSGLTMKDIIREAAREGHDLLFADNPSAVLKELTGLIQNTIRSKWHEVLE

SEQ ID NO: 2515 - DNA, 1038 bp, synthetic construct
  misc_feature 1..1038: note = variant of RNA ligase 2 from Klebsiella phage KP179
  source 1..1038: mol_type = other DNA
atgcatcaccatcaccatcacggtggcagcaacatgtttgcgtattattcaagtctggaaaaccataccaatgccaagttcattagcaagatccgtggtgcaggcttcctgatgcacaccgtggaatgggtagctcgcgagaagattcatggaacgaactttagcgttatcattactccgaccgaaatcgtgccagccaaacgcacagggccgatcttggaagatgagagcttctttggtcatgaaattatcatgaaaaaatatatggactccttcgtgaaggtgcagaacatgctgaatgcgatggatcttgttagcgtgcaaatctttggcgaatttgcgggtggtggcattcagaaaggcgtcgattacggagacaaagatttctatgtgtttgacatcctgtctgatagcgggaacgagaaagtttactgggatgactatcgcgtcgaatcgttttgcaccactgtgggtctgaaattagcgcctctgctgggacgtggtagtttcgctgaactgtcccagtacccaaacgatttcaaaagcctggtgaaccgttataatgaattggttgacacggtcggcctggagatggccaataaacacgtctttggtccgcaagcgtcttctgaaactacgctggcagaaggctacgttcttaaacccgtctatccgcgcttctttaatgtgggtacgcgcgtggcgattaaatgcaagaactccaaattttcggagaaagccaaactgatttcgccaattaaagcgaaggttgaactgacggagaacgataaacgtctgctcggaatctttagcgaatatgttacctggaatcgcgtcagtaacgtactgtcacatattggctcagtgaccgccaaagattttgggcgtgtttcgggtctgacgatgaaagacatcattcgcgaagcagcacgcgaaggccatgatctgttgttcgctgataacccgtcggcggtgctgaaggagctgacaggcctcatccagaacacgattcgctccaaatggcacgaagttctggag

SEQ ID NO: 2516 - protein, 346 aa, synthetic construct
  REGION 1..346: note = variant of RNA ligase 2 from Klebsiella phage KP179
MHHHHHHGGSNMFAYYSSLENHTNAKFISKIRGAGFLMHTVEWVAREKIHGTNFSVIITPTEIVPAKRTGPILEDESFFGHEIIMKKYMDSFVKVQNMLNAMDLVSVQIFGEFAGGGIQKGVDYGDKDFYVFDILSDSGNEKVYWDDYRVESFCTTVGLKLAPLLGRGSFAELSQYPNDFKSLVNRYNELVDTVGLEMANKHVFGPQASSETTLAEGYVLKPVYPRFFNVGTRVAIKCKNSKFSEKAKLISPIKAKVELTENDKRLLGIFSEYVTWNRVSNVLSHIGSVTAKDFGRVSGLTMKDIIREAAREGHDLLFADNPSAVLKELTGLIQNTIRSKWHEVLE

SEQ ID NO: 2517 - DNA, 1038 bp, synthetic construct
  misc_feature 1..1038: note = variant of RNA ligase 2 from Klebsiella phage KP179
  source 1..1038: mol_type = other DNA
atgcatcaccatcaccatcacggtggcagcaacatgtttgcgtattattcaagtctggaaaaccataccaatgccaagttcattagcaagatccgtggtgcaggcttcctgatgcacaccgtggaatgggtagctcgcgagaagattcatggaacgaactttagcgttatcattactccgaccgaaatcgtgccagccaaacgcacagggccgatcttggaagatgagagcttctttggtcatgaaattatcatgaaaaaatatatggactccttcgtgaaggtgcagaacatgctgaatgcgatggatcttgttagctcgcaaatctttggcgaatttgcgggtggtggcattcagaaaggcgtcgattacggagacaaagatttctatgtgtttgacatcctgtctgatagcgggaacgagaaagtttactgggatgactatcgcgtcgaatcgttttgcaccactgtgggtctgaaattagcgcctctgctgggacgtggtagtttcgctgaactgtcccagtacccaaacgatttcaaaagcctggtgaaccgttataatgaattggttgacacggtcggcctggagatggccaataaacacgtctttggtccgcaagcgtcttctgaaactggcctggcagaaggctacgttcttaaacccgtctatccgcgcttctttaatgtgggtacgcgcgtggcgattaaatgcaagaactccaaattttcggagaaagccaaactgatttcgccaattaaagcgaaggttgaactgacggagaacgataaacgtctgctcggaatctttagcgaatatgttacctggaatcgcgtcagtaacgtactgtcacatattggctcagtgaccgccaaagattttgggcgtgtttcgggtctgacgatgaaagacatcattcgcgaagcagcacgcgaaggccatgatctgttgttcgctgataacccgtcggcggtgctgaaggagctgacaggcctcatccagaacacgattcgctccaaatggcacgaagttctggag

SEQ ID NO: 2518 - protein, 346 aa, synthetic construct
  REGION 1..346: note = variant of RNA ligase 2 from Klebsiella phage KP179
MHHHHHHGGSNMFAYYSSLENHTNAKFISKIRGAGFLMHTVEWVAREKIHGTNFSVIITPTEIVPAKRTGPILEDESFFGHEIIMKKYMDSFVKVQNMLNAMDLVSSQIFGEFAGGGIQKGVDYGDKDFYVFDILSDSGNEKVYWDDYRVESFCTTVGLKLAPLLGRGSFAELSQYPNDFKSLVNRYNELVDTVGLEMANKHVFGPQASSETGLAEGYVLKPVYPRFFNVGTRVAIKCKNSKFSEKAKLISPIKAKVELTENDKRLLGIFSEYVTWNRVSNVLSHIGSVTAKDFGRVSGLTMKDIIREAAREGHDLLFADNPSAVLKELTGLIQNTIRSKWHEVLE

SEQ ID NO: 2519 - DNA, 1038 bp, synthetic construct
  misc_feature 1..1038: note = variant of RNA ligase 2 from Klebsiella phage KP179
  source 1..1038: mol_type = other DNA
atgcatcaccatcaccatcacggtggcagcaacatgtttgcgtattattcaagtctggaaaaccataccaatgccaagttcattagcaagatccgtggtgcaggcttcctgatgcacaccgtggaatgggtagctcgcgagaagattcatggaacgaactttagcgttatcattactccgaccgaaatcgtgccagccaaacgcacagggccgatcttggaagatgagagcttctttggtcatgaaattatcatgaaaaaatatatggactccttcgtgaaggtgcagaacatgctgaatgcgatggatcttgtttgggtgcaaatctttggcgaatttgcgggtggtggcattcagaaaggcgtcgattacggagacaaagatttctatgtgtttgacatcctgtctgatagcgggaacgagaaagtttactgggatgactatcgcgtcgaatcgttttgcaccactgtgggtctgaaattagcgcctctgctgggacgtggtagtttcgctgaactgtcccagtacccaaacgatttcaaaagcctggtgaaccgttataatgaattggttgacacggtcggcctggagatggccaataaacacgtctttggtccgcaagcgtcttctgaaactggcctggcagaaggctacgttcttaaacccgtctatccgcgcttctttaatgtgggtacgcgcgtggcgattaaatgcaagaactccaaattttcggagaaagccaaactgatttcgccaattaaagcgaaggttgaactgacggagaacgataaacgtctgctcggaatctttagcgaatatgttacctggaatcgcgtcagtaacgtactgtcacatattggctcagtgaccgccaaagattttgggcgtgtttcgggtctgacgatgaaagacatcattcgcgaagcagcacgcgaaggccatgatctgttgttcgctgataacccgtcggcggtgctgaaggagctgacaggcctcatccagaacacgattcgctccaaatggcacgaagttctggag

SEQ ID NO: 2520 - protein, 346 aa, synthetic construct
  REGION 1..346: note = variant of RNA ligase 2 from Klebsiella phage KP179
MHHHHHHGGSNMFAYYSSLENHTNAKFISKIRGAGFLMHTVEWVAREKIHGTNFSVIITPTEIVPAKRTGPILEDESFFGHEIIMKKYMDSFVKVQNMLNAMDLVWVQIFGEFAGGGIQKGVDYGDKDFYVFDILSDSGNEKVYWDDYRVESFCTTVGLKLAPLLGRGSFAELSQYPNDFKSLVNRYNELVDTVGLEMANKHVFGPQASSETGLAEGYVLKPVYPRFFNVGTRVAIKCKNSKFSEKAKLISPIKAKVELTENDKRLLGIFSEYVTWNRVSNVLSHIGSVTAKDFGRVSGLTMKDIIREAAREGHDLLFADNPSAVLKELTGLIQNTIRSKWHEVLE

SEQ ID NO: 2521 - DNA, 1038 bp, synthetic construct
  misc_feature 1..1038: note = variant of RNA ligase 2 from Klebsiella phage KP179
  source 1..1038: mol_type = other DNA
atgcatcaccatcaccatcacggtggcagcaacatgtttgcgtattattcaagtctggaaaaccataccaatgccaagttcattagcaagatccgtggtgcaggcttcctgatgcacaccgtggaatgggtagctcgcgagaagattcatggaacgaactttagcgttatcattactccgaccgaaatcgtgccagccaaacgcacagggccgatcttggaagatgagagcttctttggtcatgaaattatcatgaaaaaatatatggactccttcgtgaaggtgcagaacatgctgaatgcgatggatcttgttagcgtgcaaatctttggcgaatttgcgggtggtggcattcagaaaggcgtcgattacggagacaaagatttctatgtgtttgacatcctgtctgatagcgggaacgagaaagtttactgggatgactatcgcgtcgaatcgttttgcaccactgtgggtctgaaattagcgcctctgctgggacgtggtagtttcgctgaactgtcccagtacccaaacgatttcaaaagcctggtggggcgttataatgaattggttgacacggtcggcctggagatggccaataaacacgtctttggtccgcaagcgtcttctgaaactggcctggcagaaggctacgttcttaaacccgtctatccgcgcttctttaatgtgggtacgcgcgtggcgattaaatgcaagaactccaaattttcggagaaagccaaactgatttcgccaattaaagcgaaggttgaactgacggagaacgataaacgtctgctcggaatctttagcgaatatgttacctggaatcgcgtcagtaacgtactgtcacatattggctcagtgaccgccaaagattttgggcgtgtttcgggtctgacgatgaaagacatcattcgcgaagcagcacgcgaaggccatgatctgttgttcgctgataacccgtcggcggtgctgaaggagctgacaggcctcatccagaacacgattcgctccaaatggcacgaagttctggag

SEQ ID NO: 2522 - protein, 346 aa, synthetic construct
  REGION 1..346: note = variant of RNA ligase 2 from Klebsiella phage KP179
MHHHHHHGGSNMFAYYSSLENHTNAKFISKIRGAGFLMHTVEWVAREKIHGTNFSVIITPTEIVPAKRTGPILEDESFFGHEIIMKKYMDSFVKVQNMLNAMDLVSVQIFGEFAGGGIQKGVDYGDKDFYVFDILSDSGNEKVYWDDYRVESFCTTVGLKLAPLLGRGSFAELSQYPNDFKSLVGRYNELVDTVGLEMANKHVFGPQASSETGLAEGYVLKPVYPRFFNVGTRVAIKCKNSKFSEKAKLISPIKAKVELTENDKRLLGIFSEYVTWNRVSNVLSHIGSVTAKDFGRVSGLTMKDIIREAAREGHDLLFADNPSAVLKELTGLIQNTIRSKWHEVLE

SEQ ID NO: 2523 - DNA, 1038 bp, synthetic construct
  misc_feature 1..1038: note = variant of RNA ligase 2 from Klebsiella phage KP179
  source 1..1038: mol_type = other DNA
atgcatcaccatcaccatcacggtggcagcaacatgtttgcgtattattcaagtctggaaaaccataccaatgccaagttcattagcaagatccgtggtgcaggcttcctgatgcacaccgtggaatgggtagctcgcgagaagattcatggaacgaactttagcgttatcattactccgaccgaaatcgtgccagccaaacgcacagggccgatcttggaagatgagagcttctttggtcatgaaattatcatgaaaaaatatatggactccttcgtgaaggtgcagaacatgctgaatgcgatggatcttgttagcgtgcaaatctttggcgaatttgcgggtggtggcattcagaaaggcgtcgattacggagacaaagatttctatgtgtttgacatcctgtctgatagcgggaacgagaaagtttactgggatgactatcgcgtcgaatcgttttgcaccactgtgggtctgaaattagcgcctctgctgggacgtggtagtttcgctgaactgtcccagtacccaaacgatttcaaaagcctggtgaaccgttataatgaattggttgacacggtcggcctggagatggccaataaacacgtctttggtccgcaagcgtcttctgaaactggcctggcagaaggctacgttcttaaacccgtctatccgcgcttctttaatgtgggtacgcgcgtggcgattaaatgcaagaactccaaattttcggagaaagccaaactgatttcgccaattaaagcgaaggttgaactgacggagaacgataaacgtctgctcggaatctttagcgaatatgttacctggaatcgcgtcagtaacgtactgtcacatattggctcagtgaccgccaaagattttgggcgtgtttcgggtctgacgatgaaagacatcattcgcgaagcaaggcgcgaaggccatgatctgttgttcgctgataacccgtcggcggtgctgaaggagctgacaggcctcatccagaacacgattcgctccaaatggcacgaagttctggag

SEQ ID NO: 2524 - protein, 346 aa, synthetic construct
  REGION 1..346: note = variant of RNA ligase 2 from Klebsiella phage KP179
MHHHHHHGGSNMFAYYSSLENHTNAKFISKIRGAGFLMHTVEWVAREKIHGTNFSVIITPTEIVPAKRTGPILEDESFFGHEIIMKKYMDSFVKVQNMLNAMDLVSVQIFGEFAGGGIQKGVDYGDKDFYVFDILSDSGNEKVYWDDYRVESFCTTVGLKLAPLLGRGSFAELSQYPNDFKSLVNRYNELVDTVGLEMANKHVFGPQASSETGLAEGYVLKPVYPRFFNVGTRVAIKCKNSKFSEKAKLISPIKAKVELTENDKRLLGIFSEYVTWNRVSNVLSHIGSVTAKDFGRVSGLTMKDIIREARREGHDLLFADNPSAVLKELTGLIQNTIRSKWHEVLE

SEQ ID NO: 2525 - DNA, 1038 bp, synthetic construct
  misc_feature 1..1038: note = variant of RNA ligase 2 from Klebsiella phage KP179
  source 1..1038: mol_type = other DNA
atgcatcaccatcaccatcacggtggcagcaacatgtttgcgtattattcaagtctggaaaaccataccaatgccaagttcattagcaagatccgtggtgcaggcttcctgatgcacaccgtggaatgggtagctcgcgagaagattcatggaacgaactttagcgttatcattactccgaccgaaatcgtgccagccaaacgcacagggccgatcttggaagatgagagcttctttggtcatgaaattatcatgaaaaaatatatggactccttcgtgaaggtgcagaacatgctgaatgcgatggatcttgttagcgtgcaaatctttggcgaatttgcgggtggtggcattcagaaaggcgtcgattacggagacaaagatttctatgtgtttgacatcctgtctgatagcgggaacgagaaagtttactgggatgactatcgcgtcgaatcgttttgcaccactgtgggtctgaaattagcgcctctgctgggacgtggtagtttcgctgaactgtcccagtacccaaacgatttcaaaagcctggtgaaccgttataatgaattggttgacacggtcggcctggagatggccaataaacacgtctttggtccgcaagcgtcttctgaaactggcctggcagaaggctacgttcttaaacccgtctatccgcgcttctttaatgtgggtacgcgcgtggcgattaaatgcaagaactccaaattttcggagaaagccaaactgatttcgccaattaaagcgaaggttgaactgacggagaacgataaacgtctgctcggaatctttagcgaatatgttacctggaatcgcgtcagtaacgtactgtcacatattggctcaattaccgccaaagattttgggcgtgtttcgggtctgacgatgaaagacatcattcgcgaagcagcacgcgaaggccatgatctgttgttcgctgataacccgtcggcggtgctgaaggagctgacaggcctcatccagaacacgattcgctccaaatggcacgaagttctggag

SEQ ID NO: 2526 - protein, 346 aa, synthetic construct
  REGION 1..346: note = variant of RNA ligase 2 from Klebsiella phage KP179
MHHHHHHGGSNMFAYYSSLENHTNAKFISKIRGAGFLMHTVEWVAREKIHGTNFSVIITPTEIVPAKRTGPILEDESFFGHEIIMKKYMDSFVKVQNMLNAMDLVSVQIFGEFAGGGIQKGVDYGDKDFYVFDILSDSGNEKVYWDDYRVESFCTTVGLKLAPLLGRGSFAELSQYPNDFKSLVNRYNELVDTVGLEMANKHVFGPQASSETGLAEGYVLKPVYPRFFNVGTRVAIKCKNSKFSEKAKLISPIKAKVELTENDKRLLGIFSEYVTWNRVSNVLSHIGSITAKDFGRVSGLTMKDIIREAAREGHDLLFADNPSAVLKELTGLIQNTIRSKWHEVLE

SEQ ID NO: 2527 - DNA, 1038 bp, synthetic construct
  misc_feature 1..1038: note = variant of RNA ligase 2 from Klebsiella phage KP179
  source 1..1038: mol_type = other DNA
atgcatcaccatcaccatcacggtggcagcaacatgtttgcgtattattcaagtctggaaaaccataccaatgccaagttcattagcaagatccgtggtgcaggcttcctgatgcacaccgtggaatgggtagctcgcgagaagattcatggaacgaactttagcgttatcattactccgaccgaaatcgtgccagccaaacgcacagggccgatcttggaagatgagagcttctttggtcatgaaattatcatgaaaaaatatatggactccttcgtgaaggtgcagaacatgctgaatgcgatggatcttgttagcgtgcaaatctttggcgaatttgcgggtggtggcattcagaaaggcgtcgattacggagacaaagatttctatgtgtttgacatcctgtctgatagcgggaacgagaaagtttactgggatgactatcgcgtcgaatcgttttgcaccactgtgggtctgaaattagcgcctctgctgggacgtggtagtttcgctgaactgtcccagtacccaaacgatttcaaaagcctggtgaaccgttataatgaattggttgacacggtcggcctggagatggccaataaacacgtctttggtccgcaagcgtcttctgaaactggcctggcagaaggctacgttcttaaacccgtctatccgcgcttctttaatgtgggtacgcgcgtggcgattaaatgcaagaactccaaattttcggagaaagccaaactgatttcgccaattaaagcgaaggttgaactgacggagaacgataaacgtctgctcggaatctttagcgaatatgttacctggaatcgcgtcagtaacatgctgtcacatattggctcagtgaccgccaaagattttgggcgtgtttcgggtctgacgatgaaagacatcattcgcgaagcagcacgcgaaggccatgatctgttgttcgctgataacccgtcggcggtgctgaaggagctgacaggcctcatccagaacacgattcgctccaaatggcacgaagttctggag

SEQ ID NO: 2528 - protein, 346 aa, synthetic construct
  REGION 1..346: note = variant of RNA ligase 2 from Klebsiella phage KP179
MHHHHHHGGSNMFAYYSSLENHTNAKFISKIRGAGFLMHTVEWVAREKIHGTNFSVIITPTEIVPAKRTGPILEDESFFGHEIIMKKYMDSFVKVQNMLNAMDLVSVQIFGEFAGGGIQKGVDYGDKDFYVFDILSDSGNEKVYWDDYRVESFCTTVGLKLAPLLGRGSFAELSQYPNDFKSLVNRYNELVDTVGLEMANKHVFGPQASSETGLAEGYVLKPVYPRFFNVGTRVAIKCKNSKFSEKAKLISPIKAKVELTENDKRLLGIFSEYVTWNRVSNMLSHIGSVTAKDFGRVSGLTMKDIIREAAREGHDLLFADNPSAVLKELTGLIQNTIRSKWHEVLE

SEQ ID NO: 2529 - DNA, 1038 bp, synthetic construct
  misc_feature 1..1038: note = variant of RNA ligase 2 from Klebsiella phage KP179
  source 1..1038: mol_type = other DNA
atgcatcaccatcaccatcacggtggcagcaacatgtttgcgtattattcaagtctggaaaaccataccaatgccaagttcattagcaagatccgtggtgcaggcttcctgatgcacaccgtggaatgggtagctcgcgagaagattcatggaacgaactttagcgttatcattactccgaccgaaatcgtgccagccaaacgcacagggccgatcttggaagatgagagcttctttggtcatgaaattatcatgaaaaaatatatggactccttcgtgaaggtgcagaacatgctgaatgcgatggatcttgttagcgtgcaaatctttggcgaatttgcgggtggtggcattcagaaaggcgtcgattacggagacaaagatttctatgtgtttgacatcctgtctgatagcgggaacgagaaagtttactgggatgactatcgcgtcgaatcgttttgcaccactgtgggtctgaaattagcgcctctgctgggacgtggtagtttcgctgaactgtcccagtacccaaacgatttcaaaagcctggtgaaccgttataatgaattggttgacacggtcggcctggagatggccaataaacacgtctttggtccgcaagcgtcttctgaaactggcctggcagaaggctacgttcttaaacccgtctatccgcgcttctttaatgtgggtacgcgcgtggcgattaaatgcaagaactccaaattttcggagaaagccaaactgatttcgccaattaaagcgaaggttgaactgacggagaacgataaacgtctgctcggaatctttagcgaatatgttacctggaatcgcgtcagtaacgtactgtcacatattggctcagtgaccgccaaagattttgggcgtgtttcgggtctgacgatgaaagacatcattcgcgaagcagcacgcgaaggccatgatctgttgttcgctgataacccgtcggcggtgctgaaggagctgacaggcctcatccagaacctgattcgctccaaatggcacgaagttctggag

SEQ ID NO: 2530 - protein, 346 aa, synthetic construct
  REGION 1..346: note = variant of RNA ligase 2 from Klebsiella phage KP179
MHHHHHHGGSNMFAYYSSLENHTNAKFISKIRGAGFLMHTVEWVAREKIHGTNFSVIITPTEIVPAKRTGPILEDESFFGHEIIMKKYMDSFVKVQNMLNAMDLVSVQIFGEFAGGGIQKGVDYGDKDFYVFDILSDSGNEKVYWDDYRVESFCTTVGLKLAPLLGRGSFAELSQYPNDFKSLVNRYNELVDTVGLEMANKHVFGPQASSETGLAEGYVLKPVYPRFFNVGTRVAIKCKNSKFSEKAKLISPIKAKVELTENDKRLLGIFSEYVTWNRVSNVLSHIGSVTAKDFGRVSGLTMKDIIREAAREGHDLLFADNPSAVLKELTGLIQNLIRSKWHEVLE

SEQ ID NO: 2531 - DNA, 1038 bp, synthetic construct
  misc_feature 1..1038: note = variant of RNA ligase 2 from Klebsiella phage KP179
  source 1..1038: mol_type = other DNA
atgcatcaccatcaccatcacggtggcagcaacatgtttgcgtattattcaagtctggaaaaccataccaatgccaagttcattagcaagatccgtggtgcaggcttcctgatgcacaccgtggaatgggtagctcgcgagaagattcatggaacgaactttagcgttatcattactccgaccgaaatcgtgccagccaaacgcacagggccgatcttggaagatgagagcttctttggtcatgaaattatcatgaaaaaatatatggactccttcgtgaaggtgcagaacatgctgaatgcgatggatcttgttagcgtgcaaatctttggcgaatttgcgggtggtggcattcagaaaggcgtcgattacggagacaaagatttctatgtgtttgacatcctgtctgatagcgggaacgagaaagtttactgggatgactatcgcgtcgaatcgttttgcaccactgtgggtctgaaattagcgcctctgctgggacgtggtagtttcgctgaactgtcccagtacccaaacgatttcaaaagcctggtgaaccgttataatgaattggttgacacggtcggcctggagatggccaataaacacgtctttggtccgcaagcgtcttctgaaactggcctggcagaaggctacgttcttaaacccgtctatccgcgcttctttaatgtgggtacgcgcgtggcgattaaatgcaagaactccaaattttcggagaaagccaaactgatttcgccaattaaagcgaaggttgaactgacggagaacgataaacgtctgctcggaatctttagcgaatatgttacctggaatcgcgtcagtaacgtactgtcacatattggctcagtgaccgccaaagattttgggcgtgtttcgggtctgacgatgaaagacatcattcgcgaagcagcacgcgaaggccatgatctgttgttcgctgataacccgtcggcggtgctgaaggagctgacaggccatatccagaacacgattcgctccaaatggcacgaagttctggag

SEQ ID NO: 2532 - protein, 346 aa, synthetic construct
  REGION 1..346: note = variant of RNA ligase 2 from Klebsiella phage KP179
MHHHHHHGGSNMFAYYSSLENHTNAKFISKIRGAGFLMHTVEWVAREKIHGTNFSVIITPTEIVPAKRTGPILEDESFFGHEIIMKKYMDSFVKVQNMLNAMDLVSVQIFGEFAGGGIQKGVDYGDKDFYVFDILSDSGNEKVYWDDYRVESFCTTVGLKLAPLLGRGSFAELSQYPNDFKSLVNRYNELVDTVGLEMANKHVFGPQASSETGLAEGYVLKPVYPRFFNVGTRVAIKCKNSKFSEKAKLISPIKAKVELTENDKRLLGIFSEYVTWNRVSNVLSHIGSVTAKDFGRVSGLTMKDIIREAAREGHDLLFADNPSAVLKELTGHIQNTIRSKWHEVLE

SEQ ID NO: 2533 - DNA, 1038 bp, synthetic construct
  misc_feature 1..1038: note = variant of RNA ligase 2 from Klebsiella phage KP179
  source 1..1038: mol_type = other DNA
atgcatcaccatcaccatcacggtggcagcaacatgtttgcgtattattcaagtctggaaaaccataccaatgccaagttcattagcaagatccgtggtgcaggcttcctgatgcacaccgtggaatgggtagctcgcgagaagattcatggaacgaactttagcgttatcattactccgaccgaaatcgtgccagccaaacgcacagggccgatcttggaagatgagagcttctttggtcatgaaattatcatgaaaaaatatatggactccttcgtgaaggtgcagaacatgctgaatgcgatggatcttgttagcgtgcaaatctttggcgaatttgcgggtggtggcattcagaaaggcgtcgattacggagacaaagatttctatgtgtttgacatcctgtctgatagcgggaacgagaaagtttactgggatgactatcgcgtcgaatcgttttgcaccactgtgggtctgaaattagcgcctctgctgggacgtggtagtttcgctgaactgtcccagtacccaaacgatttcaaaagcctggtgaaccgttataatgaattggttgacacggtcggcctggagatggccaataaacacgtctttggtccgcaagcgtcttctgaaactggcctggcagaaggctacgttcttaaacccgtctatccgcgcttctttaatgtgggtacgcgcgtggcgattaaatgcaagaactccaaattttcggagaaagccaaactgatttcgccaattaaagcgaaggttgaactgacggagaacgataaacgtctgctcggaatctttagcgaatatgttacctggaatcgcgtcagtaacgtactgtcacatattggctcagtgacccataaagattttgggcgtgtttcgggtctgacgatgaaagacatcattcgcgaagcagcacgcgaaggccatgatctgttgttcgctgataacccgtcggcggtgctgaaggagctgacaggcctcatccagaacacgattcgctccaaatggcacgaagttctggag

SEQ ID NO: 2534 - protein, 346 aa, synthetic construct
  REGION 1..346: note = variant of RNA ligase 2 from Klebsiella phage KP179
MHHHHHHGGSNMFAYYSSLENHTNAKFISKIRGAGFLMHTVEWVAREKIHGTNFSVIITPTEIVPAKRTGPILEDESFFGHEIIMKKYMDSFVKVQNMLNAMDLVSVQIFGEFAGGGIQKGVDYGDKDFYVFDILSDSGNEKVYWDDYRVESFCTTVGLKLAPLLGRGSFAELSQYPNDFKSLVNRYNELVDTVGLEMANKHVFGPQASSETGLAEGYVLKPVYPRFFNVGTRVAIKCKNSKFSEKAKLISPIKAKVELTENDKRLLGIFSEYVTWNRVSNVLSHIGSVTHKDFGRVSGLTMKDIIREAAREGHDLLFADNPSAVLKELTGLIQNTIRSKWHEVLE

SEQ ID NO: 2535 - DNA, 1038 bp, synthetic construct
  misc_feature 1..1038: note = variant of RNA ligase 2 from Klebsiella phage KP179
  source 1..1038: mol_type = other DNA
atgcatcaccatcaccatcacggtggcagcaacatgtttgcgtattattcaagtctggaaaaccataccaatgccaagttcattagcaagatccgtggtgcaggcttcctgatgcacaccgtggaatgggtagctcgcgagaagattcatggaacgaactttagcgttatcattactccgaccgaaatcgtgccagccaaacgcacagggccgatcttggaagatgagagcttctttggtcatgaaattatcatgaaaaaatatatggactccttcgtgaaggtgcagaacatgctgaatgcgatggatcttgttagcgtgcaaatctttggcgaatttgcgggtggtggcattcagaaaggcgtcgattacggagacaaagatttctatgtgtttgacatcctgtctgatagcgggaacgagaaagtttactgggatgactatcgcgtcgaatcgttttgcaccactgtgggtctgaaattagcgcctctgctgggacgtggtagtttcgctgaactgtcccagtacccaaacgatttcaaaagcctggtgaaccgttataatgaattggttgacacggtcggcctggagatggccaataaacacgtctttggtccgcaagcgtcttctgaaactggcctggcagaaggctacgttcttaaacccgtctatccgcgcttctttaatgtgggtacgcgcgtggcgattaaatgcaagaactccaaattttcggagaaagccaaactgatttcgccaattaaagcgaaggttgaactgacggagaacgataaacgtctgctcggaatctttagcgaatatgttacctggaatcgcgtcagtaacgtactgtcacatattggctcagtgaccgccaaagattttgggcgtgttgtgggtctgacgatgaaagacatcattcgcgaagcagcacgcgaaggccatgatctgttgttcgctgataacccgtcggcggtgctgaaggagctgacaggcctcatccagaacacgattcgctccaaatggcacgaagttctggag

SEQ ID NO: 2536 - protein, 346 aa, synthetic construct
  REGION 1..346: note = variant of RNA ligase 2 from Klebsiella phage KP179
MHHHHHHGGSNMFAYYSSLENHTNAKFISKIRGAGFLMHTVEWVAREKIHGTNFSVIITPTEIVPAKRTGPILEDESFFGHEIIMKKYMDSFVKVQNMLNAMDLVSVQIFGEFAGGGIQKGVDYGDKDFYVFDILSDSGNEKVYWDDYRVESFCTTVGLKLAPLLGRGSFAELSQYPNDFKSLVNRYNELVDTVGLEMANKHVFGPQASSETGLAEGYVLKPVYPRFFNVGTRVAIKCKNSKFSEKAKLISPIKAKVELTENDKRLLGIFSEYVTWNRVSNVLSHIGSVTAKDFGRVVGLTMKDIIREAAREGHDLLFADNPSAVLKELTGLIQNTIRSKWHEVLE

SEQ ID NO: 2537 - DNA, 1038 bp, synthetic construct
  misc_feature 1..1038: note = variant of RNA ligase 2 from Klebsiella phage KP179
  source 1..1038: mol_type = other DNA
atgcatcaccatcaccatcacggtggcagcaacatgtttgcgtattattcaagtctggaaaaccataccaatgccaagttcattagcaagatccgtggtgcaggcttcctgatgcacaccgtggaatgggtagctcgcgagaagattcatggaacgaactttagcgttatcattactccgaccgaaatcgtgccagccaaacgcacagggccgatcttggaagatgagagcttctttggtcatgaaattatcatgaaaaaatatatggactccttcgtgaaggtgcagaacatgctgaatgcgatggatcttgttagcgtgcaaatctttggcgaatttgcgggtggtggcattcagaaaggcgtcgattacggagacaaagatttctatgtgtttgacatccattctgatagcgggaacgagaaagtttactgggatgactatcgcgtcgaatcgttttgcaccactgtgggtctgaaattagcgcctctgctgggacgtggtagtttcgctgaactgtcccagtacccaaacgatttcaaaagcctggtgaaccgttataatgaattggttgacacggtcggcctggagatggccaataaacacgtctttggtccgcaagcgtcttctgaaactggcctggcagaaggctacgttcttaaacccgtctatccgcgcttctttaatgtgggtacgcgcgtggcgattaaatgcaagaactccaaattttcggagaaagccaaactgatttcgccaattaaagcgaaggttgaactgacggagaacgataaacgtctgctcggaatctttagcgaatatgttacctggaatcgcgtcagtaacgtactgtcacatattggctcagtgaccgccaaagattttgggcgtgtttcgggtctgacgatgaaagacatcattcgcgaagcagcacgcgaaggccatgatctgttgttcgctgataacccgtcggcggtgctgaaggagctgacaggcctcatccagaacacgattcgctccaaatggcacgaagttctggag

SEQ ID NO: 2538 - protein, 346 aa, synthetic construct
  REGION 1..346: note = variant of RNA ligase 2 from Klebsiella phage KP179
MHHHHHHGGSNMFAYYSSLENHTNAKFISKIRGAGFLMHTVEWVAREKIHGTNFSVIITPTEIVPAKRTGPILEDESFFGHEIIMKKYMDSFVKVQNMLNAMDLVSVQIFGEFAGGGIQKGVDYGDKDFYVFDIHSDSGNEKVYWDDYRVESFCTTVGLKLAPLLGRGSFAELSQYPNDFKSLVNRYNELVDTVGLEMANKHVFGPQASSETGLAEGYVLKPVYPRFFNVGTRVAIKCKNSKFSEKAKLISPIKAKVELTENDKRLLGIFSEYVTWNRVSNVLSHIGSVTAKDFGRVSGLTMKDIIREAAREGHDLLFADNPSAVLKELTGLIQNTIRSKWHEVLE

SEQ ID NO: 2539 - DNA, 1038 bp, synthetic construct
  misc_feature 1..1038: note = variant of RNA ligase 2 from Klebsiella phage KP179
  source 1..1038: mol_type = other DNA
atgcatcaccatcaccatcacggtggcagcaacatgtttgcgtattattcaagtctggaaaaccataccaatgccaagttcattagcaagatccgtggtgcaggcttcctgatgcacaccgtggaatgggtagctcgcgagaagattcatggaacgaactttagcgttatcattactccgaccgaaatcgtgccagccaaacgcacagggccgatcttggaagatgagagcttctttggtcatgaaattatcatgaaaaaatatatggactccttcgtgaaggtgcagaacatgctgaatgcgatggatcttgttagcgtgcaaatctttggcgaatttgcgggtggtggcattcagaaaggcgtcgattacggagacaaagatttctatgtgtttgacatcctgtctgatagcgggaacgagaaagtttactgggatgactatcgcgtcgaatcgttttgcaccactgtgggtctgaaattagcgcctctgctgggacgtggtagtttcgctgaactgtcccagtacccaaacgatttcaaaagcctggtgaaccgttataatgaattggttgacacggtcggcctggagatggccaataaacacgtctttggtccgcaagcgtcttctgaaactggcctggcagaaggctacgttcttaaacccgtctatccgcgcttctttaatgtgggtacgcgcgtggcgattaaatgcaagaactccaaattttcggagaaagccaaactgatttcgccaattaaagcgaaggttgaactgacggagaacgataaacgtctgctcggaatctttagcgaatatgttacctggaatcgcgtctggaacgtactgtcacatattggctcagtgaccgccaaagattttgggcgtgtttcgggtctgacgatgaaagacatcattcgcgaagcagcacgcgaaggccatgatctgttgttcgctgataacccgtcggcggtgctgaaggagctgacaggcctcatccagaacacgattcgctccaaatggcacgaagttctggag

SEQ ID NO: 2540 - protein, 346 aa, synthetic construct
  REGION 1..346: note = variant of RNA ligase 2 from Klebsiella phage KP179
MHHHHHHGGSNMFAYYSSLENHTNAKFISKIRGAGFLMHTVEWVAREKIHGTNFSVIITPTEIVPAKRTGPILEDESFFGHEIIMKKYMDSFVKVQNMLNAMDLVSVQIFGEFAGGGIQKGVDYGDKDFYVFDILSDSGNEKVYWDDYRVESFCTTVGLKLAPLLGRGSFAELSQYPNDFKSLVNRYNELVDTVGLEMANKHVFGPQASSETGLAEGYVLKPVYPRFFNVGTRVAIKCKNSKFSEKAKLISPIKAKVELTENDKRLLGIFSEYVTWNRVWNVLSHIGSVTAKDFGRVSGLTMKDIIREAAREGHDLLFADNPSAVLKELTGLIQNTIRSKWHEVLE

SEQ ID NO: 2541 - DNA, 1038 bp, synthetic construct
  misc_feature 1..1038: note = variant of RNA ligase 2 from Klebsiella phage KP179
  source 1..1038: mol_type = other DNA
atgcatcaccatcaccatcacggtggcagcaacatgtttgcgtattattcaagtctggaaaaccataccaatgccaagttcattagcaagatccgtggtgcaggcttcctgatgcacaccgtggaatgggtagctcgcgagaagattcatggaacgaactttagcgttatcattactccgaccgaaatcgtgccagccaaacgcacagggccgatcttggaagatgagagcttctttggtcatgaaattatcatgaaaaaatatatggactccttcgtgaaggtgcagaacatgctgaatgcgatggatcttgttagcgtgcaaatctttggcgaatttgcgggtggtggcattcagaaaggcgtcgattacggagacaaagatttctatgtgtttgacatcctgtctgatagcgggaacgagaaagtttactgggatgactatcgcgtcgaatcgttttgcaccactgtgggtctgaaattagcgcctctgctgggacgtggtagtttcgctgaactgtcccagtacccaaacgatttcaaaagcctggtgaaccgttataatgaattggttgacacggtcggcctggagatggccaataaacacgtctttggtccgcaagcgtcttctgaaactggcctggcagaaggctacgttcttaaacccgtctatccgcgcttctttaatgtgggtacgcgcgtggcgattaaatgcaagaactccaaattttcggagaaagccaaactgatttcgccaattaaagcgaaggttgaactgacggagaacgataaacgtctgctcggaatctttagcgaatatgttacctggaatcgcgtcagtaacgtactgtcacatattggctcagtgaccgccaaagattttgggcgtgtttcgggtctgacgatgaaagacatcattcgcgaagcacttcgcgaaggccatgatctgttgttcgctgataacccgtcggcggtgctgaaggagctgacaggcctcatccagaacacgattcgctccaaatggcacgaagttctggag

SEQ ID NO: 2542 - protein, 346 aa, synthetic construct
  REGION 1..346: note = variant of RNA ligase 2 from Klebsiella phage KP179
MHHHHHHGGSNMFAYYSSLENHTNAKFISKIRGAGFLMHTVEWVAREKIHGTNFSVIITPTEIVPAKRTGPILEDESFFGHEIIMKKYMDSFVKVQNMLNAMDLVSVQIFGEFAGGGIQKGVDYGDKDFYVFDILSDSGNEKVYWDDYRVESFCTTVGLKLAPLLGRGSFAELSQYPNDFKSLVNRYNELVDTVGLEMANKHVFGPQASSETGLAEGYVLKPVYPRFFNVGTRVAIKCKNSKFSEKAKLISPIKAKVELTENDKRLLGIFSEYVTWNRVSNVLSHIGSVTAKDFGRVSGLTMKDIIREALREGHDLLFADNPSAVLKELTGLIQNTIRSKWHEVLE

SEQ ID NO: 2543 - DNA, 1038 bp, synthetic construct
  misc_feature 1..1038: note = variant of RNA ligase 2 from Klebsiella phage KP179
  source 1..1038: mol_type = other DNA
atgcatcaccatcaccatcacggtggcagcaacatgtttgcgtattattcaagtctggaaaaccataccaatgccaagttcattagcaagatccgtggtgcaggcttcctgatgcacaccgtggaatgggtagctcgcgagaagattcatggaacgaactttagcgttatcattactccgaccgaaatcgtgccagccaaacgcacagggccgatcttggaagatgagagcttctttggtcatgaaattatcatgaaaaaatatatggactccttcgtgaaggtgcagaacatgctgaatgcgatggatcttgttagcgtgcaaatctttggcgaatttgcgggtggtggcattcagaaaggcgtcgattacggagacaaagatttctatgtgtttgacatcctgtctgatagcgggaacgagaaagtttactgggatgactatcgcgtcgaatcgttttgcaccactgtgggtctgaaattagcgcctctgctgggacgtggtagtttcgctgaactgtcccagtacccaaacgatttcaaaagcctggtgaaccgttataatgaattggttgacacggtcggcctggagatggccaataaacacgtctttggtccgcaagcgtcttctgaaactggcctggcagaaggctacgttcttaaacccgtctatccgcgcttctttaatgtgggtacgcgcgtggcgattaaatgcaagaactccaaattttcggagaaagccaaactgatttcgccaattaaagcgaaggttgaactgacggagaacgataaacgtattctcggaatctttagcgaatatgttacctggaatcgcgtcagtaacgtactgtcacatattggctcagtgaccgccaaagattttgggcgtgtttcgggtctgacgatgaaagacatcattcgcgaagcagcacgcgaaggccatgatctgttgttcgctgataacccgtcggcggtgctgaaggagctgacaggcctcatccagaacacgattcgctccaaatggcacgaagttctggag

SEQ ID NO: 2544 - protein, 346 aa, synthetic construct
  REGION 1..346: note = variant of RNA ligase 2 from Klebsiella phage KP179
MHHHHHHGGSNMFAYYSSLENHTNAKFISKIRGAGFLMHTVEWVAREKIHGTNFSVIITPTEIVPAKRTGPILEDESFFGHEIIMKKYMDSFVKVQNMLNAMDLVSVQIFGEFAGGGIQKGVDYGDKDFYVFDILSDSGNEKVYWDDYRVESFCTTVGLKLAPLLGRGSFAELSQYPNDFKSLVNRYNELVDTVGLEMANKHVFGPQASSETGLAEGYVLKPVYPRFFNVGTRVAIKCKNSKFSEKAKLISPIKAKVELTENDKRILGIFSEYVTWNRVSNVLSHIGSVTAKDFGRVSGLTMKDIIREAAREGHDLLFADNPSAVLKELTGLIQNTIRSKWHEVLE

SEQ ID NO: 2545 - DNA, 1038 bp, synthetic construct
  misc_feature 1..1038: note = variant of RNA ligase 2 from Klebsiella phage KP179
  source 1..1038: mol_type = other DNA
atgcatcaccatcaccatcacggtggcagcaacatgtttgcgtattattcaagtctggaaaaccataccaatgccaagttcattagcaagatccgtggtgcaggcttcctgatgcacaccgtggaatgggtagctcgcgagaagattcatggaacgaactttagcgttatcattactccgaccgaaatcgtgccagccaaacgcacagggccgatcttggaagatgagagcttctttggtcatgaaattatcatgaaaaaatatatggactccttcgtgaaggtgcagaacatgctgaatgcgatggatcttgttagcgtgcaaatctttggcgaatttgcgggtggtggcattcagaaaggcgtcgattacggagacaaagatttctatgtgtttgacatccagtctgatagcgggaacgagaaagtttactgggatgactatcgcgtcgaatcgttttgcaccactgtgggtctgaaattagcgcctctgctgggacgtggtagtttcgctgaactgtcccagtacccaaacgatttcaaaagcctggtgaaccgttataatgaattggttgacacggtcggcctggagatggccaataaacacgtctttggtccgcaagcgtcttctgaaactggcctggcagaaggctacgttcttaaacccgtctatccgcgcttctttaatgtgggtacgcgcgtggcgattaaatgcaagaactccaaattttcggagaaagccaaactgatttcgccaattaaagcgaaggttgaactgacggagaacgataaacgtctgctcggaatctttagcgaatatgttacctggaatcgcgtcagtaacgtactgtcacatattggctcagtgaccgccaaagattttgggcgtgtttcgggtctgacgatgaaagacatcattcgcgaagcagcacgcgaaggccatgatctgttgttcgctgataacccgtcggcggtgctgaaggagctgacaggcctcatccagaacacgattcgctccaaatggcacgaagttctggag

SEQ ID NO: 2546 - protein, 346 aa, synthetic construct
  REGION 1..346: note = variant of RNA ligase 2 from Klebsiella phage KP179
MHHHHHHGGSNMFAYYSSLENHTNAKFISKIRGAGFLMHTVEWVAREKIHGTNFSVIITPTEIVPAKRTGPILEDESFFGHEIIMKKYMDSFVKVQNMLNAMDLVSVQIFGEFAGGGIQKGVDYGDKDFYVFDIQSDSGNEKVYWDDYRVESFCTTVGLKLAPLLGRGSFAELSQYPNDFKSLVNRYNELVDTVGLEMANKHVFGPQASSETGLAEGYVLKPVYPRFFNVGTRVAIKCKNSKFSEKAKLISPIKAKVELTENDKRLLGIFSEYVTWNRVSNVLSHIGSVTAKDFGRVSGLTMKDIIREAAREGHDLLFADNPSAVLKELTGLIQNTIRSKWHEVLE

SEQ ID NO: 2547 - DNA, 1038 bp, synthetic construct
  misc_feature 1..1038: note = variant of RNA ligase 2 from Klebsiella phage KP179
  source 1..1038: mol_type = other DNA
atgcatcaccatcaccatcacggtggcagcaacatgtttgcgtattattcaagtctggaaaaccataccaatgccaagttcattagcaagatccgtggtgcaggcttcctgatgcacaccgtggaatgggtagctcgcgagaagattcatggaacgaactttagcgttatcattactccgaccgaaatcgtgccagccaaacgcacagggccgatcttggaagatgagagcttctttggtcatgaaattatcatgaaaaaatatatggactccttcgtgaaggtgcagaacatgctgaatgcgatggatcttgttagcgtgcaaatctttggcgaatttgcgggtggtggcattcagaaaggcgtcgattacggagacaaagatttctatgtgtttgacatcctgtctgatagcgggaacgagaaagtttactgggatgactatcgcgtcgaatcgttttgcaccactgtgagtctgaaattagcgcctctgctgggacgtggtagtttcgctgaactgtcccagtacccaaacgatttcaaaagcctggtgaaccgttataatgaattggttgacacggtcggcctggagatggccaataaacacgtctttggtccgcaagcgtcttctgaaactggcctggcagaaggctacgttcttaaacccgtctatccgcgcttctttaatgtgggtacgcgcgtggcgattaaatgcaagaactccaaattttcggagaaagccaaactgatttcgccaattaaagcgaaggttgaactgacggagaacgataaacgtctgctcggaatctttagcgaatatgttacctggaatcgcgtcagtaacgtactgtcacatattggctcagtgaccgccaaagattttgggcgtgtttcgggtctgacgatgaaagacatcattcgcgaagcagcacgcgaaggccatgatctgttgttcgctgataacccgtcggcggtgctgaaggagctgacaggcctcatccagaacacgattcgctccaaatggcacgaagttctggag

SEQ ID NO: 2548 - protein, 346 aa, synthetic construct
  REGION 1..346: note = variant of RNA ligase 2 from Klebsiella phage KP179
MHHHHHHGGSNMFAYYSSLENHTNAKFISKIRGAGFLMHTVEWVAREKIHGTNFSVIITPTEIVPAKRTGPILEDESFFGHEIIMKKYMDSFVKVQNMLNAMDLVSVQIFGEFAGGGIQKGVDYGDKDFYVFDILSDSGNEKVYWDDYRVESFCTTVSLKLAPLLGRGSFAELSQYPNDFKSLVNRYNELVDTVGLEMANKHVFGPQASSETGLAEGYVLKPVYPRFFNVGTRVAIKCKNSKFSEKAKLISPIKAKVELTENDKRLLGIFSEYVTWNRVSNVLSHIGSVTAKDFGRVSGLTMKDIIREAAREGHDLLFADNPSAVLKELTGLIQNTIRSKWHEVLE

SEQ ID NO: 2549 - DNA, 1038 bp, synthetic construct
  misc_feature 1..1038: note = variant of RNA ligase 2 from Klebsiella phage KP179
  source 1..1038: mol_type = other DNA
atgcatcaccatcaccatcacggtggcagcaacatgtttgcgtattattcaagtctggaaaaccataccaatgccaagttcattagcaagatccgtggtgcaggcttcctgatgcacaccgtggaatgggtagctcgcgagaagattcatggaacgaactttagcgttatcattactccgaccgaaatcgtgccagccaaacgcacagggccgatcttggaagatgagagcttctttggtcatgaaattatcatgaaaaaatatatggactccttcgtgaaggtgcagaacatgctgaatgcgatggatcttgttagcgtgcaaatctttggcgaatttgcgggtggtggcattcagaaaggcgtcgattacggagacaaagatttctatgtgtttgacatcctgtctgatagcgggaacgagaaagtttactgggatgactatcgcgtcgaatcgttttgcaccactgtgggtctgaaattagcgcctctgctgggacgtggtagtttcgctgaactgtcccagtacccaaacgatttcaaaagcctggtgaaccgttataatgaattggttgacacggtcggcctggagatggccaataaacacgtctttggtccgcaagcgtcttctgaaactggcctggcagaaggctacgttcttaaacccgtctatccgcgcttctttaatgtgggtacgcgcgtggcgattaaatgcaagaactccaaattttcggagaaagccaaactgatttcgccaattaaagcgaaggttgaactgacggagaacgataaacgtctgctcggaatctttagcgaatatgttacctggaatcgcgtcagtaacgtactgtcacatattggccgtgtgaccgccaaagattttgggcgtgtttcgggtctgacgatgaaagacatcattcgcgaagcagcacgcgaaggccatgatctgttgttcgctgataacccgtcggcggtgctgaaggagctgacaggcctcatccagaacacgattcgctccaaatggcacgaagttctggag

SEQ ID NO: 2550 - protein, 346 aa, synthetic construct
  REGION 1..346: note = variant of RNA ligase 2 from Klebsiella phage KP179
MHHHHHHGGSNMFAYYSSLENHTNAKFISKIRGAGFLMHTVEWVAREKIHGTNFSVIITPTEIVPAKRTGPILEDESFFGHEIIMKKYMDSFVKVQNMLNAMDLVSVQIFGEFAGGGIQKGVDYGDKDFYVFDILSDSGNEKVYWDDYRVESFCTTVGLKLAPLLGRGSFAELSQYPNDFKSLVNRYNELVDTVGLEMANKHVFGPQASSETGLAEGYVLKPVYPRFFNVGTRVAIKCKNSKFSEKAKLISPIKAKVELTENDKRLLGIFSEYVTWNRVSNVLSHIGRVTAKDFGRVSGLTMKDIIREAAREGHDLLFADNPSAVLKELTGLIQNTIRSKWHEVLE

SEQ ID NO: 2551 - DNA, 1038 bp, synthetic construct
  misc_feature 1..1038: note = variant of RNA ligase 2 from Klebsiella phage KP179
  source 1..1038: mol_type = other DNA
atgcatcaccatcaccatcacggtggcagcaacatgtttgcgtattattcaagtctggaaaaccataccaatgccaagttcattagcaagatccgtggtgcaggcttcctgatgcacaccgtggaatgggtagctcgcgagaagattcatggaacgaactttagcgttatcattactccgaccgaaatcgtgccagccaaacgcacagggccgatcttggaagatgagagcttctttggtcatgaaattatcatgaaaaaatatatggactccttcgtgaaggtgcagaacatgctgaatgcgatggatcttgttagcgtgcaaatctttggcgaatttgcgggtggtggcattcagaaaggcgtcgattacggagacaaagatttctatgtgtttgacatcctgtctgatagcgggaacgagaaagtttactgggatgactatcgcgtcgaatcgttttgcaccactgtgggtctgaggttagcgcctctgctgggacgtggtagtttcgctgaactgtcccagtacccaaacgatttcaaaagcctggtgaaccgttataatgaattggttgacacggtcggcctggagatggccaataaacacgtctttggtccgcaagcgtcttctgaaactggcctggcagaaggctacgttcttaaacccgtctatccgcgcttctttaatgtgggtacgcgcgtggcgattaaatgcaagaactccaaattttcggagaaagccaaactgatttcgccaattaaagcgaaggttgaactgacggagaacgataaacgtctgctcggaatctttagcgaatatgttacctggaatcgcgtcagtaacgtactgtcacatattggctcagtgaccgccaaagattttgggcgtgtttcgggtctgacgatgaaagacatcattcgcgaagcagcacgcgaaggccatgatctgttgttcgctgataacccgtcggcggtgctgaaggagctgacaggcctcatccagaacacgattcgctccaaatggcacgaagttctggag

SEQ ID NO: 2552 - protein, 346 aa, synthetic construct
  REGION 1..346: note = variant of RNA ligase 2 from Klebsiella phage KP179
MHHHHHHGGSNMFAYYSSLENHTNAKFISKIRGAGFLMHTVEWVAREKIHGTNFSVIITPTEIVPAKRTGPILEDESFFGHEIIMKKYMDSFVKVQNMLNAMDLVSVQIFGEFAGGGIQKGVDYGDKDFYVFDILSDSGNEKVYWDDYRVESFCTTVGLRLAPLLGRGSFAELSQYPNDFKSLVNRYNELVDTVGLEMANKHVFGPQASSETGLAEGYVLKPVYPRFFNVGTRVAIKCKNSKFSEKAKLISPIKAKVELTENDKRLLGIFSEYVTWNRVSNVLSHIGSVTAKDFGRVSGLTMKDIIREAAREGHDLLFADNPSAVLKELTGLIQNTIRSKWHEVLE

SEQ ID NO: 2553 - DNA, 1038 bp, synthetic construct
  misc_feature 1..1038: note = variant of RNA ligase 2 from Klebsiella phage KP179
  source 1..1038: mol_type = other DNA
atgcatcaccatcaccatcacggtggcagcaacatgtttgcgtattattcaagtctggaaaaccataccaatgccaagttcattagcaagatccgtggtgcaggcttcctgatgcacaccgtggaatgggtagctcgcgagaagattcatggaacgaactttagcgttatcattactccgaccgaaatcgtgccagccaaacgcacagggccgatcttggaagatgagagcttctttggtcatgaaattatcatgaaaaaatatatggactccttcgtgaaggtgcagaacatgctgaatgcgatggatcttgttagcgtgcaaatctttggcgaatttgcgggtggtggcattcagaaaggcgtcgattacggagacaaagatttctatgtgtttgacatcctgtctgatagcgggaacgagaaagtttactgggatgactatcgcgtcgaatcgttttgcaccactgtgggtctgaaattagcgcctctgctgggacgtggtagtttcgctgaactgtcccagtacccaaacgatttcaaaagcctggtgaaccgttataatgaattggttgacacggtcggcctggagatggccaataaacacgtctttggtccgcaagcgtcttctgaaactggcctggcagaaggctacgttcttaaacccgtctatccgcgcttctttaatgtgggtacgcgcgtggcgattaaatgcaagaactccaaattttcggagaaagccaaactgatttcgccaattaaagcgaaggttgaactgacggagaacgataaacgtctgctcggaatctttagcgaatatgttacctggaatcgcgtcagtaacgtactgtcacatattggctcagtgaccgccaaagattttgggcgtgtttcgggtctgacgatgaaagacatcattcgcgaagcaactcgcgaaggccatgatctgttgttcgctgataacccgtcggcggtgctgaaggagctgacaggcctcatccagaacacgattcgctccaaatggcacgaagttctggag

SEQ ID NO: 2554 - protein, 346 aa, synthetic construct
  REGION 1..346: note = variant of RNA ligase 2 from Klebsiella phage KP179
MHHHHHHGGSNMFAYYSSLENHTNAKFISKIRGAGFLMHTVEWVAREKIHGTNFSVIITPTEIVPAKRTGPILEDESFFGHEIIMKKYMDSFVKVQNMLNAMDLVSVQIFGEFAGGGIQKGVDYGDKDFYVFDILSDSGNEKVYWDDYRVESFCTTVGLKLAPLLGRGSFAELSQYPNDFKSLVNRYNELVDTVGLEMANKHVFGPQASSETGLAEGYVLKPVYPRFFNVGTRVAIKCKNSKFSEKAKLISPIKAKVELTENDKRLLGIFSEYVTWNRVSNVLSHIGSVTAKDFGRVSGLTMKDIIREATREGHDLLFADNPSAVLKELTGLIQNTIRSKWHEVLE

SEQ ID NO: 2555 - DNA, 1038 bp, synthetic construct
  misc_feature 1..1038: note = variant of RNA ligase 2 from Klebsiella phage KP179
  source 1..1038: mol_type = other DNA
atgcatcaccatcaccatcacggtggcagcaacatgtttgcgtattattcaagtctggaaaaccataccaatgccaagttcattagcaagatccgtggtgcaggcttcctgatgcacaccgtggaatgggtagctcgcgagaagattcatggaacgaactttagcgttatcattactccgaccgaaatcgtgccagccaaacgcacagggccgatcttggaagatgagagcttctttggtcatgaaattatcatgaaaaaatatatggactccttcgtgaaggtgcagaacatgctgaatgcgatggatcttgttagcgtgcaaatctttggcgaatttgcgggtggtggcattcagaaaggcgtcgattacggagacaaagatttctatgtgtttgacatcctgtctgatagcgggaacgagaaagtttactgggatgactatcgcgtcgaatcgttttgcaccactgtgggtctgaaattagcgcctctgctgggacgtggtagtttcgctgaactgtcccagtacccaaacgatttcaaaagcctggtgaaccgttataatgaattggttgacacggtcggcctggagatggccaataaacacgtctttggtccgcaagcgtcttctgaaactggcctggcagaaggctacgttcttaaacccgtctatccgcgcttctttaatgtgggtacgcgcgtggcgattaaatgcaagaactccaaattttcggagaaagccaaactgatttcgccaattaaagcgaaggttgaactgacggagaacgataaacgtctgctcggaatctttagcgaatatgttacctggaatcgcgtcagtaacgtactgtcacattttggctcagtgaccgccaaagattttgggcgtgtttcgggtctgacgatgaaagacatcattcgcgaagcagcacgcgaaggccatgatctgttgttcgctgataacccgtcggcggtgctgaaggagctgacaggcctcatccagaacacgattcgctccaaatggcacgaagttctggag

SEQ ID NO: 2556 - protein, 346 aa, synthetic construct
  REGION 1..346: note = variant of RNA ligase 2 from Klebsiella phage KP179
MHHHHHHGGSNMFAYYSSLENHTNAKFISKIRGAGFLMHTVEWVAREKIHGTNFSVIITPTEIVPAKRTGPILEDESFFGHEIIMKKYMDSFVKVQNMLNAMDLVSVQIFGEFAGGGIQKGVDYGDKDFYVFDILSDSGNEKVYWDDYRVESFCTTVGLKLAPLLGRGSFAELSQYPNDFKSLVNRYNELVDTVGLEMANKHVFGPQASSETGLAEGYVLKPVYPRFFNVGTRVAIKCKNSKFSEKAKLISPIKAKVELTENDKRLLGIFSEYVTWNRVSNVLSHFGSVTAKDFGRVSGLTMKDIIREAAREGHDLLFADNPSAVLKELTGLIQNTIRSKWHEVLE

SEQ ID NO: 2557 - DNA, 1038 bp, synthetic construct
  misc_feature 1..1038: note = variant of RNA ligase 2 from Klebsiella phage KP179
  source 1..1038: mol_type = other DNA
atgcatcaccatcaccatcacggtggcagcaacatgtttgcgtattattcaagtctggaaaaccataccaatgccaagttcattagcaagatccgtggtgcaggcttcctgatgcacaccgtggaatgggtagctcgcgagaagattcatggaacgaactttagcgttatcattactccgaccgaaatcgtgccagccaaacgcacagggccgatcttggaagatgagagcttctttggtcatgaaattatcatgaaaaaatatatggactccttcgtgaaggtgcagaacatgctgaatgcgatggatcttgttagcgtgcaaatctttggcgaatttgcgggtggtggcattcagaaaggcgtcgattacggagacaaagatttctatgtgtttgacatcctgtctgatagcgggaacgagaaagtttactgggatgactatcgcgtcgaatcgttttgcaccactgtgggtctgaaattagcgcctctgctgggacgtggtagtttcgctgaactgtcccagtacccaaacgatttcaaaagcctggtgaaccgttataatgaattggttgacacggtcggcctggagatggccaataaacacgtctttggtccgcaagcgtcttctgaaactggcctggcagaaggctacgttcttaaacccgtctatccgcgcttctttaatgtgggtacgcgcgtggcgattaaatgcaagaactccaaattttcggagaaagccaaactgatttcgccaattaaagcgaaggttgaactgacggagaacgataaacgtctgctcggaatctttagcgaatatgttaccgttaatcgcgtcagtaacgtactgtcacatattggctcagtgaccgccaaagattttgggcgtgtttcgggtctgacgatgaaagacatcattcgcgaagcagcacgcgaaggccatgatctgttgttcgctgataacccgtcggcggtgctgaaggagctgacaggcctcatccagaacacgattcgctccaaatggcacgaagttctggag

SEQ ID NO: 2558 - protein, 346 aa, synthetic construct
  REGION 1..346: note = variant of RNA ligase 2 from Klebsiella phage KP179
MHHHHHHGGSNMFAYYSSLENHTNAKFISKIRGAGFLMHTVEWVAREKIHGTNFSVIITPTEIVPAKRTGPILEDESFFGHEIIMKKYMDSFVKVQNMLNAMDLVSVQIFGEFAGGGIQKGVDYGDKDFYVFDILSDSGNEKVYWDDYRVESFCTTVGLKLAPLLGRGSFAELSQYPNDFKSLVNRYNELVDTVGLEMANKHVFGPQASSETGLAEGYVLKPVYPRFFNVGTRVAIKCKNSKFSEKAKLISPIKAKVELTENDKRLLGIFSEYVTVNRVSNVLSHIGSVTAKDFGRVSGLTMKDIIREAAREGHDLLFADNPSAVLKELTGLIQNTIRSKWHEVLE

SEQ ID NO: 2559 - DNA, 1038 bp, synthetic construct
  misc_feature 1..1038: note = variant of RNA ligase 2 from Klebsiella phage KP179
  source 1..1038: mol_type = other DNA
atgcatcaccatcaccatcacggtggcagcaacatgtttgcgtattattcaagtctggaaaaccataccaatgccaagttcattagcaagatccgtggtgcaggcttcctgatgcacaccgtggaatgggtagctcgcgagaagattcatggaacgaactttagcgttatcattactccgaccgaaatcgtgccagccaaacgcacagggccgatcttggaagatgagagcttctttggtcatgaaattatcatgaaaaaatatatggactccttcgtgaaggtgcagaacatgctgaatgcgatggatcttgttagcgtgcaaatctttggcgaatttgcgggtggtggcattcagaaaggcgtcgattacggagacaaagatttctatgtgtttgacatcctgtctgatagcgggaacgagaaagtttactgggatgactatcgcgtcgaatcgttttgcaccactgtgggtctgaaattagcgcctctgctgggacgtggtagtttcgctgaactgtcccagtacccaaacgatttcaaaagcctggtgaaccgttataatgaattggttgacacggtcggcctggagatggccaataaacacgtctttggtccgcaagcgtcttctgaaactggcctggcagaaggctacgttcttaaacccgtctatccgcgcttctttaatgtgggtacgcgcgtggcgattaaatgcaagaactccaaattttcggagaaagccaaactgatttcgccaattaaagcgaaggttgaactgacggagaacgataaacgtctgctcggaatctttagcgaatatgttacctggaatcgcgtcagtaacgtactgtcacatattggctcagtgaccaggaaagattttgggcgtgtttcgggtctgacgatgaaagacatcattcgcgaagcagcacgcgaaggccatgatctgttgttcgctgataacccgtcggcggtgctgaaggagctgacaggcctcatccagaacacgattcgctccaaatggcacgaagttctggag

SEQ ID NO: 2560 - protein, 346 aa, synthetic construct
  REGION 1..346: note = variant of RNA ligase 2 from Klebsiella phage KP179
MHHHHHHGGSNMFAYYSSLENHTNAKFISKIRGAGFLMHTVEWVAREKIHGTNFSVIITPTEIVPAKRTGPILEDESFFGHEIIMKKYMDSFVKVQNMLNAMDLVSVQIFGEFAGGGIQKGVDYGDKDFYVFDILSDSGNEKVYWDDYRVESFCTTVGLKLAPLLGRGSFAELSQYPNDFKSLVNRYNELVDTVGLEMANKHVFGPQASSETGLAEGYVLKPVYPRFFNVGTRVAIKCKNSKFSEKAKLISPIKAKVELTENDKRLLGIFSEYVTWNRVSNVLSHIGSVTRKDFGRVSGLTMKDIIREAAREGHDLLFADNPSAVLKELTGLIQNTIRSKWHEVLE

SEQ ID NO: 2561 - DNA, 1038 bp, synthetic construct
  misc_feature 1..1038: note = variant of RNA ligase 2 from Klebsiella phage KP179
  source 1..1038: mol_type = other DNA
atgcatcaccatcaccatcacggtggcagcaacatgtttgcgtattattcaagtctggaaaaccataccaatgccaagttcattagcaagatccgtggtgcaggcttcctgatgcacaccgtggaatgggtagctcgcgagaagattcatggaacgaactttagcgttatcattactccgaccgaaatcgtgccagccaaacgcacagggccgatcttggaagatgagagcttctttggtcatgaaattatcatgaaaaaatatatggactccttcgtgaaggtgcagaacatgctgaatgcgatggatcttgttagcgtgcaaatctttggcgaatttgcgggtggtggcattcagaaaggcgtcgattacggagacaaagatttctatgtgtttgacatcctgtctgatagcgggaacgagaaagtttactgggatgactatcgcgtcgaatcgttttgcaccactgtgggtctgaaattagcgcctctgctgggacgtggtagtttcgctgaactgtcccagtacccaaacgatttcaaaagcctggtgaaccgttataatgaattggttgacacggtcggcctggagatggccaataaacacgtctttggtccgcaagcgtcttctgaaactggcctggcagaaggctacgttcttaaacccgtctatccgcgcttctttaatgtgggtacgcgcgtggcgattaaatgcaagaactccaaattttcggagaaagccaaactgatttcgccaattaaagcgaaggttgaactgacggagaacgataaacgtctgctcggaatctttagcgaatatgttacctggaatcgcgtcagtaacgtactgtcacatattggctcagtgaccgccaaagattttgggcgtgtttcgggtctgacgatgaaagacatcattcgcgaagcagcacgcgaaggccatgatctgttgttcgctgataacccgtcggcggtgctgaaggagctggggggcctcatccagaacacgattcgctccaaatggcacgaagttctggag

SEQ ID NO: 2562 - protein, 346 aa, synthetic construct
  REGION 1..346: note = variant of RNA ligase 2 from Klebsiella phage KP179
MHHHHHHGGSNMFAYYSSLENHTNAKFISKIRGAGFLMHTVEWVAREKIHGTNFSVIITPTEIVPAKRTGPILEDESFFGHEIIMKKYMDSFVKVQNMLNAMDLVSVQIFGEFAGGGIQKGVDYGDKDFYVFDILSDSGNEKVYWDDYRVESFCTTVGLKLAPLLGRGSFAELSQYPNDFKSLVNRYNELVDTVGLEMANKHVFGPQASSETGLAEGYVLKPVYPRFFNVGTRVAIKCKNSKFSEKAKLISPIKAKVELTENDKRLLGIFSEYVTWNRVSNVLSHIGSVTAKDFGRVSGLTMKDIIREAAREGHDLLFADNPSAVLKELGGLIQNTIRSKWHEVLE

SEQ ID NO: 2563 - DNA, 1038 bp, synthetic construct
  misc_feature 1..1038: note = variant of RNA ligase 2 from Klebsiella phage KP179
  source 1..1038: mol_type = other DNA
atgcatcaccatcaccatcacggtggcagcaacatgtttgcgtattattcaagtctggaaaaccataccaatgccaagttcattagcaagatccgtggtgcaggcttcctgatgcacaccgtggaatgggtagctcgcgagaagattcatggaacgaactttagcgttatcattactccgaccgaaatcgtgccagccaaacgcacagggccgatcttggaagatgagagcttctttggtcatgaaattatcatgaaaaaatatatggactccttcgtgaaggtgcagaacatgctgaatgcgatggatcttgttagcgtgcaaatctttggcgaatttgcgggtggtggcattcagaaaggcgtcgattacggagacaaagatttgtatgtgtttgacatcctgtctgatagcgggaacgagaaagtttactgggatgactatcgcgtcgaatcgttttgcaccactgtgggtctgaaattagcgcctctgctgggacgtggtagtttcgctgaactgtcccagtacccaaacgatttcaaaagcctggtgaaccgttataatgaattggttgacacggtcggcctggagatggccaataaacacgtctttggtccgcaagcgtcttctgaaactggcctggcagaaggctacgttcttaaacccgtctatccgcgcttctttaatgtgggtacgcgcgtggcgattaaatgcaagaactccaaattttcggagaaagccaaactgatttcgccaattaaagcgaaggttgaactgacggagaacgataaacgtctgctcggaatctttagcgaatatgttacctggaatcgcgtcagtaacgtactgtcacatattggctcagtgaccgccaaagattttgggcgtgtttcgggtctgacgatgaaagacatcattcgcgaagcagcacgcgaaggccatgatctgttgttcgctgataacccgtcggcggtgctgaaggagctgacaggcctcatccagaacacgattcgctccaaatggcacgaagttctggag

SEQ ID NO: 2564 - protein, 346 aa, synthetic construct
  REGION 1..346: note = variant of RNA ligase 2 from Klebsiella phage KP179
MHHHHHHGGSNMFAYYSSLENHTNAKFISKIRGAGFLMHTVEWVAREKIHGTNFSVIITPTEIVPAKRTGPILEDESFFGHEIIMKKYMDSFVKVQNMLNAMDLVSVQIFGEFAGGGIQKGVDYGDKDLYVFDILSDSGNEKVYWDDYRVESFCTTVGLKLAPLLGRGSFAELSQYPNDFKSLVNRYNELVDTVGLEMANKHVFGPQASSETGLAEGYVLKPVYPRFFNVGTRVAIKCKNSKFSEKAKLISPIKAKVELTENDKRLLGIFSEYVTWNRVSNVLSHIGSVTAKDFGRVSGLTMKDIIREAAREGHDLLFADNPSAVLKELTGLIQNTIRSKWHEVLE

SEQ ID NO: 2565 - DNA, 1038 bp, synthetic construct
  misc_feature 1..1038: note = variant of RNA ligase 2 from Klebsiella phage KP179
  source 1..1038: mol_type = other DNA
atgcatcaccatcaccatcacggtggcagcaacatgtttgcgtattattcaagtctggaaaaccataccaatgccaagttcattagcaagatccgtggtgcaggcttcctgatgcacaccgtggaatgggtagctcgcgagaagattcatggaacgaactttagcgttatcattactccgaccgaaatcgtgccagccaaacgcacagggccgatcttggaagatgagagcttctttggtcatgaaattatcatgaaaaaatatatggactccttcgtgaaggtgcagaacatgctgaatgcgatggatcttgttagcgtgcaaatctttggcgaatttgcgggtggtggcattcagaaaggcgtcgattacggagacaaagatttctatgtgtttgacatcctgtctgatagcgggaacgagaaaacgtactgggatgactatcgcgtcgaatcgttttgcaccactgtgggtctgaaattagcgcctctgctgggacgtggtagtttcgctgaactgtcccagtacccaaacgatttcaaaagcctggtgaaccgttataatgaattggttgacacggtcggcctggagatggccaataaacacgtctttggtccgcaagcgtcttctgaaactggcctggcagaaggctacgttcttaaacccgtctatccgcgcttctttaatgtgggtacgcgcgtggcgattaaatgcaagaactccaaattttcggagaaagccaaactgatttcgccaattaaagcgaaggttgaactgacggagaacgataaacgtctgctcggaatctttagcgaatatgttacctggaatcgcgtcagtaacgtactgtcacatattggctcagtgaccgccaaagattttgggcgtgtttcgggtctgacgatgaaagacatcattcgcgaagcagcacgcgaaggccatgatctgttgttcgctgataacccgtcggcggtgctgaaggagctgacaggcctcatccagaacacgattcgctccaaatggcacgaagttctggag

SEQ ID NO: 2566 - protein, 346 aa, synthetic construct
  REGION 1..346: note = variant of RNA ligase 2 from Klebsiella phage KP179
MHHHHHHGGSNMFAYYSSLENHTNAKFISKIRGAGFLMHTVEWVAREKIHGTNFSVIITPTEIVPAKRTGPILEDESFFGHEIIMKKYMDSFVKVQNMLNAMDLVSVQIFGEFAGGGIQKGVDYGDKDFYVFDILSDSGNEKTYWDDYRVESFCTTVGLKLAPLLGRGSFAELSQYPNDFKSLVNRYNELVDTVGLEMANKHVFGPQASSETGLAEGYVLKPVYPRFFNVGTRVAIKCKNSKFSEKAKLISPIKAKVELTENDKRLLGIFSEYVTWNRVSNVLSHIGSVTAKDFGRVSGLTMKDIIREAAREGHDLLFADNPSAVLKELTGLIQNTIRSKWHEVLE

SEQ ID NO: 2567 - DNA, 1038 bp, synthetic construct
  misc_feature 1..1038: note = variant of RNA ligase 2 from Klebsiella phage KP179
  source 1..1038: mol_type = other DNA
atgcatcaccatcaccatcacggtggcagcaacatgtttgcgtattattcaagtctggaaaaccataccaatgccaagttcattagcaagatccgtggtgcaggcttcctgatgcacaccgtggaatgggtagctcgcgagaagattcatggaacgaactttagcgttatcattactccgaccgaaatcgtgccagccaaacgcacagggccgatcttggaagatgagagcttctttggtcatgaaattatcatgaaaaaatatatggactccttcgtgaaggtacagaacatgctgaatgcgatggatcttgttagcgtgcaaatctttggcgaatttgcgggtggtggcattcagaaaggcgtcgattacggagacaaagatttctatgtgtttgacatcctgtctgatagcgggaacgagaaagtttactgggatgactatcgcgtcgaatcgttttgcaccactgtgggtctgaaattagcgcctctgctgggacgtggtagtttcgctgaactgtcccagtacccaaacgatttcaaaagcctggtgaaccgttataatgaattggttgacacggtcggcctggagatggccaataaacacgtctttggtccgcaagcgtcttctgaaaagggcctggcagaaggctacgttcttaaacccgtctatccgcgcttctttaatgtgggtacgcgcgtggcgattaaatgcaagaactccaaattttcggagaaagccaaactgatttcgccaattaaagcgaaggttgaactgacggagaacgataaacgtctgctcggaatctttagcgaatatgttacctggaatcgcgtcagtaacgtactgtcacatattggctcagtgaccgccaaagattttgggcgtgtttcgggtctgacgatgaaagacatcattcgcgaagcagcacgcgaaggccatgatctgttgttcgctgataacccgtcggcggtgctgaaggagctgacaggcctcatccagaacacgattcgctccaaatggcacgaagttctggag

SEQ ID NO: 2568 - protein, 346 aa, synthetic construct
  REGION 1..346: note = variant of RNA ligase 2 from Klebsiella phage KP179
MHHHHHHGGSNMFAYYSSLENHTNAKFISKIRGAGFLMHTVEWVAREKIHGTNFSVIITPTEIVPAKRTGPILEDESFFGHEIIMKKYMDSFVKVQNMLNAMDLVSVQIFGEFAGGGIQKGVDYGDKDFYVFDILSDSGNEKVYWDDYRVESFCTTVGLKLAPLLGRGSFAELSQYPNDFKSLVNRYNELVDTVGLEMANKHVFGPQASSEKGLAEGYVLKPVYPRFFNVGTRVAIKCKNSKFSEKAKLISPIKAKVELTENDKRLLGIFSEYVTWNRVSNVLSHIGSVTAKDFGRVSGLTMKDIIREAAREGHDLLFADNPSAVLKELTGLIQNTIRSKWHEVLE

SEQ ID NO: 2569 - DNA, 1038 bp, synthetic construct
  misc_feature 1..1038: note = variant of RNA ligase 2 from Klebsiella phage KP179
  source 1..1038: mol_type = other DNA
atgcatcaccatcaccatcacggtggcagcaacatgtttgcgtattattcaagtctggaaaaccataccaatgccaagttcattagcaagatccgtggtgcaggcttcctgatgcacaccgtggaatgggtagctcgcgagaagattcatggaacgaactttagcgttatcattactccgaccgaaatcgtgccagccaaacgcacagggccgatcttggaagatgagagcttctttggtcatgaaattatcatgaaaaaatatatggactccttcgtgaaggtgcagaacatgctgaatgcgatggatcttgttagcgtgcaaatctttggcgaatttgcgggtggtggcattcagaaaggcgtcgattacggagacaaagatttctatgtgtttgacatcctgtctgatagcgggaacgagaaagtttactgggatgactatcgcgtcgaatcgttttgcaccactgtgggtctgaaattagcgcctctgctgggacgtggtagtttcgctgaactgtcccagtacccaaacgatttcaaaagcctggtgaaccgttataatgaattggttgacacggtcggcctggagatggccaataaacacgtctttggtccgcaaatttcttctgaaactggcctggcagaaggctacgttcttaaacccgtctatccgcgcttctttaatgtgggtacgcgcgtggcgattaaatgcaagaactccaaattttcggagaaagccaaactgatttcgccaattaaagcgaaggttgaactgacggagaacgataaacgtctgctcggaatctttagcgaatatgttacctggaatcgcgtcagtaacgtactgtcacatattggctcagtgaccgccaaagattttgggcgtgtttcgggtctgacgatgaaagacatcattcgcgaagcagcacgcgaaggccatgatctgttgttcgctgataacccgtcggcggtgctgaaggagctgacaggcctcatccagaacacgattcgctccaaatggcacgaagttctggag

SEQ ID NO: 2570 - protein, 346 aa, synthetic construct
  REGION 1..346: note = variant of RNA ligase 2 from Klebsiella phage KP179
MHHHHHHGGSNMFAYYSSLENHTNAKFISKIRGAGFLMHTVEWVAREKIHGTNFSVIITPTEIVPAKRTGPILEDESFFGHEIIMKKYMDSFVKVQNMLNAMDLVSVQIFGEFAGGGIQKGVDYGDKDFYVFDILSDSGNEKVYWDDYRVESFCTTVGLKLAPLLGRGSFAELSQYPNDFKSLVNRYNELVDTVGLEMANKHVFGPQISSETGLAEGYVLKPVYPRFFNVGTRVAIKCKNSKFSEKAKLISPIKAKVELTENDKRLLGIFSEYVTWNRVSNVLSHIGSVTAKDFGRVSGLTMKDIIREAAREGHDLLFADNPSAVLKELTGLIQNTIRSKWHEVLE

SEQ ID NO: 2571 - DNA, 1038 bp, synthetic construct
  misc_feature 1..1038: note = variant of RNA ligase 2 from Klebsiella phage KP179
  source 1..1038: mol_type = other DNA
atgcatcaccatcaccatcacggtggcagcaacatgtttgcgtattattcaagtctggaaaaccataccaatgccaagttcattagcaagatccgtggtgcaggcttcctgatgcacaccgtggaatgggtagctcgcgagaagattcatggaacgaactttagcgttatcattactccgaccgaaatcgtgccagccaaacgcacagggccgatcttggaagatgagagcttctttggtcatgaaattatcatgaaaaaatatatggactccttcgtgaaggtgcagaacatgctgaatgcgatggatcttgttagcgtgcaaatctttggcgaatttgcgggtggtggcattcagaaaggcgtcgattacggagacaaagatttctatgtgtttgacatcctgtctgatagcgggaacgagaaagtttactgggatgactatcgcgtcgaatcgttttgcaccactgtgggtctgaaattagcgcctctgctgggacgtggtagtttcgctgaactgtcccagtacccaaacgatttcaaaagcctggtgaaccgttataatgaattggttgacacggtcggcctggagatggccaataaacacgtctttggtccgcaagcgtcttctgaaactggcctggcagaaggctacgttcttaaacccgtctatccgcgcttctttaatgtgggtacgcgcgtggcgattaaatgcaagaactccaaattttcggagaaagccaaactgatttcgccaattaaagcgaaggttgaactgacggagaacgataaacgtctgctcggaatctttagcgaatatgttacctggaatcgcgtcagtaacgtactgtcacatattggctcagtgaccgccaaagattttgggcgtgcgtcgggtctgacgatgaaagacatcattcgcgaagcagcacgcgaaggccatgatctgttgttcgctgataacccgtcggcggtgctgaaggagctgacaggcctcatccagaacacgattcgctccaaatggcacgaagttctggag

SEQ ID NO: 2572 - protein, 346 aa, synthetic construct
  REGION 1..346: note = variant of RNA ligase 2 from Klebsiella phage KP179
MHHHHHHGGSNMFAYYSSLENHTNAKFISKIRGAGFLMHTVEWVAREKIHGTNFSVIITPTEIVPAKRTGPILEDESFFGHEIIMKKYMDSFVKVQNMLNAMDLVSVQIFGEFAGGGIQKGVDYGDKDFYVFDILSDSGNEKVYWDDYRVESFCTTVGLKLAPLLGRGSFAELSQYPNDFKSLVNRYNELVDTVGLEMANKHVFGPQASSETGLAEGYVLKPVYPRFFNVGTRVAIKCKNSKFSEKAKLISPIKAKVELTENDKRLLGIFSEYVTWNRVSNVLSHIGSVTAKDFGRASGLTMKDIIREAAREGHDLLFADNPSAVLKELTGLIQNTIRSKWHEVLE

SEQ ID NO: 2573 - DNA, 1038 bp, synthetic construct
  misc_feature 1..1038: note = variant of RNA ligase 2 from Klebsiella phage KP179
  source 1..1038: mol_type = other DNA
atgcatcaccatcaccatcacggtggcagcaacatgtttgcgtattattcaagtctggaaaaccataccaatgccaagttcattagcaagatccgtggtgcaggcttcctgatgcacaccgtggaatgggtagctcgcgagaagattcatggaacgaactttagcgttatcattactccgaccgaaatcgtgccagccaaacgcacagggccgatcttggaagatgagagcttctttggtcatgaaattatcatgaaaaaatatatggactccttcgtgaaggtgcagaacatgctgaatgcgatggatcttgttagcgtgcaaatctttggcgaatttgcgggtggtggcattcagaaaggcgtcgattacggagacaaagatttctatgtgtttgacatcctgtctgatagcgggaacgagaaagtttactgggatgactatcgcgtcgaatcgttttgcaccactgtgggtctgaaattagcgcctctgctgggacgtggtagtttcgctgaactgtcccagtacccaaacgatttcaaaagcctggtgaaccgttataatgaattggttgacacggtcggcctggagatggccaataaacacgtctttggtccacaagcgtcttctgaaactggcctggcagaaggctacgttcttaaacccgtctatccgcgcttctttaatgtgggtacgcgcgtggcgattaaatgcaagaactccaaattttcggagaaagccaaactgatttcgccaattaaagcgaaggttgaactgacggagaacgataaacgtctgctcggaatctttagcgaatatgttacctggaatcgcgtcagtaacgtactgtcacatgatggctcagtgaccgccaaagattttgggcgtgtttcgggtctgacgatgaaagacatcattcgcgaagcagcacgcgaaggccatgatctgttgttcgctgataacccgtcggcggtgctgaaggagctgacaggcctcatccagaacacgattcgctccaaatggcacgaagttctggag

SEQ ID NO: 2574 - protein, 346 aa, synthetic construct
  REGION 1..346: note = variant of RNA ligase 2 from Klebsiella phage KP179
MHHHHHHGGSNMFAYYSSLENHTNAKFISKIRGAGFLMHTVEWVAREKIHGTNFSVIITPTEIVPAKRTGPILEDESFFGHEIIMKKYMDSFVKVQNMLNAMDLVSVQIFGEFAGGGIQKGVDYGDKDFYVFDILSDSGNEKVYWDDYRVESFCTTVGLKLAPLLGRGSFAELSQYPNDFKSLVNRYNELVDTVGLEMANKHVFGPQASSETGLAEGYVLKPVYPRFFNVGTRVAIKCKNSKFSEKAKLISPIKAKVELTENDKRLLGIFSEYVTWNRVSNVLSHDGSVTAKDFGRVSGLTMKDIIREAAREGHDLLFADNPSAVLKELTGLIQNTIRSKWHEVLE

SEQ ID NO: 2575 - DNA, 1038 bp, synthetic construct
  misc_feature 1..1038: note = variant of RNA ligase 2 from Klebsiella phage KP179
  source 1..1038: mol_type = other DNA
atgcatcaccatcaccatcacggtggcagcaacatgtttgcgtattattcaagtctggaaaaccataccaatgccaagttcattagcaagatccgtggtgcaggcttcctgatgcacaccgtggaatgggtagctcgcgagaagattcatggaacgaactttagcgttatcattactccgaccgaaatcgtgccagccaaacgcacagggccgatcttggaagatgagagcttctttggtcatgaaattatcatgaaaaaatatatggactccttcgtgaaggtgcagaacatgctgaatgcgatggatcttgttagcgtgcaaatctttggcgaatttgcgggtggtggcattcagaaaggcgtcgattacggagacaaagatttctatgtgtttgacatcctgtctgatagcgggaacgagaaagtttactgggatgactatcgcgtcgaatcgttttgcaccactcagggtctgaaattagcgcctctgctgggacgtggtagtttcgctgaactgtcccagtacccaaacgatttcaaaagcctggtgaaccgttataatgaattggttgacacggtcggcctggagatggccaataaacacgtctttggtccgcaagcgtcttctgaaactggcctggcagaaggctacgttcttaaacccgtctatccgcgcttctttaatgtgggtacgcgcgtggcgattaaatgcaagaactccaaattttcggagaaagccaaactgatttcgccaattaaagcgaaggttgaactgacggagaacgataaacgtctgctcggaatctttagcgaatatgttacctggaatcgcgtcagtaacgtactgtcacatattggctcagtgaccgccaaagattttgggcgtgtttcgggtctgacgatgaaagacatcattcgcgaagcagcacgcgaaggccatgatctgttgttcgctgataacccgtcggcggtgctgaaggagctgacaggcctcatccagaacacgattcgctccaaatggcacgaagttctggag

SEQ ID NO: 2576 - protein, 346 aa, synthetic construct
  REGION 1..346: note = variant of RNA ligase 2 from Klebsiella phage KP179
MHHHHHHGGSNMFAYYSSLENHTNAKFISKIRGAGFLMHTVEWVAREKIHGTNFSVIITPTEIVPAKRTGPILEDESFFGHEIIMKKYMDSFVKVQNMLNAMDLVSVQIFGEFAGGGIQKGVDYGDKDFYVFDILSDSGNEKVYWDDYRVESFCTTQGLKLAPLLGRGSFAELSQYPNDFKSLVNRYNELVDTVGLEMANKHVFGPQASSETGLAEGYVLKPVYPRFFNVGTRVAIKCKNSKFSEKAKLISPIKAKVELTENDKRLLGIFSEYVTWNRVSNVLSHIGSVTAKDFGRVSGLTMKDIIREAAREGHDLLFADNPSAVLKELTGLIQNTIRSKWHEVLE

SEQ ID NO: 2577 - DNA, 1038 bp, synthetic construct
  misc_feature 1..1038: note = variant of RNA ligase 2 from Klebsiella phage KP179
  source 1..1038: mol_type = other DNA
atgcatcaccatcaccatcacggtggcagcaacatgtttgcgtattattcaagtctggaaaaccataccaatgccaagttcattagcaagatccgtggtgcaggcttcctgatgcacaccgtggaatgggtagctcgcgagaagattcatggaacgaactttagcgttatcattactccgaccgaaatcgtgccagccaaacgcacagggccgatcttggaagatgagagcttctttggtcatgaaattatcatgaaaaaatatatggactccttcgtgaaggtgcagaacatgctgaatgcgatggatcttgttagcgtgcaaatctttggcgaatttgcgggtggtggcattcagaaaggcgtcgattacggagacaaagatttctatgtgtttgacatcctgtctgatagcgggaacgagaaagtttactgggatgactatcgcgtcgaatcgttttgcaccactgtgggtctgaaattagcgcctctgctgggacgtggtagtttcgctgaactgtcccagtacccaaacgatttcaaaagcctggtgaaccgttataatgaattggttgacacggtcggcctggagatggccaataaacacgtctttggtccgcaagcgtcttctgaaactggcctggcagaaggctacgttcttaaacccgtctatccgcgcttctttaatgtgggtacgcgcgtggcgattaaatgcaagaactccaaattttcggagaaagccaaactgatttcgccaattaaagcgaaggttgaactgacggagaacgataaacgtctgctcggaatctttagcgaatatgttacctggaatcgcgtcagtaacgtactgtcacatattggctcagtgaccgccaaagattttgggcgtgtttcgggtctggcgatgaaagacatcattcgcgaagcagcacgcgaaggccatgatctgttgttcgctgataacccgtcggcggtgctgaaggagctgacaggcctcatccagaacacgattcgctccaaatggcacgaagttctggag

SEQ ID NO: 2578 - protein, 346 aa, synthetic construct
  REGION 1..346: note = variant of RNA ligase 2 from Klebsiella phage KP179
MHHHHHHGGSNMFAYYSSLENHTNAKFISKIRGAGFLMHTVEWVAREKIHGTNFSVIITPTEIVPAKRTGPILEDESFFGHEIIMKKYMDSFVKVQNMLNAMDLVSVQIFGEFAGGGIQKGVDYGDKDFYVFDILSDSGNEKVYWDDYRVESFCTTVGLKLAPLLGRGSFAELSQYPNDFKSLVNRYNELVDTVGLEMANKHVFGPQASSETGLAEGYVLKPVYPRFFNVGTRVAIKCKNSKFSEKAKLISPIKAKVELTENDKRLLGIFSEYVTWNRVSNVLSHIGSVTAKDFGRVSGLAMKDIIREAAREGHDLLFADNPSAVLKELTGLIQNTIRSKWHEVLE

SEQ ID NO: 2579 - DNA, 1038 bp, synthetic construct
  misc_feature 1..1038: note = variant of RNA ligase 2 from Klebsiella phage KP179
  source 1..1038: mol_type = other DNA
atgcatcaccatcaccatcacggtggcagcaacatgtttgcgtattattcaagtctggaaaaccataccaatgccaagttcattagcaagatccgtggtgcaggcttcctgatgcacaccgtggaatgggtagctcgcgagaagattcatggaacgaactttagcgttatcattactccgaccgaaatcgtgccagccaaacgcacagggccgatcttggaagatgagagcttctttggtcatgaaattatcatgaaaaaatatatggactccttcgtgaaggtgcagaacatgctgaatgcgatggatcttgttagcgtgcaaatctttggcgaatttgcgggtggtggcattcagaaaggcgtcgattacggagacaaagatttctatgtgtttgacatcctgtctgatagcgggaacgagaaagttctgtgggatgactatcgcgtcgaatcgttttgcaccactgtgggtctgaaattagcgcctctgctgggacgtggtagtttcgctgaactgtcccagtacccaaacgatttcaaaagcctggtgaaccgttataatgaattggttgacacggtcggcctggagatggccaataaacacgtctttggtccgcaagcgtcttctgaaactggcctggcagaaggctacgttcttaaacccgtctatccgcgcttctttaatgtgggtacgcgcgtggcgattaaatgcaagaactccaaattttcggagaaagccaaactgatttcgccaattaaagcgaaggttgaactgacggagaacgataaacgtctgctcggaatctttagcgaatatgttacctggaatcgcgtcagtaacgtactgtcacatattggctcagtgaccgccaaagattttgggcgtgtttcgggtctgacgatgaaagacatcattcgcgaagcagcacgcgaaggccatgatctgttgttcgctgataacccgtcggcggtgctgaaggagctgacaggcctcatccagaacacgattcgctccaaatggcacgaagttctggag

SEQ ID NO: 2580 - protein, 346 aa, synthetic construct
  REGION 1..346: note = variant of RNA ligase 2 from Klebsiella phage KP179
MHHHHHHGGSNMFAYYSSLENHTNAKFISKIRGAGFLMHTVEWVAREKIHGTNFSVIITPTEIVPAKRTGPILEDESFFGHEIIMKKYMDSFVKVQNMLNAMDLVSVQIFGEFAGGGIQKGVDYGDKDFYVFDILSDSGNEKVLWDDYRVESFCTTVGLKLAPLLGRGSFAELSQYPNDFKSLVNRYNELVDTVGLEMANKHVFGPQASSETGLAEGYVLKPVYPRFFNVGTRVAIKCKNSKFSEKAKLISPIKAKVELTENDKRLLGIFSEYVTWNRVSNVLSHIGSVTAKDFGRVSGLTMKDIIREAAREGHDLLFADNPSAVLKELTGLIQNTIRSKWHEVLE

SEQ ID NO: 2581 - DNA, 1038 bp, synthetic construct
  misc_feature 1..1038: note = variant of RNA ligase 2 from Klebsiella phage KP179
  source 1..1038: mol_type = other DNA
atgcatcaccatcaccatcacggtggcagcaacatgtttgcgtattattcaagtctggaaaaccataccaatgccaagttcattagcaagatccgtggtgcaggcttcctgatgcacaccgtggaatgggtagctcgcgagaagattcatggaacgaactttagcgttatcattactccgaccgaaatcgtgccagccaaacgcacagggccgatcttggaagatgagagcttctttggtcatgaaattatcatgaaaaaatatatggactccttcgtgaaggtgcagaacatgctgaatgcgatggatcttgttggggtgcaaatctttggcgaatttgcgggtggtggcattcagaaaggcgtcgattacggagacaaagatttctatgtgtttgacatcctgtctgatagcgggaacgagaaagtttactgggatgactatcgcgtcgaatcgttttgcaccactgtgggtctgaaattagcgcctctgctgggacgtggtagtttcgctgaactgtcccagtacccaaacgatttcaaaagcctggtgaaccgttataatgaattggttgacacggtcggcctggagatggccaataaacacgtctttggtccgcaagcgtcttctgaaactggcctggcagaaggctacgttcttaaacccgtctatccgcgcttctttaatgtgggtacgcgcgtggcgattaaatgcaagaactccaaattttcggagaaagccaaactgatttcgccaattaaagcgaaggttgaactgacggagaacgataaacgtctgctcggaatctttagcgaatatgttacctggaatcgcgtcagtaacgtactgtcacatattggctcagtgaccgccaaagattttgggcgtgtttcgggtctgacgatgaaagacatcattcgcgaagcagcacgcgaaggccatgatctgttgttcgctgataacccgtcggcggtgctgaaggagctgacaggcctcatccagaacacgattcgctccaaatggcacgaagttctggag

SEQ ID NO: 2582 - protein, 346 aa, synthetic construct
  REGION 1..346: note = variant of RNA ligase 2 from Klebsiella phage KP179
MHHHHHHGGSNMFAYYSSLENHTNAKFISKIRGAGFLMHTVEWVAREKIHGTNFSVIITPTEIVPAKRTGPILEDESFFGHEIIMKKYMDSFVKVQNMLNAMDLVGVQIFGEFAGGGIQKGVDYGDKDFYVFDILSDSGNEKVYWDDYRVESFCTTVGLKLAPLLGRGSFAELSQYPNDFKSLVNRYNELVDTVGLEMANKHVFGPQASSETGLAEGYVLKPVYPRFFNVGTRVAIKCKNSKFSEKAKLISPIKAKVELTENDKRLLGIFSEYVTWNRVSNVLSHIGSVTAKDFGRVSGLTMKDIIREAAREGHDLLFADNPSAVLKELTGLIQNTIRSKWHEVLE

SEQ ID NO: 2583 - DNA, 1038 bp, synthetic construct
  misc_feature 1..1038: note = variant of RNA ligase 2 from Klebsiella phage KP179
  source 1..1038: mol_type = other DNA
atgcatcaccatcaccatcacggtggcagcaacatgtttgcgtattattcaagtctggaaaaccataccaatgccaagttcattagcaagatccgtggtgcaggcttcctgatgcacaccgtggaatgggtagctcgcgagaagattcatggaacgaactttagcgttatcattactccgaccgaaatcgtgccagccaaacgcacagggccgatcttggaagatgagagcttctttggtcatgaaattatcatgaaaaaatatatggactccttcgtgaaggtgcagaacatgctgaatgcgatggatcttgttagcgtgcaaatctttggcgaatttgcgggtggtggcattcagaaaggcgtcgattacggagacaaagatttctatgtgtttgacatcctgtctgatagcgggaacgagaaagtttactgggatgactatcgcgtcgaatcgttttgcaccactgtgggtctgaaattagcgcctctgctgggacgtggtagtttcgctgaactgtcccagtacccaaacgatttcaaaagcctggtgaaccgttataatgaattggttgacacggtcggcctggagatggccaataaacacgtctttggtccgcaagcgtcttctgaaactggcctggcagaaggctacgttcttaaacccgtctatccgcgcttctttaatgtgggtacgcgcgtggcgattaaatgcaagaactccaaattttcggagaaagccaaactgatttcgccaattaaagcgaaggttgaactgacggagaacgataaacgtctgctcggaatctttagcgaatatgttacctggaatcgcgtcagtaacgtagtttcacatattggctcagtgaccgccaaagattttgggcgtgtttcgggtctgacgatgaaagacatcattcgcgaagcagcacgcgaaggccatgatctgttgttcgctgataacccgtcggcggtgctgaaggagctgacaggcctcatccagaacacgattcgctccaaatggcacgaagttctggag

SEQ ID NO: 2584 - protein, 346 aa, synthetic construct
  REGION 1..346: note = variant of RNA ligase 2 from Klebsiella phage KP179
MHHHHHHGGSNMFAYYSSLENHTNAKFISKIRGAGFLMHTVEWVAREKIHGTNFSVIITPTEIVPAKRTGPILEDESFFGHEIIMKKYMDSFVKVQNMLNAMDLVSVQIFGEFAGGGIQKGVDYGDKDFYVFDILSDSGNEKVYWDDYRVESFCTTVGLKLAPLLGRGSFAELSQYPNDFKSLVNRYNELVDTVGLEMANKHVFGPQASSETGLAEGYVLKPVYPRFFNVGTRVAIKCKNSKFSEKAKLISPIKAKVELTENDKRLLGIFSEYVTWNRVSNVVSHIGSVTAKDFGRVSGLTMKDIIREAAREGHDLLFADNPSAVLKELTGLIQNTIRSKWHEVLE

SEQ ID NO: 2585 - DNA, 1038 bp, synthetic construct
  misc_feature 1..1038: note = variant of RNA ligase 2 from Klebsiella phage KP179
  source 1..1038: mol_type = other DNA
atgcatcaccatcaccatcacggtggcagcaacatgtttgcgtattattcaagtctggaaaaccataccaatgccaagttcattagcaagatccgtggtgcaggcttcctgatgcacaccgtggaatgggtagctcgcgagaagattcatggaacgaactttagcttgatcattactccgaccgaaatcgtgccagccaaacgcacagggccgatcttggaagatgagagcttctttggtcatgaaattatcatgaaaaaatatatggactccttcgtgaaggtgcagaacatgctgaatgcgatggatcttgttagcgtgcaaatctttggcgaatttgcgggtggtggcattcagaaaggcgtcgattacggagacaaagatttctatgtgtttgacatcctgtctgatagcgggaacgagaaagtttactgggatgactatcgcgtcgaatcgttttgcaccactgtgggtctgaaattagcgcctctgctgggacgtggtagtttcgctgaactgtcccagtacccaaacgatttcaaaagcctggtgaaccgttataatgaattggttgacacggtcggcctggagatggccaataaacacgtctttggtccgcaagcgtcttctgaaactggcctggcagaaggctacgttcttaaacccgtctatccgcgcttctttaatgtgggtacgcgcgtggcgattaaatgcaagaactccaaattttcggagaaagccaaactgatttcgccaattaaagcgaaggttgaactgacggagaacgataaacgtctgctcggaatctttagcgaatatgttacctggaatcgcgtcagtaacgtactgtcacatattggctcagtgaccgccaaagattttgggcgtgtttcgggtctgacgatgaaagacatcattcgcgaagcagcacgcgaaggccatgatctgttgttcgctgataacccgtcggcggtgctgaaggagctgacaggcctcatccagaacacgattcgctccaaatggcacgaagttctggag

SEQ ID NO: 2586 - protein, 346 aa, synthetic construct
  REGION 1..346: note = variant of RNA ligase 2 from Klebsiella phage KP179
MHHHHHHGGSNMFAYYSSLENHTNAKFISKIRGAGFLMHTVEWVAREKIHGTNFSLIITPTEIVPAKRTGPILEDESFFGHEIIMKKYMDSFVKVQNMLNAMDLVSVQIFGEFAGGGIQKGVDYGDKDFYVFDILSDSGNEKVYWDDYRVESFCTTVGLKLAPLLGRGSFAELSQYPNDFKSLVNRYNELVDTVGLEMANKHVFGPQASSETGLAEGYVLKPVYPRFFNVGTRVAIKCKNSKFSEKAKLISPIKAKVELTENDKRLLGIFSEYVTWNRVSNVLSHIGSVTAKDFGRVSGLTMKDIIREAAREGHDLLFADNPSAVLKELTGLIQNTIRSKWHEVLE

SEQ ID NO: 2587 - DNA, 1038 bp, synthetic construct
  misc_feature 1..1038: note = variant of RNA ligase 2 from Klebsiella phage KP179
  source 1..1038: mol_type = other DNA
atgcatcaccatcaccatcacggtggcagcaacatgtttgcgtattattcaagtctggaaaaccataccaatgccaagttcattagcaagatccgtggtgcaggcttcctgatgcacaccgtggaatgggtagctcgcgagaagattcatggaacgaactttagcgttatcattactccgaccgaaatcgtgccagccaaacgcacagggccgatcttggaagatgagagcttctttggtcatgaaattatcatgaaaaaatatatggactccttcgtgaaggtgcagaacatgctgaatgcgatggatcttgttagcgtgcaaatctttggcgaatttgcgggtggtggcattcagaaaggcgtcgattacggagacaaagatttctatgtgtttgacatcctgtctgatagcgggaacgagaaagtttactgggatgactatcgcgtcgaatcgttttgcaccactgtgggtctgaaattagcgcctctgctgggacgtggtagtttcgctgaactgtcccagtacccaaacgatttcaaaagcctggtgaaccgttataatgaattggttgacacggtcggcctggagatggccaataaacacgtctttggtccgcaagcgtcttctgaaactggcctggcagaaggctacgttcttaaacccgtctatccgcgcttctttaatgtgggtacgcgcgtggcgattaaatgcaagaactccaaattttcggagaaagccaaactgatttcgccaattaaagcgaaggttgaactgacggagaacgataaacgtctgctcggaatctttagcgaatatgttacctggaatcgcgtcagtaacgtactgtcacatattggctcagtgaccagtaaagattttgggcgtgtttcgggtctgacgatgaaagacatcattcgcgaagcagcacgcgaaggccatgatctgttgttcgctgataacccgtcggcggtgctgaaggagctgacaggcctcatccagaacacgattcgctccaaatggcacgaagttctggag

SEQ ID NO: 2588 - protein, 346 aa, synthetic construct
  REGION 1..346: note = variant of RNA ligase 2 from Klebsiella phage KP179
MHHHHHHGGSNMFAYYSSLENHTNAKFISKIRGAGFLMHTVEWVAREKIHGTNFSVIITPTEIVPAKRTGPILEDESFFGHEIIMKKYMDSFVKVQNMLNAMDLVSVQIFGEFAGGGIQKGVDYGDKDFYVFDILSDSGNEKVYWDDYRVESFCTTVGLKLAPLLGRGSFAELSQYPNDFKSLVNRYNELVDTVGLEMANKHVFGPQASSETGLAEGYVLKPVYPRFFNVGTRVAIKCKNSKFSEKAKLISPIKAKVELTENDKRLLGIFSEYVTWNRVSNVLSHIGSVTSKDFGRVSGLTMKDIIREAAREGHDLLFADNPSAVLKELTGLIQNTIRSKWHEVLE

(The sequence listing continues in the following parts.)

1. An engineered RNA ligase, or a functional fragment thereof, comprising an amino acid sequence having at least 70%, 75%, 80%, 81%, 82%, 83%, 84%, 85%, 86%, 87%, 88%, 89%, 90%, 91%, 92%, 93%, 94%, 95%, 96%, 97%, 98%, 99%, or more sequence identity to a reference sequence corresponding to residues 12 to 346 of an even-numbered SEQ ID NO. of SEQ ID NOs: 2-1470 and 1478-3058, or to a reference sequence corresponding to an even-numbered SEQ ID NO. of SEQ ID NOs: 2-1470 and 1478-3058, wherein the amino acid sequence comprises one or more substitutions relative to the reference sequence corresponding to residues 12 to 346 of SEQ ID NO: 2, 54, 244, 648, 862, 956, 1088, 1416, 1612, 1840, 1866, 1954, 2062, 2674, 2754, or 2786, or relative to the reference sequence corresponding to SEQ ID NO: 2, 54, 244, 648, 862, 956, 1088, 1416, 1612, 1840, 1866, 1954, 2062, 2674, 2754, or 2786.

2-4. (canceled)

5. The engineered RNA ligase of claim 1, comprising an amino acid sequence having at least 70%, 75%, 80%, 81%, 82%, 83%, 84%, 85%, 86%, 87%, 88%, 89%, 90%, 91%, 92%, 93%, 94%, 95%, 96%, 97%, 98%, 99%, or more sequence identity to the reference sequence corresponding to residues 12 to 346 of an even-numbered SEQ ID NO. of SEQ ID NOs: 4-1470 and 1478-3058, or to the reference sequence corresponding to an even-numbered SEQ ID NO. of SEQ ID NOs: 4-1470 and 1478-3058, wherein the amino acid sequence comprises one or more substitutions relative to the reference sequence corresponding to residues 12 to 346 of SEQ ID NO: 2, or relative to the reference sequence corresponding to SEQ ID NO: 2.

6. (canceled)

7. The engineered RNA ligase of claim 1, wherein the amino acid sequence of the engineered RNA ligase comprises at least a substitution at amino acid position 10, 11, 12, 13, 15, 17, 18, 21, 23, 25, 26, 28, 29, 30, 32, 33, 37, 38, 39, 40, 41, 42, 45, 52, 54, 56, 57, 58, 60, 61, 62, 64, 65, 67, 71, 73, 74, 75, 77, 80, 81, 83, 84, 86, 87, 89, 90, 91, 93, 95, 97, 99, 100, 101, 102, 103, 104, 105, 106, 107, 109, 113, 114, 116, 117, 119, 121, 122, 123, 125, 126, 127, 128, 129, 131, 135, 137, 140, 141, 143, 144, 148, 150, 154, 156, 157, 158, 159, 160, 161, 162, 165, 169, 170, 171, 173, 175, 177, 178, 179, 181, 183, 184, 185, 190, 191, 192, 193, 194, 197, 198, 204, 206, 208, 210, 212, 213, 214, 215, 218, 223, 224, 226, 228, 229, 230, 232, 236, 238, 241, 243, 247, 248, 249, 250, 251, 252, 253, 254, 255, 256, 257, 258, 260, 261, 264, 265, 266, 267, 268, 270, 271, 272, 274, 276, 277, 280, 282, 283, 286, 288, 289, 290, 291, 292, 294, 295, 296, 297, 298, 299, 300, 301, 302, 305, 306, 307, 310, 311, 315, 316, 317, 318, 323, 324, 325, 326, 327, 330, 331, 332, 334, 335, 336, 337, 338, 341, 342, 344, 345, or 346, or any combinations thereof, wherein the amino acid positions are relative to the reference sequence corresponding to residues 12 to 346 of SEQ ID NO: 2, or relative to the reference sequence corresponding to SEQ ID NO: 2.

8. The engineered RNA ligase of claim 1, wherein the amino acid sequence of the engineered RNA ligase comprises at least a substitution or amino acid residue 10F, 11G/N, 12A/F/L/M/P/R/T/V, 13W, 15M, 17P, 18A/H, 21S, 23K/T, 25A/D/F/G/L/M/S/T, 26L, 28A/L/M/V, 29D/S, 30A/L/T/V/W, 32E, 33A/I/L/T/V, 37A/F/K/L/M/R, 38A/E/L/R/S/T/V, 39P, 40D/I/P/S, 41E/I, 42T, 45S, 52C, 54L, 56I/L, 57V, 58M, 60A/C/D/R/S/V, 61A, 62A/V, 64A/Q/W, 65C, 67R, 71T, 73Q/W, 74D, 75A/D, 77M, 80E, 81Y, 83A/E/G/L/T/V, 84V, 86D/G/L, 87E, 89C/D/E/G/L/M/N/Q/R/S/T/V/W/Y, 90E/F, 91A/E/V, 93K/V, 95A/C/G/I, 97A/E, 991, 100A/G/H/L/R/S/T/V, 101P/V/W, 102T, 103G/V, 104T, 105K/L/R, 106G/L/M/Q/R/V/W, 107M/S, 109F/L, 113L/M, 114E, 116L, 117A/Q, 119L, 121N, 122C/F/G/L/Q/T/W, 123K/R, 125K/T, 126M, 127P, 128E, 129L/W, 131T, 135A/H/M/Q/V, 137N/R, 140I, 141D/G, 143A/C/E/F/H/M/S/T/V, 144L, 148F, 150D/L, 154S/V, 156G/H/Q/S, 157F/L/Q/V, 158R/S, 159F, 160R, 161M/V, 162C, 165M, 169G/N, 170H/Y, 171S, 173M, 175A, 177K, 178V, 179E, 181E/N/P/R/S, 183L/V, 184L, 185C/F/G/K/M/P/S/T/V, 190I/M, 191C, 192D/E/F/L/N, 193K/Q, 194A/G/V, 197W, 198M, 204W, 206L, 208H/I/K/L/P/T, 210G/V, 212E/G/I/K/L, 213D/N/R/T, 214A/C/H/K/L/Q/Y, 215G/T, 218F, 223C, 224A/Q/R, 226R, 228D/L, 229W, 230T/V, 232G/M/N/R/S, 236L/V, 238K/S/V, 241E/G/Q/R, 243H, 247I/L/R/S, 248F/G/I/K/T, 249K/L/R/S, 250E/I/S, 251C/E/F/G/L/R/S/T/Y, 252A/Q, 253L/W, 254E/K/L/N/Q/S/V, 255N/S/V/Y, 256A/E/G/M/S/W, 257D/E/G, 258D/M/P/V, 260G, 261D/P/T, 264A/E/G/S/V, 265A/F, 266C/I/L, 267I/M, 268F/G/M, 270L/M/V, 271A/E/G/T, 272M/S, 274A, 276A/G/M/V, 277A, 280L/N/W, 282A/M, 283C/V, 286D/E/F/M/V, 288E/L/R/W, 289A/D/E/I/P/T, 290D/H/N/P, 291H/L/Q/R/S/T/W, 292N/S, 294A/S/V/Y, 295C/F/G/K/L/M/P/Q/R/S/T/V/Y, 296E/G/L/Q/W, 297A/I/L, 298C/I/K/R/S/V, 299E/I/K/Q/R/T/V, 300A, 301A/F/I/L/M/V, 302A/C/I/L/S, 305V, 306G/L/T, 307K/R, 310H/L/M/N/Q/R/S/T, 311C, 315E/S, 316I/L/Y, 317E/F/G/Q/V/W, 318A/E/G/S, 323E/G, 324D/G/M, 325L, 326C/L, 327E/G/M/S, 330A/D/E/G/K/R, 331D/G/R/S/W, 332E/H/W, 334E/R, 335H/Q, 336I/L/M, 337A/V, 338G/L/M, 341A, 342R/S/T, 344K, 345Q/S, or 346S, or any combinations thereof, wherein the amino acid positions are relative to the reference sequence corresponding to residues 12 to 346 of SEQ ID NO: 2, or relative to the reference sequence corresponding to SEQ ID NO: 2.

9. The engineered RNA ligase of claim 1, wherein the amino acid sequence of the engineered RNA ligase comprises at least a substitution at amino acid position 10, 11, 12, 13, 17, 21, 23, 25, 26, 28, 29, 30, 32, 37, 38, 40, 41, 42, 45, 52, 54, 56, 57, 58, 60, 61, 62, 64, 65, 67, 71, 73, 74, 75, 77, 80, 83, 84, 87, 90, 91, 93, 97, 99, 100, 101, 102, 103, 104, 105, 106, 107, 109, 113, 114, 121, 122, 123, 125, 126, 127, 128, 129, 131, 135, 137, 140, 141, 143, 148, 150, 157, 158, 160, 161, 162, 165, 169, 170, 173, 178, 179, 184, 190, 191, 192, 193, 194, 197, 198, 204, 206, 208, 210, 213, 215, 218, 223, 228, 229, 232, 236, 238, 241, 243, 248, 249, 250, 251, 252, 253, 254, 255, 258, 261, 264, 265, 267, 268, 270, 271, 272, 274, 276, 277, 282, 286, 289, 290, 292, 294, 295, 297, 298, 299, 300, 301, 302, 305, 311, 318, 323, 324, 325, 327, 332, 336, 338, 341, 344, or 346; a substitution or amino acid residue 18A/H, 33A/I/T/V, 39P, 86D/L, 89C/D/E/L/N/Q/R/S/T/V/Y, 95A/C/G/I, 116L, 117A/Q, 119L, 144L, 154S/V, 156G/H/S, 171S, 175A, 177K, 181E/N/P/R/S, 183L, 212E/G/K/L, 224A/Q/R, 226R, 230T/V, 247I/L/R/S, 256E/G/M/S/W, 257D/E/G, 260G, 280L/W,283C/V, 288L/R/W, 291S, 296E/G/L/Q/W, 306G/T, 307K/R, 310H/L/M/N/Q/R/S/T, 315E, 316I/Y, 317E/F/G/Q/V/W, 326C/L, 330A/D/E/G/K, 331D/G/S, 334E, 335Q, 337A/V, 338G/L/M, 342R/S/T, or 345Q/S; or any combinations thereof, wherein the amino acid positions are relative to the reference sequence corresponding to residues 12 to 346 of SEQ ID NO: 2, or relative to the reference sequence corresponding to SEQ ID NO: 2.

10. (canceled)

11. The engineered RNA ligase of claim 1, wherein the amino acid sequence of the engineered RNA ligase comprises at least a substitution at amino acid position 11, 12, 23, 25, 29, 37, 38, 75, 86, 89, 93, 101, 122, 143, 157, 183, 192, 194, 198, 212, 214, 230, 241, 248, 249, 250, 251, 254, 266, 268, 280, 291, 295, 298, 307, 316, 318, 326, 330, or 331, or any combinations thereof, wherein the amino acid positions are relative to the reference sequence corresponding to residues 12 to 346 of SEQ ID NO: 2, or relative to the reference sequence corresponding to SEQ ID NO: 2.

12. (canceled)

13. (canceled)

14. The engineered RNA ligase of claim 1, wherein the amino acid sequence of the engineered RNA ligase comprises at least a substitution or substitution set at amino acid position(s) 256, 258, 254, 251, 248, 37, 54, 232, 15, 71, 26, 116, 38, 25, 106/251, 52, 33, 247, 37/249/266/316/330/334/335, 21, 11/37/249/266/316, 261, 11/266/316, 11/248/249/266, 331, 11/248/249, 255, 37/249/266/316/334, 266, 11/37/156/249/335, 37/156/248/249/266/334, 334, 156, 11/266/316/334, 11/39/156/248/316, 11/249, 37/156,107/251, 156/249/316, 37/156/316, 11/37/156/249, 11/37/334, 194, 37/316,175, 11/156/249/316, 11/37, 252, 12, 37/266, 11/37/156/266, 11/37/156/248/266, 37/236/248/249, 37/156/248/249, 11/266/330/335, 249, 11/156/248/249/316, 37/249/316, 11, 11/156, 11/37/249, 330, 316, 156/249/266/335, 249/266/316/330/335, 11/156/249, 266/316/330/334/335, 156/248/249/316/334, 37/156/248/249/316, 156/266, 248/249, 156/249/316/330/335, 218, 37/156/248/249/266, 11/37/156/248/249/316, 37/156/316/330, 11/37/248/249/316/330, 11/37/248/249, 249/330/335, 11/37/156/330/334, 40, 11/37/148/249/316, 83, 323, 193, 335, or 257, wherein the amino acid positions are relative to the reference sequence corresponding to residues 12 to 346 of SEQ ID NO: 2, or relative to the reference sequence corresponding to SEQ ID NO: 2.

15-17. (canceled)

18. The engineered RNA ligase of claim 1, comprising an amino acid sequence having at least 70%, 75%, 80%, 81%, 82%, 83%, 84%, 85%, 86%, 87%, 88%, 89%, 90%, 91%, 92%, 93%, 94%, 95%, 96%, 97%, 98%, 99%, or more sequence identity to the reference sequence corresponding to residues 12 to 346 of an even-numbered SEQ ID NO. of SEQ ID NOs: 4-1470 and 1478-3058, or to the reference sequence corresponding to an even-numbered SEQ ID NO. of SEQ ID NOs: 4-1470 and 1478-3058, wherein the amino acid sequence comprises one or more substitutions relative to the reference sequence corresponding to residues 12 to 346 of SEQ ID NO: 54, 244, 648, 862, 956, 1088, 1416, 1612, 1840, 1866, 1954, 2062, 2674, 2754, or 2786, or relative to the reference sequence corresponding to SEQ ID NO: 54, 244, 648, 862, 956, 1088, 1416, 1612, 1840, 1866, 1954, 2062, 2674, 2754, or 2786.

19. The engineered RNA ligase of claim 18, wherein the amino acid sequence of the engineered RNA ligase comprises at least a substitution at amino acid position 10, 11, 12, 13, 15, 17, 18, 21, 23, 25, 26, 28, 29, 30, 32, 33, 37, 38, 39, 40, 41, 42, 45, 52, 54, 56, 57, 58, 60, 61, 62, 64, 65, 67, 71, 73, 74, 75, 77, 80, 81, 83, 84, 86, 87, 89, 90, 91, 93, 95, 97, 99, 100, 101, 102, 103, 104, 105, 106, 107, 109, 113, 114, 116, 117, 119, 121, 122, 123, 125, 126, 127, 128, 129, 131, 135, 137, 140, 141, 143, 144, 148, 150, 154, 156, 157, 158, 159, 160, 161, 162, 165, 169, 170, 171, 173, 175, 177, 178, 179, 181, 183, 184, 185, 190, 191, 192, 193, 194, 197, 198, 204, 206, 208, 210, 212, 213, 214, 215, 218, 223, 224, 226, 228, 229, 230, 232, 236, 238, 241, 243, 247, 248, 249, 250, 251, 252, 253, 254, 255, 256, 257, 258, 260, 261, 264, 265, 266, 267, 268, 270, 271, 272, 274, 276, 277, 280, 282, 283, 286, 288, 289, 290, 291, 292, 294, 295, 296, 297, 298, 299, 300, 301, 302, 305, 306, 307, 310, 311, 315, 316, 317, 318, 323, 324, 325, 326, 327, 330, 331, 332, 334, 335, 336, 337, 338, 341, 342, 344, 345, or 346, or any combinations thereof, wherein the amino acid positions are relative to the reference sequence corresponding to residues 12 to 346 of SEQ ID NO: 54, 244, 648, 862, 956, 1088, 1416, 1612, 1840, 1866, 1954, 2062, 2674, 2754, or 2786, or relative to the reference sequence corresponding to SEQ ID NO: 54, 244, 648, 862, 956, 1088, 1416, 1612, 1840, 1866, 1954, 2062, 2674, 2754, or 2786.

20. (canceled)

21. The engineered RNA ligase of claim 18, wherein the amino acid sequence of the engineered RNA ligase comprises at least a substitution at amino acid position 10, 11, 12, 13, 17, 21, 23, 25, 26, 28, 29, 30, 32, 37, 38, 40, 41, 42, 45, 52, 54, 56, 57, 58, 60, 61, 62, 64, 65, 67, 71, 73, 74, 75, 77, 80, 83, 84, 87, 90, 91, 93, 97, 99, 100, 101, 102, 103, 104, 105, 106, 107, 109, 113, 114, 121, 122, 123, 125, 126, 127, 128, 129, 131, 135, 137, 140, 141, 143, 148, 150, 157, 158, 160, 161, 162, 165, 169, 170, 173, 178, 179, 184, 190, 191, 192, 193, 194, 197, 198, 204, 206, 208, 210, 213, 215, 218, 223, 228, 229, 232, 236, 238, 241, 243, 248, 249, 250, 251, 252, 253, 254, 255, 258, 261, 264, 265, 267, 268, 270, 271, 272, 274, 276, 277, 282, 286, 289, 290, 292, 294, 295, 297, 298, 299, 300, 301, 302, 305, 311, 318, 323, 324, 325, 327, 332, 336, 338, 341, 344, or 346; a substitution or amino acid residue 18A/H, 33A/I/T/V, 39P, 86D/L, 89C/D/E/L/N/Q/R/S/T/V/Y, 95A/C/G/I, 116L, 117A/Q, 119L, 144L, 154S/V, 156G/H/S, 171S, 175A, 177K, 181E/N/P/R/S, 183L, 212E/G/K/L, 224A/Q/R, 226R, 230T/V, 247I/L/R/S, 256E/G/M/S/W, 257D/E/G, 260G, 280L/W, 283C/V, 288L/R/W, 291S, 296E/G/L/Q/W, 306G/T, 307K/R, 310H/L/M/N/Q/R/S/T, 315E, 316I/Y, 317E/F/G/Q/V/W, 326C/L, 330A/D/E/G/K, 331D/G/S, 334E, 335Q, 337A/V, 338G/L/M, 342R/S/T, or 345Q/S; or any combinations thereof, wherein the amino acid positions are relative to the reference sequence corresponding to residues 12 to 346 of SEQ ID NO: 54, 244, 648, 862, 956, 1088, 1416, 1612, 1840, 1866, 1954, 2062, 2674, 2754, or 2786, or relative to the reference sequence corresponding to SEQ ID NO: 54, 244, 648, 862, 956, 1088, 1416, 1612, 1840, 1866, 1954, 2062, 2674, 2754, or 2786.

22. (canceled)

23. The engineered RNA ligase of claim 18, wherein the amino acid sequence of the engineered RNA ligase comprises at least a substitution at amino acid position 11, 12, 23, 25, 29, 37, 38, 75, 86, 89, 93, 101, 122, 143, 157, 183, 192, 194, 198, 212, 214, 230, 241, 248, 249, 250, 251, 254, 266, 268, 280, 291, 295, 298, 307, 316, 318, 326, 330, or 331, or any combinations thereof, wherein the amino acid positions are relative to the reference sequence corresponding to residues 12 to 346 of SEQ ID NO: 54, 244, 648, 862, 956, 1088, 1416, 1612, 1840, 1866, 1954, 2062, 2674, 2754, or 2786, or relative to the reference sequence corresponding to SEQ ID NO: 54, 244, 648, 862, 956, 1088, 1416, 1612, 1840, 1866, 1954, 2062, 2674, 2754, or 2786.

24-27. (canceled)

28. The engineered RNA ligase of claim 18, wherein the amino acid sequence of the engineered RNA ligase comprises a substitution or substitution set at amino acid positions(s) 156/232/334/335, 12/254/256, 12/230, 12/230/251, 12/230/251/254/256, 12/38/230, 230/251, 12/38/254, 230/256, 254, 230, 12/230/254, 12/38/230/251/256, 12/251, 12/251/254/256, 38, 12/230/256, 12, 12/25/38/230/251, 12/38/102/230/251/256, 12/256, 38/230/256, 256, 12/230/251/256, 230/251/254, 230/254, 251/254, 12/25/230, 38/230, 38/251, 12/38/230/256, 102, 251, 12/25/251/256, 12/102/256, 12/38/230/251/254/256, 12/251/256, 102/230/251/254/256, 12/38/251, 12/230/251/254, 156/248/334/335, 12/25/38, 12/102/230/251/254, 12/38/251/254, 12/251/254, 12/102, 38/230/251/254/256, 12/25/230/251/256, 12/230/311, 12/254, 38/230/251/254, 12/38/251/256, 156/334/335, 257/258/334, 12/25/38/251/256, 334, 12/25/230/254/256, 38/251/256, 12/38/230/251/254, 12/38, 257/258/334/335, 12/38/254/256, 232/248/257/258/334/335, 156/258/334/335, 156/249/334/335, 12/102/230/254, 25, 156/257/258/334/335, 12/102/230, 156/248/257/258/334, 248/249/334/335, 232/257/258/334/335, 334/335, 156/334, 12/38/102/256, 156/257/334/335, 12/140/251/254, 251/254/256, 248/334/335, 156/258/334, 156/248/330/335, 12/38/256, 232/334/335, 156/249/334, 330/334/335, 156/248/334, 156/335, 257/334, 248/334, 232/248/334/335, 12/25, 1938/230/251/256, 156/248/249/334/335, 330/335, 248/257/334/335, 232/248/334, 156/232/248/334/335, 232/257/330/334, 156/248/291/334/335, 156/232/248/257/258/334, 156/232/249/334/335, 12/25, 156/248/330/334/335, 156/248/249/334, 232/248/330/335, 156/232/330/334/335, 197, 338, 327, 192, 331, 326, 345, 101, 100, 141, 198, 64, 306, 317, 265, 296, 194, 62, 90, 307, 103, 210, 105, or 61, wherein the amino acid positions are relative to the reference sequence corresponding to residues 12 to 346 of SEQ ID NO: 54, or relative to the reference sequence corresponding to SEQ ID NO: 54.

29. (canceled)

30. (canceled)

31. The engineered RNA ligase of claim 18, wherein the amino acid sequence of the engineered RNA ligase comprises at least a substitution or substitution set at amino acid position(s) 141/197/326/327, 100/101/338, 141/198/326, 64/100/101, 100/338, 101/141/198/326, 101/198/326/327, 198/326, 64/100/101/338/345, 197/326, 198/327, 141/198/327, 198/326/327, 197/326/327, 64/100/338, 64/100/101/156/197/338, 64/100/101/338, 100/197/338, 197/338, 101/197/326, 64/100/197/338, 101/198, 141/197/327, 64/100/101/197/338, 101/326, 101/197/326/327, 197/327, 197, 141/197, 101, 101/198/326, 64/197/198/338, 141, 101/141, 100/101/197/338, 141/326, 338, 326, 197/198/338, 64/101/338, 64/197/198, 101/197, 100/101, 100/109/197/338, 101/197/338, 197/198, 141/326/327, 100/197, 64/100, 64/197/338, 100/197/198, 101/338, 141/327, 101/306, 64/100/101/197, 101/326/327, 100, 327, 326/345, 64/100/101/197/198, 326/327, 64/101,100/101/197, 101/327, 64/100/197/198/338, 306, 64/338, 101/141/326/327, 64/101/197/338, or 101/198/306/327, wherein the amino acid positions are relative to the reference sequence corresponding to residues 12 to 346 of SEQ ID NO: 244, or relative to the reference sequence corresponding to SEQ ID NO: 244.

32. (canceled)

33. (canceled)

34. The engineered RNA ligase of claim 18, wherein the amino acid sequence of the engineered RNA ligase comprises at least a substitution or substitution set at amino acid position(s) 194/330/331, 298, 331, 192/193/194/298, 330, 192/330/331, 192/193/194/331, 298/330/331, 194/298/330/331, 192/193/330/331, 192/298/331, 192/193, 194/330, 60/100/156, 193/296/331, 298/331, 193/194/330/331, 194, 194/298/331, 193/298, 193/330, 192, 192/193/194/298/331, 192/193/194/298/330, 192/193/298/331, 100/156, 62/100,298/330, 60/100,192/193/298/330/331, 100, 193/194/298, 338, 62, 247, 18, 37, 254, 33, 261, 251, 260, 12, 117, 256, 255, 38, 29, 25, or 252, wherein the amino acid positions are relative to the reference sequence corresponding to residues 12 to 346 of SEQ ID NO: 648, or relative to the reference sequence corresponding to SEQ ID NO: 648.

35. (canceled)

36. (canceled)

37. The engineered RNA ligase of claim 18, wherein the amino acid sequence of the engineered RNA ligase comprises a substitution or substitution set at amino acid positions(s) 254, 18/254,247/317, 37/317/342, 33, 18/156/254, 18, 156, 254/338, 254/307, 33/37/317, 37, 37/156/317, 156/265/317, 265/317, 156/254, 33/156/317, 317, 156/317, 37/317, 18/338,338, 156/247/317, 33/317, 37/247/265/317, 33/37/156/317, 156/247/296/317, 18/307,156/296/317, 156/247, 37/247/317, 18/254/307, 307, 265, 33/37, 18/156, 33/156/296/317, 18/156/254/338, 37/265/317, 33/37/156/247/317, 296, 33/296/317, 156/296, 247/296/317, 37/296/317, 247/296, 33/37/156, 296/317, 156/254/307, 18/156/307, or 33/37/265, wherein the amino acid positions are relative to the reference sequence corresponding to residues 12 to 346 of SEQ ID NO: 862, or relative to the reference sequence corresponding to SEQ ID NO: 862.

38. (canceled)

39. (canceled)

40. The engineered RNA ligase of claim 18, wherein the amino acid sequence of the engineered RNA ligase comprises at least
(a) a substitution or substitution set at amino acid position(s) 12/25/29/156, 12/255/256/257, 12/156/255, 247/252, 12/25, 12, 12/25/29/156/255, 256, 12/156, 12/25/156/255/256/257/261, 18/247/251, 25/255/256/257, 12/25/257, 255/257, 12/25/29/255/257, 256/257, 12/255/257, 12/156/255/256/257, 25, 18/38/251/252, 12/256/257/261, 12/29, 12/25/255/256/257/261, 38, 12/25/29/256/257, 29/257, 12/261,251, 249/251, 12/255, 12/29/156/256/257, 252, 255/257/261, 18, 29/255/257, 255/256/257, 12/25/29/156/256/257, 25/255/256/257/261, 29/255/256/257/261, 25/256, 18/38/247/252/327, 18/247, 25/29, 12/25/156/255/257, 18/156/251/252, 12/255/261, 25/255, 12/255/256/261, 156/255/257, 156/257, 12/156/256/257, 25/156/256/257, 12/25/29/156/257/261, 25/261, 12/156/255/256/261, 12/25/29/255/256/257, 38/252,255, 249/252, 12/156/255/256, 12/25/29/261, 257, 12/255/256, 12/29/255, 12/255/257/261, 12/156/257, 192/249/251/252, 12/25/29/255/261, 12/156/255/257, 12/29/255/257, 12/29/256/257, 18/252,249, 156/250, 38/251/252, 156/255/256/257, 25/257, 12/255/256/257/261, 25/156/261, 156/252, 12/25/255/256/257, 12/25/29/156/255/257, 29/156,251/252, 256/257/261, 25/156/255/256/257, 156/249/251/252, 25/29/255, 12/29/156, 255/256, 38/250/252, 247/249/252, 12/256/257, 60, 12/256, 12/156/256, 25/255/257/261, 12/25/29/255/256/261, 12/29/156/255/256, 12/25/156/255/256, 247/251/252, 256/261, 38/251, 12/25/29/156/261, 12/257,156/255/256/261, 12/25/156/255, 12/25/29/156/255/257/261, 12/29/256/261, 29/156/261, 25/29/156/257/261, 12/25/255/256/261, or 12/156/255/261, wherein the amino acid positions are relative to the reference sequence corresponding to residues 12 to 346 of SEQ ID NO: 956, or relative to the reference sequence corresponding to SEQ ID NO: 956; or
(b) a substitution at amino acid position 157, 183, 95, 185, 181, 213, 89, 28, 190, 214, or 143, or any combinations thereof, wherein the amino acid positions are relative to the reference sequence corresponding to residues 12 to 346 of SEQ ID NO: 956, or relative to the reference sequence corresponding to SEQ ID NO: 956.

41-43. (canceled)

44. The engineered RNA ligase of claim 18, wherein the amino acid sequence of the engineered RNA ligase comprises at least a substitution or substitution set at amino acid position(s) 95/157, 95/183/185/214, 89/183, 28/89/143/183, 28/143/157, 181/183, 143/181/183/214, 143/181/183, 89/143/183, 28/143/181/183, 143/157, 95/181/183, 157, 143/183, 89/143/157/183, 89/95/157, 89/157, 89/95/143/181, 95/143, 89/157/183/214, 143/214, 143/181/183/185, 28/95/143, 143/183/214, 28/95/183/214, 89/143/157, 28/95, 95/143/183/185, or 95/143/157/183, wherein the amino acid positions are relative to the reference sequence corresponding to residues 12 to 346 of SEQ ID NO: 1088, or relative to the reference sequence corresponding to SEQ ID NO: 1088.

45. (canceled)

46. (canceled)

47. The engineered RNA ligase of claim 18, wherein the amino acid sequence of the engineered RNA ligase comprises at least
(a) a substitution or substitution set at amino acid position(s) 83/137/150, 137/213, 137, 150/190, 143/150, 104/150, 60/143/150/190, 60/150/190/213, 104/137/154, 123/137, 137/150/154/190, 123/143/150, 60/104/143/150/213, 60/95/143/190, 123/137/190, 60/123,104/123, or 60/123/143, wherein the amino acid positions are relative to the reference sequence corresponding to residues 12 to 346 of SEQ ID NO: 1416, or relative to the reference sequence corresponding to SEQ ID NO: 1416; or
(b) a substitution or substitution set at amino acid position(s) 38, 249, 255, 23, 33, 25, 226, 29, 37, 10, 250, 75, 230, 77, 251, 228, 81, 224, 64, 254, 268, 65, 232, 332, 331, 330, 101, 307, 137, 223, 280, 289, 288, 342, 93, 296, 86, 241, 126, 277, 87, 247, 243, 84, 83, 192, 105, 25/29, 25/29/250, 25/29/75/77/250/255, 25/75/230, 25/77/226/255, 25/230,250/255, 29/75/226/230/255, 29/75/77, 29/75/77/226, 29/75/77/230/255, 29/226, 29/226/230, 29/230/255, 33/228, 33/249, 33/37/228, 33/37/38/228, 33/37/38/228/249, 33/38, 75/250/255, 75/226, 75/226/250/255, 75/226/230/250/255, 75/77, 75/77/255, 75/77/250/255, 75/77/226/255, 75/77/226/250/255, 75/77/230, 75/77/230/250, 75/230, 75/230/255, 75/230/250, 226/255, 226/250, 226/230, 226/230/255, 37/228, 37/228/249, 37/38, 37/38/228, 37/38/228/249, 37/38/249, 38/249/291, 10/228, 10/228/249, 10/33/249, 10/33/37, 10/33/37/38/249, 10/33/38/249, 10/33/38, 10/33/249/251, 10/33/37/228, 10/33/37/249, 10/33/37/38/228/249, 10/33/37/38, 10/249, 10/37, 10/37/228, 10/37/228/249, 10/37/249, 10/37/38/228, 10/37/38/228/249, 10/37/38, 10/38/249, 10/38, 10/38/228, 77/255, 77/250, 77/250/255, 77/226, 77/226/255, 77/230, 77/230/255, 230/255, 230/250, 230/250/255, 23/25/226/255, 23/25/226/230, or 23/25/230, wherein the amino acid positions are relative to the reference sequence corresponding to residues 12 to 346 of SEQ ID NO: 1416, or relative to the reference sequence corresponding to SEQ ID NO: 1416; or
(c) a substitution or substitution set at amino acid position(s) 86, 255, 306, 250, 75, 318, 335, 241, 248, 344, 38, 272, 83, 257, 258, or 323, wherein the amino acid positions are relative to the reference sequence corresponding to residues 12 to 346 of SEQ ID NO: 1416, or relative to the reference sequence corresponding to SEQ ID NO: 1416.

48-51. (canceled)

52. The engineered RNA ligase of claim 18, wherein the amino acid sequence of the engineered RNA ligase comprises at least a substitution or substitution set at amino acid position(s) 101, 291, 291/307, 331, 33/75, 33/75/249/291/331, 33/38, 33/93/249, 38/75/291/307, 38/75/249/250, 38/75/93/271, 38/93, 10/75, 10/38/75, 10/38/75/291, 10/38/75/249, 10/38/75/93, 64/224,224, 23/101/307, 23/268, 23/37/64/224/254, 23/64/81, 23/224/268, 23/224/254, 23, 23/64/224, 64, 75/249/307, 93, 33/38/75/249, 75/249, 25/38/75/93/291, 33/38/75, 75, or 23/254, wherein the amino acid positions are relative to the reference sequence corresponding to residues 12 to 346 of SEQ ID NO: 1612, or relative to the reference sequence corresponding to SEQ ID NO: 1612.

53. (canceled)

54. (canceled)

55. The engineered RNA ligase of claim 18, wherein the amino acid sequence of the engineered RNA ligase comprises at least a substitution or substitution set at amino acid position(s) 38/65/192, 38/65, 38/65/224, 38/64, 93/307, 38, 38/224, 38/192/224, 65, 192/224, 75/307, 75/250/268/307, 250/268/307/342, 224, 65/192,268, 64/192,250/268/291/342, 75/93/249/307/342, 250/291, 38/64/192, 38/64/224, 93/249/307, 38/64/86/192/241, 38/342,248/250/307, 75/77/250/268/307/342, 93/268, 192, 38/192, or 64, wherein the amino acid positions are relative to the reference sequence corresponding to residues 12 to 346 of SEQ ID NO: 1840, or relative to the reference sequence corresponding to SEQ ID NO:
1840.

56. (canceled)

57. (canceled)

58. The engineered RNA ligase of claim 18, wherein the amino acid sequence of the engineered RNA ligase comprises at least
(a) a substitution or substitution set at amino acid position(s) 38/248/251, 38/248/250/251/277, 248/250/251, 38/93/192/248/251, 38/192/248/251, 250/251, 38/248/250/251, 248/251/344, 192/248/250/251, 38/248/250, 38/93/250/251/277, 38/255/280/318, 248, 38/86/241/255/280/318/335, 38/255, 38, 318, 38/101/255/280, 38/318/335, 38/255/318, 192/250/251/344, 38/335,318/335, 38/277, 38/93/251, 192/251, 255, 38/64/318, 38/64/241/255/318, 251, 64/101/255/280/318, 38/101/255/280/318/335, 38/255/280, 38/251/277, 64/318, 38/64/255/318, 241/255/280/318, 38/86/101/241/318, 38/241, 38/255/318/335, 38/64/101/318, 38/64/255/280/318, 241/255/318, or 38/241/335, wherein the amino acid positions are relative to the reference sequence corresponding to residues 12 to 346 of SEQ ID NO: 1866, or relative to the reference sequence corresponding to SEQ ID NO: 1866; or
(b) a substitution or substitution set at amino acid position(s) 89, 122, 181, 28, 125, 157, 238, 330, 212, 143, 208, 290, 161, 214, 84, 270, 91, 295, 316, 286, 301, 170, 264, 289, 190, 183, 128, 60, 310, 131, 302, 267, 288, 185, 291, 129, 280, 298, 158/215, 28/122,276, 274, 271, 215, 294, 106, 58, 135, 45, 299, 315, 204, 332, 169, 305, 154, 158, 297, 95, 337, 324, 150, 179, 283, 206, 236, 266, 213, 336, 178, 99, 184, 282, 57, 177, 109, 191, 107, 160, 144, 56, 159, 341, 325, or 91, wherein the amino acid positions are relative to the reference sequence corresponding to residues 12 to 346 of SEQ ID NO: 1866, or relative to the reference sequence corresponding to SEQ ID NO: 1866.

59-61. (canceled)

62. The engineered RNA ligase of claim 18, wherein the amino acid sequence of the engineered RNA ligase comprises at least a substitution or substitution set at amino acid position(s) 93/232/291/306, 93/232/280/306, 93/241/257/306/335, 232/280, 93/291/306, 93/257, 93/306, 93/280,192/318, 93/280/291, 93/241/291/306, 192, 257/291, 241/257/306, 280/335, 93/291/306/335, 93/335, 93/232/335, 64/318, 93/241, 93/232/241/280, 64/192/318/323, 232/280/306, 93/232,291/335, 257/258, 93/232/241/257/258/280/335, 318/323, 93/241/291/335, 83/86/323, 257/258/291, 101/224/318, 83/192/255/296, 171/232/257/258/280, 83/224/255/318, 64/192/250/318, 101/296, 232/241/280, 64/255/318, 86/250/255, 83/86/101, 83/86, 93/241/258/335, 250/296/323, or 257/258/280, wherein the amino acid positions are relative to the reference sequence corresponding to residues 12 to 346 of SEQ ID NO: 1954, or relative to the reference sequence corresponding to SEQ ID NO: 1954.

63. (canceled)

64. (canceled)

65. The engineered RNA ligase of claim 18, wherein the amino acid sequence of the engineered RNA ligase comprises at least a substitution or substitution set at amino acid position(s) 83/84/330, 91/270/290, 83/181,161/290/330, 181/330, 161/270/330, 270/290, 83/84/270/318/330, 64/83/84/161/192/290/318, 91/161/290/318/330, 161/330, 161/214/270/290/330, 192/270/318, 91/161/192/330, 161/270, 181/270/330, 91/181/192/290, 161/290, 83/161/270, 83/192/318, 214/330, 83/161/290/330, 64/83/161/290/330, 83/161/192/214/318, 122/143/212/295, 161/192/270/290, 181/290, 91/161/214/270/290/318, 91/192/214/270, 214/290, 64/83/161/270/318/330, 91/161/181/330, 161/318/330, 91/270/290/330, 64/181/290/318, 181/270/290/318, 64/83/161/192/270/290/318/330, 64/83/161/214/290/318, 122/192/212, 64/83/91/192/214/330, 83/91/161/181/290/318, 91/161/192/214/270/290, 91/161/181/290/330, 83/91/125/161/270, 28/212,122/212, 28/64/83/122/143/192/212/295/318, 122/295, 91/161/192/318, 28/122/143/212, 64/161/290, 64/122/208/318, 64/83/192/290/318, 64/83/161/290, 181/192/318, 83/161/192/318, 214/270, 83/122, or 192/212, 28/122, wherein the amino acid positions are relative to the reference sequence corresponding to residues 12 to 346 of SEQ ID NO: 2062, or relative to the reference sequence corresponding to SEQ ID NO: 2062.

66. (canceled)

67. (canceled)

68. The engineered RNA ligase of claim 18, wherein the amino acid sequence of the engineered RNA ligase comprises at least
(a) a substitution or substitution set at amino acid position(s) 28/291/295/298/315, 28/95/291/295/298/315, 143/295/298/315, 291/295/298, 28/143/295/298, 28/291/295/298, 143/185/291/295/298, 28/143/185/291/298/336, 28/298,280/295, 143/298/336, 143/291/295/298, 291/295/298/315/336, 143/295/298, 28/143/295/298/336, 95/143/295/298, 143/280/290, or 143/291/298, wherein the amino acid positions are relative to the reference sequence corresponding to residues 12 to 346 of SEQ ID NO: 2674, or relative to the reference sequence corresponding to SEQ ID NO: 2674; or
(b) a substitution or substitution set at amino acid position(s) 208, 25, 90, 141, 258, 248, 318, 117, 299, 33, 80, 253, 83, 254, 256, 30, 327, 73, 100, 97, 119, 265, 296, 32, 156, 40, 105, 107, 41/114, 41, or 64, wherein the amino acid positions are relative to the reference sequence corresponding to residues 12 to 346 of SEQ ID NO: 2674, or relative to the reference sequence corresponding to SEQ ID NO: 2674; or
(c) a substitution or substitution set at amino acid position(s) 208, 25, 90, 141, 258, 248, 318, 117, 299, 33, 80, 253, 83, 254, 256, 30, 327, 73, 100, 97, 119, 265, 296, 32, 156, 40, 105, 107, 41/114, 41, or 64, wherein the amino acid positions are relative to the reference sequence corresponding to residues 12 to 346 of SEQ ID NO: 2674, or relative to the reference sequence corresponding to SEQ ID NO: 2674.

69-72. (canceled)

73. The engineered RNA ligase of claim 18, wherein the amino acid sequence of the engineered RNA ligase comprises at least a substitution or substitution set at amino acid position(s) 106/264/280, 280/330, 28/106/264/291, 28/264/280/330, 57/60/135/264/291, 28/135/264/280, 106/264/280/291, 28/106/264/280, 280/299, 28/57/89/106/264/280/291, 264, 185/291, 28/106/299, 28/214/264/299, 264/330, 28/89/214/291, 28/185/271/310, 122/271, or 89/106/135/264/280/330, wherein the amino acid positions are relative to the reference sequence corresponding to residues 12 to 346 of SEQ ID NO: 2754, or relative to the reference sequence corresponding to SEQ ID NO: 2754.

74. (canceled)

75. (canceled)

76. The engineered RNA ligase of claim 18, wherein the amino acid sequence of the engineered RNA ligase comprises at least a substitution or substitution set at amino acid position(s) 25/228/248/264, 32/113/228/248, 25/32/113/241/248/264/299, 25/113/248/264/318, 25/127/228/264/299/318, 25/113/228/248/327, 228/241/264, 264/299/318/327, 25/113/241/248/264/318, 25/127/248/299/318, 113/127/228/264/299, 25/127, 25/228/248/264/327, 25/113/264/299, 32/113/264/318, 25/32/241/264/327, 113/264/327, 25/127/228/248/318, 327, 32/113/254/264, 25/228/241/264, 25/113/228/241/318, or 113/327, wherein the amino acid positions are relative to the reference sequence corresponding to residues 12 to 346 of SEQ ID NO: 2786, or relative to the reference sequence corresponding to SEQ ID NO: 2786.

77. The engineered RNA ligase of claim 1, wherein the RNA ligase comprises an amino acid sequence comprising residues 12 to 346 of an even numbered SEQ ID NO. of SEQ ID NOs: 4-1470 and 1478-3058, or an amino acid sequence comprising an even numbered SEQ ID NO. of SEQ ID NOs: 4-1470 and 1478-3058.

78. An engineered RNA ligase comprising an amino acid sequence comprising
(a) in the N-terminal domain one or more amino acid residues 12A/F/L/M/P/R/T/V, 13W, 15M, 17P, 18A/H, 21S, 23K/T, 25A/D/F/G/L/M/S/T, 26L, 28A/L/M/V, 29D/S, 30A/L/T/V/W, 32E, 33A/I/L/T/V, 37A/F/K/L/M/R, 38A/E/L/R/S/T/V, 39P, 40D/I/P/S, 41E/I, 42T, 45S, 52C, 54L, 56I/L, 57V, 58M, 60A/C/D/R/S/V, 61A, 62A/V, 64A/Q/W, 65C, 67R, 71T, 73Q/W, 74D, 75A/D, 77M, 80E, 81Y, 83A/E/G/L/T/V, 84V, 86D/G/L, 87E, 89C/D/E/G/L/M/N/Q/R/S/T/V/W/Y, 90E/F, 91A/E/V, 93K/V, 95A/C/G/I, 97A/E, 991, 100A/G/H/L/R/S/T/V, 101P/V/W, 102T, 103G/V, 104T, 105K/L/R, 106G/L/M/Q/R/V/W, 107M/S, 109F/L, 113L/M, 114E, 116L, 117A/Q, 119L, 121N, 122C/F/G/L/Q/T/W, 123K/R, 125K/T, 126M, 127P, 128E, 129L/W, 131T, 135A/H/M/Q/V, 137N/R, 140I, 141D/G, 143A/C/E/F/H/M/S/T/V, 144L, 148F, 150D/L, 154S/V, 156G/H/Q/S, 157F/L/Q/V, 158R/S, 159F, 160R, 161M/V, 162C, 165M, 169G/N, 170H/Y, 171S, 173M, 175A, 177K, 178V, 179E, 181E/N/P/R/S, 183L/V, 184L, 185C/F/G/K/M/P/S/T/V, 190I/M, 191C, 192D/E/F/L/N, 193K/Q, 194A/G/V, 197W, 198M, 204W, 206L, 208H/I/K/L/P/T, 210G/V, 212E/G/I/K/L, 213D/N/R/T, 214A/C/H/K/L/Q/Y, 215G/T, 218F, 223C, 224A/Q/R, 226R, 228D/L, 229W, 230T/V, 232G/M/N/R/S, 236L/V, 238K/S/V, 241E/G/Q/R, and 243H, or at equivalent positions thereof;
(b) in the C-terminal domain one or more amino acid residues 256A/E/G/M/S/W, 257D/E/G, 258D/M/P/V, 260G, 261D/P/T, 264A/E/G/S/V, 265A/F, 266C/I/L, 267I/M, 268F/G/M, 270L/M/V, 271A/E/G/T, 272M/S, 274A, 276A/G/M/V, 277A, 280L/N/W, 282A/M, 283C/V, 286D/E/F/M/V, 288E/L/R/W, 289A/D/E/I/P/T, 290D/H/N/P, 291H/L/Q/R/S/T/W, 292N/S, 294A/S/V/Y, 295C/F/G/K/L/M/P/Q/R/S/T/V/Y, 296E/G/L/Q/W, 297A/I/L, 298C/I/K/R/S/V, 299E/I/K/Q/R/T/V, 300A, 301A/F/I/L/M/V, 302A/C/I/L/S, 305V, 306G/L/T, 307K/R, 310H/L/M/N/Q/R/S/T, 311C, 315E/S, 316I/L/Y, 317E/F/G/Q/V/W, 318A/E/G/S, 323E/G, 324D/G/M, 325L, 326C/L, 327E/G/M/S, 330A/D/E/G/K/R, 331D/G/R/S/W, 332E/H/W, 334E/R, 335H/Q, 336I/L/M, 337A/V, 338G/L/M, 341A, 342R/S/T, 344K, 345Q/S, and 346S; or at equivalent positions thereof; and/or
(c) in the linker region connecting the N-terminal and C-terminal domain one or more amino acid residues 247I/L/R/S, 248F/G/I/K/T, 249K/L/R/S, 250E/I/S, 251C/E/F/G/L/R/S/T/Y, 252A/Q, 253L/W, 254E/K/L/N/Q/S/V, and 255N/S/V/Y, or at equivalent positions thereof.

79-85. (canceled)

86. The engineered RNA ligase of claim 1, wherein the engineered RNA ligase has RNA ligase 2 activity and has at least one improved property as compared to a reference RNA ligase, wherein the improved property is selected from i) increased activity, ii) increased stability, iii) increased thermostability, iv) increased product yield, v) increased activity on polynucleotides ligase substrates with phosphorothioate internucleoside linkages, vi) increased activity on oligonucleotides with 2′-modifications, vii) increased substrate tolerance, or any combination of i), ii), iii), iv), v), vi), and vii), and wherein the reference RNA ligase has the sequence corresponding to residues 12 to 346 of SEQ ID NO: 2, 54, 244, 648, 862, 956, 1088, 1416, 1612, 1840, 1866, 1954, 2062, 2674, 2754, or 2786, or the sequence corresponding to SEQ ID NO: 2, 54, 244, 648, 862, 956, 1088, 1416, 1612, 1840, 1866, 1954, 2062, 2674, 2754, or 2786.

87-91. (canceled)

92. A recombinant polynucleotide comprising a polynucleotide sequence encoding an engineered RNA ligase of claim 1.

93-96. (canceled)

97. An expression vector comprising a recombinant polynucleotide of claim 92.

98. (canceled)

99. (canceled)

100. A host cell comprising an expression vector of claim 97.

101. (canceled)

102. (canceled)

103. A method of producing an engineered RNA ligase polypeptide in a host cell comprising culturing a host cell of claim 100, under suitable culture conditions such that the engineered RNA ligase is produced.

104. (canceled)

105. (canceled)

106. A composition comprising an RNA ligase of claim 1.

107. (canceled)

108. A method of ligating at least a first polynucleotide strand and a second polynucleotide strand, comprising contacting a first polynucleotide strand and a second polynucleotide strand with an engineered RNA ligase of claim 1 in presence of a nucleotide substrate under conditions suitable for ligation of the first polynucleotide strand to the second polynucleotide strand, wherein the first polynucleotide strand comprises a ligatable 5′-end and the second polynucleotide strand comprises a 3′-end ligatable to the 5′-end of the first polynucleotide.

109-126. (canceled)
